United States Patent Application Publication US 2017/0114356 A1 - sequence listing, part 111

SEQ ID NO: 209102 - DNA, 2655 bp, Zea Mays
aattatagcaaagagtcggaagaggtgggcccttccctccggcgtccgccgccgtcaccactcgtcgttttcctagttcgcacacccatccgccggcggcctccccccgtctcgatagtcgataccaggttctaaatggcgatggcgatgatggctatgcgacgcgcggtggcgctcggcgctcgccacatccccgccgccgcagcctcttcgttccgagtcgtctccctccgccacatgagcgcggacgcgggcgccgcgatggagaagatccgcgccgccgggctgctcaggacgcaggggcttatcgctgggcagtgggtggacgcctacgacggaaagaccattgaggtgcaaaatccagcaactggtgaggtcctggcaaacgtgtcctgtatgggcagcagagaaacatctgatgctattgcttctgctcacagtacattctattcttggagtaaactcactgcaagtgagaggagcaaggcactaagaaaatggtacgatctaattatttcacacaaggaagagcttgcacttctcatgacactggagcaggggaaacctatgaaagaagcccttggtgaggtcaattatggtgcaagtttcatagaatattttgcagaggaagcaaagcgtatatatggtgacatcattcccccaactttatctgatcgcagattgttggttttgaagcagcctgttggggtagttggagctattacaccatggaattttccattagcaatgataacccggaaggttggaccagctttggcctgtggctgtactgttgttgtcaagccatcggagttcacacctctgacagcattagctgcagcagatcttgctcttcaagcgggaataccagcgggtgcattgaatgttgtgatgggtaatgctgctgagataggtgatgcgttgctgcagagtacacaggtcagaaagattacattcactggatcaacagctgttgggaaaaaactgatggctggatctgcaaatactgtgaaaaaggtctccttggaacttggtgggaatgcaccttgcattgttttcgatgatgcggacattgatgttgctgttaaaggcagtcttgctgccaagtttcgtaacagtggacagacatgtgtttgtgcaaacaggatattggtgcaagaaggtatctacgaaaagtttgcaaaagcattcatccaggctgttcagagtttgaaggttggtaacggtctagaagagagtacatctcagggtcctctgattaacgaagctgctgttcaaaaggtggagaagttcataaatgacgcgacttcaaagggagcaaatgtcatgctaggtggtaaaagacacagcctgggaatgtcattttatgagccaactgtagtagggaatgtcagcaatgatatgcttcttttcagagaagaagtttttggtccagttgcaccccttataccgttcaaaactgaggaagaagcagttcatatggccaacgatacaaacgcaggcttagctgcatacatatttaccaagagcatacctcgttcatggcgtgtatctgaatctcttgagtacggcttagttggggtaaacgagggaattatttcaacggaggtggcgccatttggcggagtaaagcagtctggtctagggagagaaggatcgaagtacggcattgacgagtacttggagctcaagtacatctgcatgggcaacttgggttgagtcctgaagtcggcctctagctcgaaacactcggcagatgatgaacggagaaaccaggcgtgcttagaagggcgtgagttgcgtttagctgcaagatcggtcatgatggattgatggctgtgggagagcagttttagaataaatcgaataagccgcggagcattaaataaaagaagtggaaatgagatgtaaatggcgtggaactataaagtatggcttcaccttcgaacctgtatacggcctgtttggattctcttctaccgtcgcttcagccaccaggcttcccaccgaagccacccccgcaacggtccgatagaagcgggcttccgtagaaagctgggctagctgggcatctgtccagtccttggctctcgccacgctagggtttctttggtccccgctgcctcgcatcgctcctgtctcgccttctaggcggagctgggattcttctcaatgacgacaacgagattctaagttcttcacgacgattctgatcccttcaaacttcatcgatagttagcatttgttatccatgatttgtcgtagtgaattgaagtttttggatcgagttcatcggattccagccgatgtacaccgagagatcccctttcatactttccagcataggtacttctccaaagatccagttcaagttggtgtccccgcacaatcgagttaaccaaggtacattttgacgacttcatcaatatgtggaatgtcttgttcgttactggtctagggttcccgtgcgtattgttatttaggttactagtccttgttcatacctgttcttgtattgttattgattggttactagtccttgttcatacatgttcttgtattgtttgtttggtactagtccttgttcatatgtgttgttgcatctagcgaatggcatgcattactttgtattgccttctttgcttctagtcgttg

SEQ ID NO: 209103 - DNA, 1136 bp, Zea Mays
ctgccacccatctgcccggtcgccgaaacctagctcctctcaaagtctcgattctcctcgctcctcggccctcgcccacctctcgctagtcgctccccacttcccagtctctgtggccggacgccgcggcgagatggcctcgacctgcttccgcgccgccgcccgcgtggcctccgccgccagtcgctcggcggcggcctaccgctccgctccctccgcggcacgcgccggtgccggtggagctcgggtgctgcgcgggattgtcactgctgccgctgcacagtgcggtggcgtcagccaggctgacgtcgcggctgagcacggcgtcgagctgccgtgctctctctcagcgcgctgctgcaggcacatgactttgatagttcttgaaagatattactgggagcttgctgttttgcctcatacaatcatgaagaatgagtactttaacactgaaattgtactggaagactagagttatgttatttacctagaatggctagctacctctgttgaggaataccttgatgcaataatgtggcatcctttttcaacgttttccacattaattgattgtttacttgactcaatatgtctgtttacagtgcttaaattattatttatgcaagtctgctctctctctctcttgcattttttagactcccggttgcatcttggtgcgtgctttctttaatttttgtattcagcagagtttttgccgttgtagtttaccatatgattactcttcttttctcagatgaaaatgatggtacgtgaaacatttgcccagtgccttaagagatgggtcaatccgttcgaaggtgataaatggtcaaatggatggacgacctgctcatgtcatgctatcggactgaaatgatttatgtagagtagttatcgaattgaacatctggagcatgacttttcattacccgatctacaatcatggattttttttttcaaggtttgagttcgtgcctcctggtatccatgaaaaaaaaaacatgaagcacggtttgccgacgtctgggttatattcgtccagtgcaaatccgaatgctatctgtgataataacagcgaggaacaatttaaggtcaccatgtgattttgaaagttgtcgatatgattacgttagtac

SEQ ID NO: 209104 - DNA, 695 bp, Zea Mays
acccatctgcccggtcgccgaaacctagctcctctcaaagtctcgattctcctcgctcctcggccctcgcccacctctcgctagtcgctccccacttcccagtctctgtggccggacgccgcggcgagatggcctcgacctgcttccgcgccgccgcccgcgtggcctccgccgccagtcgctcggcggcggcctaccgctccgctccctccgcggcacgcgccgtggcaactgccgcccaccgcatatcgtgcttctccagggtgccggtggagctcgggtgctgcgcgggattgtcactgctgccgctgcacagtgcggtggcgtcagccaggctgacgtcgcggctgagcacggcgtcgagctgccgtgctctctctcagcgcgctgctgcaggcacatgactttgatagttcttgaaagatattactgggagcttgctgttttgcctcatacaatcatgaagaatgagtactttaacactgaaattgtactggaagactagagttatgttatttacctagaatggctagctacctctgttgaggaataccttgatgcaataatgtggcatcctttttcaacgttttccacattaattgattgtttacttgactcaatatgtctgtttacagtgcttaaattattatttatgcaagtctgctctctctctctcttgcattttttagactccc

SEQ ID NO: 209105 - DNA, 836 bp, Zea Mays
ataagtgtcatcttagattaaggagagtaaaaatcctgttgttagaagggtgctcactattaacaactcgaggtctagaatcggtgataacctcatggggcgacctccagagtctagaagttgttacctgcaacaaaatcaaggatgaggaaataactcctacccttgcagagcttttctccaatctcaaagagctgaagtggcggcccgacaacaagtcacttcttgctgcaagcctcgttggcactgggatgggaaagaagggcagggtatttttcaaaagggtatgaagtctgatctccttggtgctccattccctgtgatgcgcttcacctgttatctgccctgtaaggattgtcctctcttgcagcttatcttacctgcccatcaacgaatcaaagggaaggtgctcaacaattcagcaggtgttgctgcttagttggattgctagtcgaaactaggctaccgcacaaagttcctagttcttgacttgatcaaagtcaaccacgtttcttgatactcaaaagccgtacacaatgtggcatctgttcttccacttaagaccaaggacagtcataactagtcagaacctggtagtttgatgatgcacagtttcgggtaccaggcgcctgatttgtgtttgtacctgtgttcatgtgttgtaactgacaagctgaggtttgctcagaggagcctgaccgtagtatttctgtatgaggaaaagcattgcttcataaattatggcagagttaaattatggatagaaccagtagaaccacatgtttacagcacatggtctaactgtcgaatgaaagtgtgcctgacgtctgacctgc

SEQ ID NO: 209106 - DNA, 844 bp, Zea Mays
aaataatatcacatattcacatggactctacatgacgattgagtgctctagcatcaggtgtcagatgtcaggctcaggtcatgagtctgattgctagctaccatgggcccctcaatgagagtaaaaatcctgttgttagaagggtgctcactattaacaactcgaggtctagaatcggtgataacctcatggggcgacctccagagtctagaagttgttacctgcaacaaaatcaaggatgaggaaataactcctacccttgcagagcttttctccaatctcaaagagctgaagtggcggcccgacaacaagtcacttcttgctgcaagcctcgttggcactgggatgggaaagaagggcagggtatttttcaaaaggcttatcttacctgcccatcaacgaatcaaagggaaggtgctcaacaattcagcaggtgttgctgcttagttggattgctagtcgaaactaggctaccgcacaaagttcctagttcttgacttgatcaaagtcaaccacgtttcttgatactcaaaagccgtacacaatgtggcatctgttcttccacttaagaccaaggacagtcataactagtcagaacctggtagtttgatgatgcacagtttcgggtaccaggcgcctgatttgtgtttgtacctgtgttcatgtgttgtaactgacaagctgaggtttgctcagaggagcctgaccgtagtatttctgtatgaggaaaagcattgcttcataaattatggcagagttaaattatggatagaaccagtagaaccacatgtttacagcacatggtctaactgtcgaatgaaagtgtgcctgacgtctgacctgc

SEQ ID NO: 209107 - DNA, 2551 bp, Zea Mays
gaaaatttctttgcatgggtagtgtgtttggctaattctctcccaaaatgtggaagaaaataaagggaatactgtgcttgaattgcagcaaagatctatagaattcagttccattatacgaagacatcaatcgatgaaatcatctttgcttgaacggatgcctgtattggatgaagctaattatttggtgaagagagctgcttctatacaggctgcagttccatctgtaaattctgctccagcagtcacttctggaggcccatttaagcttcctaatggtgttggaaagcctgcagctcctttagctgatttgcttgatttgagttctgatgatgctccggtgactacctcggcccctacaacagcacctaatgattttctacaggatctgttgggcattggcttgactgattcgtctcctataggcagagctccgtctacaagcactgacattctgatggatcttctatctattggttcatcttctgtacaaaatggaccaccaacggcaaggtgctagatactaatttcaggatcggagaacatccgccgcgactccatgctccaggagatcaagtctgcctaccagattcttgcccacaagtaccatcctgatatgaataagagtcccgaagcagaagaaaagttcaaggagatcagtgctgcatatgaggtaatcttcagccttgtggcttcagctgaagtgctgaaggagaatagcactagaacgcgctgagtattatattagtttagcaacatgtgtttatttcctattagattagtttaattctaacatgattgattcaatcccgattcgtccacccgttgccgtgaattcctccgccaagcttggatctgaccgctgtactttgtgtcgccgcttgaatctacggttctcttcttccttgttcatcccgtggatctgtcccgtggtggtccaagcattcgatttctgctattataacatccaacgtcgttggcggtgaagagcaaggggacagataagcccaaaggcagcaaggggaacgtcgacaaggaccccaacaagcctgactcccaacattttttgtccgccggtgctgtagcggaagcccaaaggcagcaaggggaacgtcgacaaggaccccaacaaggctgactcccaacattttttgtccgccggtgctgtagcggcggcgctggtgagctcccccatgctgggctctgggatgctcccaggcgccgggttcggcgagacggggactgatctggtgctgggctctgggatgctcccaggcgccgctgccttgcagttcctcggtcgattcaagggaatattatcagtggaagagactggtgaatcaaaggccgtcaacgctagatggaggcaaagtgcctgctgcattgggccaccatgtttttggtgcgggctgttcctcacggaaccaacatatctacatatatttttcatcttctcatcaagggagtatatgggtcgggagcaaggttctacatgacctactagggtatgtaaaaattatggaagtagggccacgagatggtctacagaatgagaaggacatcgtgccaacacctgtaaaggttgagcttatacgaagattggccacatccggattacctgttgtggaggcaacgagttttgtatctccaaaacgggtacctcaggcaggactgaggctgtttcatcctcctctgctgcggggtgggctaggtcgtcaccatggcgtcactcgtggcgtcttgtgcagtagggacgacagcagggagctgtcaagatgggttacctcaagatggacgaggagttcctcaagaggggcgagagcgggggcacgtgctgcgtcatagcccttctccgaaagggtagactagtcgtctccaatattggagactgtcatgtggtgctcagccgagcagggaaggcaaaggtgctcacctctgaccatcgggcctcccaggaggatgagaagcaaagaattgagaatttgggtggatttgtggtgaattaccatgggacatggagagtccagggctccctggcagtgtctaggggcaatggggatggacacctaaagcagtgggttgtggctgaccgagagactagaacgctcctcatcgaccaccagtgcgagttcttgatacttgcttctgatggcctatggggtaagattgataatcaggatgcagttgaccaaaactctaggcattagcactaacagagaccggtggaaggcaggactttgctgcctaaagtttccatgagtcagcgctatttttgggtgtttaacattcattctttgtcatagaaccatttgttatattattagatgtaattagatctatttgattcattcttcggaaatatttattgagataatgcggggtgatctctcgcttcatgatccattgactgtaaaaggcgatttgcctatgttaatacaatgatatattctattcagagaaaacttactgtgtttttgttttgtatcctttttaatcctaaactgagaacactaaccgcatgtgtactaaatacaatagacaaatctctttt

SEQ ID NO: 209108 - DNA, 2268 bp, Zea Mays
gaaaatttctttgcatgggtagtgtgtttggctaattctctcccaaaatgtggaagaaaataaagggaatactgtgcttgaattgcagcaaagatctatagaattcagttccattatacgaagacatcaatcgatgaaatcatctttgcttgaacggatgcctgtattggatgaagctaattatttggtgaagagagctgcttctatacaggctgcagttccatctgtaaattctgctccagcagtcacttctggaggcccatttaagcttcctaatggtgttggaaagcctgcagctcctttagctgatttgcttgatttgagttctgatgatgctccggtgactacctcggcccctacaacagcacctaatgattttctacaggatctgttgggcattggcttgactgattcgtctcctataggatcggagaacatccgccgcgactccatgctccaggagatcaagtctgcctaccagattcttgcccacaagtaccatcctgatatgaataagagtcccgaagcagaagaaaagttcaaggagatcagtgctgcatatgagcttggatctgaccgctgtactttgtgtcgccgcttgaatctacggttctcttcttccttgttcatcccgtggatctgtcccgtggtggtccaagcattcgatttctgctattataacatccaacgtcgttggcggtgaagagcaaggggacagataagcccaaaggcagcaaggggaacgtcgacaaggaccccaacaagcctgactcccaacattttttgtccgccggtgctgtagcggaagcccaaaggcagcaaggggaacgtcgacaaggaccccaacaaggctgactcccaacattttttgtccgccggtgctgtagcggcggcgctggtgagctcccccatgctgggctctgggatgctcccaggcgccgggttcggcgagacggggactgatctggtgctgggctctgggatgctcccaggcgccgctgccttgcagttcctcggtcgattcaagggaatattatcagtggaagagactggtgaatcaaaggccgtcaacgctagatggaggcaaagtgcctgctgcattgggccaccatgtttttggtgcgggctgttcctcacggaaccaacatatctacatatatttttcatcttctcatcaagggagtatatgggtcgggagcaaggttctacatgacctactagggtatgtaaaaattatggaagtagggccacgagatggtctacagaatgagaaggacatcgtgccaacacctgtaaaggttgagcttatacgaagattggccacatccggattacctgttgtggaggcaacgagttttgtatctccaaaacgggtacctcaggcaggactgaggctgtttcatcctcctctgctgcggggtgggctaggtcgtcaccatggcgtcactcgtggcgtcttgtgcagtagggacgacagcagggagctgtcaagatgggttacctcaagatggacgaggagttcctcaagaggggcgagagcgggggcacgtgctgcgtcatagcccttctccgaaagggtagactagtcgtctccaatattggagactgtcatgtggtgctcagccgagcagggaaggcaaaggtgctcacctctgaccatcgggcctcccaggaggatgagaagcaaagaattgagaatttgggtggatttgtggtgaattaccatgggacatggagagtccagggctccctggcagtgtctaggggcaatggggatggacacctaaagcagtgggttgtggctgaccgagagactagaacgctcctcatcgaccaccagtgcgagttcttgatacttgcttctgatggcctatggggtaagattgataatcaggatgcagttgaccaaaactctaggcattagcactaacagagaccggtggaaggcaggactttgctgcctaaagtttccatgagtcagcgctatttttgggtgtttaacattcattctttgtcatagaaccatttgttatattattagatgtaattagatctatttgattcattcttcggaaatatttattgagataatgcggggtgatctctcgcttcatgatccattgactgtaaaaggcgatttgcctatgttaatacaatgatatattctattcagagaaaacttactgtgtttttgttttgtatcctttttaatcctaaactgagaacactaaccgcatgtgtactaaatacaatagacaaatctctttt

SEQ ID NO: 209109 - DNA, 1340 bp, Zea Mays
attgataccagcagaaaaaaacaactcaagcctcgcccggtcgcccctccctccctccctctgccccgggtttccagggaaacccacccccagatccaaatccagcgaagcgacagagatcaaggatggagctggaggtgggtgcgccttcgccggcgaggtacctggtgggggcagcgatcatgatggccggcgtggtgctcccgctggcgtacatgatcttccgcagcaagcgttcgccttcctccgcctccgccgcggggccctcctccttctccaagcagacgtaggaacaaagggctcatctgatctgagcgagtgggtgaatcgatcgccttcccctgatgcttgtcattctgtctgttttggcaccgcgagatcctccaactgcttctcgagactgggcatcatcacgtcaaatactagctgattagtagagctgacacatacattgttgctaagtgcattagtttgttatctgataatccacacctccagatgtgccctgtatgtttgtgttcttataagttggctcctattgaattgtctgtgttcctgcacatgaaggtagtaaacaaatcagtgtgctgccccagaaaagtcaggttggttgatattattgtttttcggttattggctaacctatatgataaccatgatgcattgcatttgcactttagatggatcgattgtttttgtggctacatgaagggcttgcggcttgccttgtggcttgtgatcaagatggtaattctcatggaggctactgggtattcagggcctacccttcctcagtattgaatcaaaccccgatatttaagactgtcccttctgaagttgacgtgacatgctcgagcgctggagcgcgtcgacatcaccggtttctaccctgagtgtgtcctattaaagtgagaagtacctgctggacctagcatgatgtatgtgtccttgagtcttgagaccgcaacatatcaacatcactcgaagaggctgggcacctactgatcagtgatcacataacacagatggagagaaatatatgtgttcctgttttttattttgtattctagtaaaaaaaatactagcttctacagtttccatcatcaaacgcttatcccacttttctgcctcctggatactttgtgtcacgtacgttctctattgccacttggtgatgctgcttgtgtatctcatgcatatctgaatcccaggagatatcgtcccagtctctaccaagaaaatccgtatggagataatgacttttactcgaatagttgatgtgactaaatgaaaggagttacaagtacaatgatagtacaacagtaaggtcttatataact

SEQ ID NO: 209110 - DNA, 1513 bp, Zea Mays
gccaaatccgataatctaccagtgggccctggttgacagcccaacgcacggctctcctgtgcgcctccgatgccgtttccccgaagcaaagggagacgaaagctcaaaaggtccccccgcttcctgtggtccacgcacgcacgcaggcggcggtggtgcccatggcttcgtggctgttgctccccttctcctccttcccgtggcctcccccgcccccaccaggctcctcctccggccgcggcggcgatggcggcggagacggcggcgattggaggccgaccgtcgtcgcagccttcgcaggcgtgcaagtcggccgcgctctccgccgccgcttcgccggcctcctccgctcaccgttcaattgtttctctttgaactctattgggcccatggttgaaatgttaagtggtcctagaagatatctagctgtttatttcagttcggcgctggcaggttcactgatgagctaccgttttagtgcgtcacctgctgttggtgcgtcaggtgccatttttggattggttggagcctatgcagtttatatgtggaggcatagaagattttttgggaattctagagagagtttagaacatattgggcgtgtggttgtcctgaatatggtactgctccacttttttctgcttattttattttgccttcgtttcaaaaactttctttgttccatgtgcaacattttcttttttcatagggtatgggcctcctttcaaggggaattgataactggggccatctgggaggcttgcttgggggagttgccatggcatggttcctaggtccggcatggcaatatcagtacgtggcaaaggatggtagagcggttttcaaagacagggctccagtcctccgactaataaaggggtagacctgtgggtattcgtggaaatagcgtggaagaggatgaaaaggggaaagggggtgaagattcagacatgcgccgagcaaagggagtggcgaaaaaacaattaggccctctttggaatgaaagaatttcagagaaatcatacatgaatcagttcatttttcatagaaaaaacacatgaaccttaacatgtaactagttttggtgtcgaaacatttcactgcagagctaattgctgaggaaacacacacgagaatcatattgctttgttcgaatcgtggcaattgttaaatcttcaaagctaagacgagttgtggactgtcagttgtatttccaggtatcaatagccctttttgtactaaccataggatctgctgtcaagttcctacgttggacattgttacgcaaccggatcctctacagtaacttgaagtagctgctgataggtcaggtcattgacgtgcggggttggccttgtctggcccatgcacttaagttgtcggatattactgcagatgaatggcttccgactgttactacgtttcttcttgtccagtactgcaagagatgataaaatatgtaataatgtcctcagtgatctgttaagtgattatgggggtgtttgtttgggat

SEQ ID NO: 209111 - DNA, 1692 bp, Zea Mays
gccaaatccgataatctaccagtgggccctggttgacagcccaacgcacggctctcctgtgcgcctccgatgccgtttccccgaagcaaagggagacgaaagctcaaaaggtccccccgcttcctgtggtccacgcacgcacgcaggcggcggtggtgcccatggcttcgtggctgttgctccccttctcctccttcccgtggcctcccccgcccccaccaggctcctcctccggccgcggcggcgatggcggcggagacggcggcgattggaggccgaccgtcgtcgcagccttcgcaggcgtgcaagtcggccgcgctctccgccgccgcttcgccggcctcctccgctcaccgctctgctctgttcagtgggaacgggtcagggggtagatacatcagcaacgggaagttgttgtccagacggcctcgtggaatcgattccaagaagaggctctggactaatgtccttcttgctcttaatgtcctggcttatgtcgctcaggtagcatcacaaggaaagcttctcatgtggggagccaagatcaacagtctgattgatagagggcaattttggcgtttggcaacatcatctctacttcatgcaaatctcacccaccttgcattcaattgtttctctttgaactctattgggcccatggttgaaatgttaagtggtcctagaagatatctagctgtttatttcagttcggcgctggcaggttcactgatgagctaccgttttagtgcgtcacctgctgttggtgcgtcaggtgccatttttggattggttggagcctatgcagtttatatgtggaggcatagaagattttttgggaattctagagagagtttagaacatattgggcgtgtggttgtcctgaatatgggtatgggcctcctttcaaggggaattgataactggggccatctgggaggcttgcttgggggagttgccatggcatggttcctaggtccggcatggcaatatcagtacgtggcaaaggatggtagagcggttttcaaagacagggctccagtcctccgactaataaaggggtagacctgtgggtattcgtggaaatagcgtggaagaggatgaaaaggggaaagggggtgaagattcagacatgcgccgagcaaagggagtggcgaaaaaacaattaggccctctttggaatgaaagaatttcagagaaatcatacatgaatcagttcatttttcatagaaaaaacacatgaaccttaacatgtaactagttttggtgtcgaaacatttcactgcagagctaattgctgaggaaacacacacgagaatcatattgctttgttcgaatcgtggcaattgttaaatcttcaaagctaagacgagttgtggactgtcagttgtatttccaggtatcaatagccctttttgtactaaccataggatctgctgtcaagttcctacgttggacattgttacgcaaccggatcctctacagtaacttgaagtagctgctgataggtcaggtcattgacgtgcggggttggccttgtctggcccatgcacttaagttgtcggatattactgcagatgaatggcttccgactgttactacgtttcttcttgtccagtactgcaagagatgataaaatatgtaataatgtcctcagtgatctgttaagtgattatgggggtgtttgtttgggat

SEQ ID NO: 209112 - DNA, 1683 bp, Zea Mays
gtggaggccaaatccgataatctaccagtgggccctggttgacagcccaacgcacggctctcctgtgcgcctccgatgccgtttccccgaagcaaagggagacgaaagctcaaaaggtccccccgcttcctgtggtccacgcacgcacgcaggcggcggtggtgcccatggcttcgtggctgttgctccccttctcctccttcccgtggcctcccccgcccccaccaggctcctcctccggccgcggcggcgatggcggcggagacggcggcgattggaggccgaccgtcgtcgcagccttcgcaggcgtgcaagtcggccgcgctctccgccgccgcttcgccggcctcctccgctcaccgtgggaacgggtcagggggtagatacatcagcaacgggaagttgttgtccagacggcctcgtggaatcgattccaagaagaggctctggactaatgtccttcttgctcttaatgtcctggcttatgtcgctcaggtagcatcacaaggaaagcttctcatgtggggagccaagatcaacagtctgattgatagagggcaattttggcgtttggcaacatcatctctacttcatgcaaatctcacccaccttgcattcaattgtttctctttgaactctattgggcccatggttgaaatgttaagtggtcctagaagatatctagctgtttatttcagttcggcgctggcaggttcactgatgagctaccgttttagtgcgtcacctgctgttggtgcgtcaggtgccatttttggattggttggagcctatgcagtttatatgtggaggcatagaagattttttgggaattctagagagagtttagaacatattgggcgtgtggttgtcctgaatatgggtatgggcctcctttcaaggggaattgataactggggccatctgggaggcttgcttgggggagttgccatggcatggttcctaggtccggcatggcaatatcagtacgtggcaaaggatggtagagcggttttcaaagacagggctccagtcctccgactaataaaggggtagacctgtgggtattcgtggaaatagcgtggaagaggatgaaaaggggaaagggggtgaagattcagacatgcgccgagcaaagggagtggcgaaaaaacaattaggccctctttggaatgaaagaatttcagagaaatcatacatgaatcagttcatttttcatagaaaaaacacatgaaccttaacatgtaactagttttggtgtcgaaacatttcactgcagagctaattgctgaggaaacacacacgagaatcatattgctttgttcgaatcgtggcaattgttaaatcttcaaagctaagacgagttgtggactgtcagttgtatttccaggtatcaatagccctttttgtactaaccataggatctgctgtcaagttcctacgttggacattgttacgcaaccggatcctctacagtaacttgaagtagctgctgataggtcaggtcattgacgtgcggggttggccttgtctggcccatgcacttaagttgtcggatattactgcagatgaatggcttccgactgttactacgtttcttcttgtccagtactgcaagagatgataaaatatgtaataatgtcctcagtgatctgttaagtgattatgggggtgtttgtttgggat

SEQ ID NO: 209113 - DNA, 2103 bp, Zea Mays
ttgaaggcctggctcacgaaagcaccttatccatttcgtctcccgcgccgcgcgtctcccttcccggctgtcgacggcgccttgcaggcttgcaccgacccgcggtcatggcgccgtccgtgtccaagatgctctcgacgcctccgtaccacgcatattacacctggcgtcgccgcctccttccccaagaaacagccgcgtcgcccaatccgagcccggcgagccgtcgaatcgcgccgccgctcaggtgttgccgttgcgcgtgcagccggagtccagcgaggcgcttcgtcccgatctgcgcctcggcatcagaccgcgcaggcgcgacgacggcggccctggtcgaagccgaggaggaagcagagctcgacggcccgccgatggtccagctgtcttcagacatcctccgtacggagcttagtttgctcaaggccgacgcgcccccggccggtggcgactcgtctctcggcatcaccgcccttgaggaccaagacagcgaggatggccgccactcgggaggaagagaaaccgctgcttacccagctgccatgaacgcgttgtacgcggcctgcctcgctgggattctgggaacgtgaccgagcagctgtggaacttcacctggcccgccgccatcgccacgctgcaccccagcctcctccccgtcgccgtcctcggcttcttctcaaagctcgtggtgttcgcggtgggcccgctggtgggggatcttgtgagctcgctcccccggatcccagcgtaccgatcactaacggtgatccagacggcggcgcacctggtgtccgcggcgatggtcacgtacgccttcaccgtcccccgggctccagctgcatcggcgctgctcctgcggccgtggttcgccacgctggtggcgtccacagccgtcgaccgcctctcctgcgtctccctcggcgtcatcgcagagcgcgacttcgtcgtccagctagcaggggaaggcaggccgatcgcgctggcgcgggcgaacgcggcgctcagcagggtcgatctcctctgcgagacggcgggagcgtccatcttcgccgtgctgctctccaggaaccacccgctgacctgcgtcaggctctcctgcgccgtctcgctctgctccctgccccttctgttttttctaggcggcgcgatgaatcgtctcgctgacggcatcttggaccgctctgctagtgccggtccggccccgctggagcgcccaggacgacatgggagcgcggcggttggcaaagcctgggagaccatcaggcacggctggacagagtacctccggcagcctgtgctaccggcgagcctcgcctacgtgctcgtctgcttcaacgtcgcgctcgcgcccggcgctctcatgaccaccttcctcatccacctcggcgtgagcgcgtcggtgctcggtgcgttcggcgggtcgtcggcggtggtggggattctggccacgttcgtgactccatatcttgtcaaggagctgggcattctcaaggccggagcggcagggctggtcgcgcagagcgcgctcctcggcgcggcagtcgtggtcttcgtcactggccccgtctcacggcgcggcgctctcttcgcctttcttggcttcatcgtggcttcgcggctggggcacatggcgtacagcgtcatcggactgcaggtggtgcagacgggaaaccccatggggaaggccaagctgatcggcgccacggagatcgcggtggccagcctcgccgagctcgccatgatggccgtcgccgtcgtcgctggggacgccgcgcacttcggctgcctggccgcgctctcggccgcatcggtcgccgccgccgcttgcctgttctgcgcgtggctggccaaccccaccgacgacctcaggaggctcttcccatgttgatacaggaataggactaggagacgcaaatttttggagaatagccaattcgtgtacctagctccaaatgttttgcaggtataagctccaattttttttccgtgttctgcatccactttgatttttgaaatcaatattagaggaaggacataaacttgcaataaactttatccaaaaataattaagtggcagacattaatatcgtgtca

SEQ ID NO: 209114 - DNA, 1489 bp, Zea Mays
ggacgctgtccaattaaactttcctgcaatttttgatgtgctgcgtcctagtgctgtgcaatattagacgtgcttcaggaaatgttaccttttccagttaacttgtcaagaccgtggctactactcagtggagactgtgtccttattggtggctctaaaagtacgttatagagacagaatcacaatattgagaggaaatcatgagagtagacaaataactcaagtgtatggcttctatgatgaatgcttgcggaaatatggaaatgcaaatgtgtggaagtactttacagacttgtttgattatttgcctctcacagctcttatagaaaatcagatcttctgcctacatggtggtctctctccatcactggatactttggataatgtccgctcccttgatcgcatacaagagatgtggatggggaatttcaccaaggggtgctggatacacatttggccaagatattgcacaacaattcaaccatacaaatgggctaagtcttatttcaagagctcatcaacttgtaatggaagggttcaattggtgccaggataagaacgttgtgacagtgttcagcgcgcctaactattgctaccgatgcgggaacatggctgcgatcctcgaaattggcgagaacatggatcagaacttcctccaattcgacccagctccgcggcagattgagccggacatgacgcgcaagaccccagactactttttgtaatcagcatgctggctttctttcaacttgtctactgcagcgccagcacctgtagatctccttagaaaatggtgtttcctctagccgccttgtacccccatcattcttttggtgtggagattttattgccgcttctcagaacattgaggttgttgaaagtacatggcattgggtcttcctttttttttgccgtcttgtatctccattttgtatgattctgagacaaaagagaagagaagctgcaatagaattgtctcgaaatatattgtcctgtccagaagaacaggtgtggctccaaaaaaaaaagggaaaaaataaaagagagacaacaaggaaagatgcaggaaatggacccgatgttccgttgtgtctgttgtgatgcttcatgcttggctaggggagttctttcagtgctgtttgactccgaattgaaggaaccttggttgttcaacctacatcatcagctcaccgtcgaatgtctgcccagaccgatgaggacaggattctctcaccggctgtcatggagttgagaaggatgctgccatgctgtgatgctggacaccgttccatctttttatcaccctttgccctccggcacggacacttgagacctcaacaatgccttataggctcatacctccacctgcaccatgtattgttgagcagagccgctggtttgagctgaagctgtgcacattggttaagactatgttcaacagcttacctatatgttaactaaaacattgttttgcaactgtactattaag

SEQ ID NO: 209115 - DNA, 1595 bp, Zea Mays
tctgatacggaagttggctacacaggcttctttctctatcttgattcttgagaattggattctcataacttcactctgcctctatccaaattttagacgagttattgttgatttgagatggaaaaattttctagactactgtagattcagatgtggataactgacaggatatagaattccgaacctgcagctgcagatcacttggtctggttttctaactgtaggacattatagtgcatgtttatcaggcttaaacccttgacaacatttcccacaaggtatggcttctatgatgaatgcttgcggaaatatggaaatgcaaatgtgtggaagtactttacagacttgtttgattatttgcctctcacagctcttatagaaaatcagatcttctgcctacatggtggtctctctccatcactggatactttggataatgtccgctcccttgatcgcatacaagaggtcccgcatgaaggacctatgtgtgatcttttgtggtctgacccggatgacagatgtggatggggaatttcaccaaggggtgctggatacacatttggccaagatattgcacaacaattcaaccatacaaatgggctaagtcttatttcaagagctcatcaacttgtaatggaagggttcaattggtgccaggataagaacgttgtgacagtgttcagcgcgcctaactattgctaccgatgcgggaacatggctgcgatcctcgaaattggcgagaacatggatcagaacttcctccaattcgacccagctccgcggcagattgagccggacatgacgcgcaagaccccagactactttttgtaatcagcatgctggctttctttcaacttgtctactgcagcgccagcacctgtagatctccttagaaaatggtgtttcctctagccgccttgtacccccatcattcttttggtgtggagattttattgccgcttctcagaacattgaggttgttgaaagtacatggcattgggtcttcctttttttttgccgtcttgtatctccattttgtatgattctgagacaaaagagaagagaagctgcaatagaattgtctcgaaatatattgtcctgtccagaagaacaggtgtggctccaaaaaaaaaagggaaaaaataaaagagagacaacaaggaaagatgcaggaaatggacccgatgttccgttgtgtctgttgtgatgcttcatgcttggctaggggagttctttcagtgctgtttgactccgaattgaaggaaccttggttgttcaacctacatcatcagctcaccgtcgaatgtctgcccagaccgatgaggacaggattctctcaccggctgtcatggagttgagaaggatgctgccatgctgtgatgctggacaccgttccatctttttatcaccctttgccctccggcacggacacttgagacctcaacaatgccttataggctcatacctccacctgcaccatgtattgttgagcagagccgctggtttgagctgaagctgtgcacattggttaagactatgttcaacagcttacctatatgttaactaaaacattgttttgcaactgtactattaag

SEQ ID NO: 209116 - DNA, 1048 bp, Zea Mays
acatctttcttgtgaattggggacttggtgttagagatccaatttcttttgagatatctatgttgatcgttgaagtctgcatagacataacaggtcccgcatgaaggacctatgtgtgatcttttgtggtctgacccggatgacagatgtggatggggaatttcaccaaggggtgctggatacacatttggccaagatattgcacaacaattcaaccatacaaatgggctaagtcttatttcaagagctcatcaacttgtaatggaagggttcaattggtgccaggataagaacgttgtgacagtgttcagcgcgcctaactattgctaccgatgcgggaacatggctgcgatcctcgaaattggcgagaacatggatcagaacttcctccaattcgacccagctccgcggcagattgagccggacatgacgcgcaagaccccagactactttttgtaatcagcatgctggctttctttcaacttgtctactgcagcgccagcacctgtagatctccttagaaaatggtgtttcctctagccgccttgtacccccatcattcttttggtgtggctccaaaaaaaaaagggaaaaaataaaagagagacaacaaggaaagatgcaggaaatggacccgatgttccgttgtgtctgttgtgatgcttcatgcttggctaggggagttctttcagtgctgtttgactccgaattgaaggaaccttggttgttcaacctacatcatcagctcaccgtcgaatgtctgcccagaccgatgaggacaggattctctcaccggctgtcatggagttgagaaggatgctgccatgctgtgatgctggacaccgttccatctttttatcaccctttgccctccggcacggacacttgagacctcaacaatgccttataggctcatacctccacctgcaccatgtattgttgagcagagccgctggtttgagctgaagctgtgcacattggttaagactatgttcaacagcttacctatatgttaactaaaacattgttttgcaactgtactattaag

SEQ ID NO: 209117 - DNA, 2174 bp, Zea Mays
gaaaaaagtagctgtagtggtaatcatttgatcttgaattcttgatccactatttcgaggagaaagagggagagagatgactagctgtagttgaagccttgcaggtccaccgtcacctcgcgccgcccggcgagtcgcaggcatttgtttaagggaagggattctcttccgccgcggctgcctctgcctggctggctgcgtcgccacaccccgcgcacatcgcgctgcccagctctgctgctgctgccgctgcgtgcgcatcactggaaagatgggcctgtggggacgggctccttctttccttcaccgcgccatgaatgatgcgccttttctctgctgctttgcttccatctggctcagctctgtgcctctgtcgcccttctccttcctctcggtgtcccctctgtcggtccatgctcgtctgctggctcctgcttgttgcttaggcgttcttggtcaggtgagcagcactggcggcgatggcgaaggagacggagtactacgacgttctcggcgtctgccccgccgcatccgacgaagagatccgcaaggcctactacatcaaggcgagacaggtgcatcctgacaagaatcccaacgacccacacgcggccgagaacttccaggctcttggagaggcttaccaggtgctgagtgaccctctgcagaggaaggcctatgacggctatggcaagaacagcgtatctagggagaacatactggatggtactgtggtgtttacccttcttttcgggagcgagctgttcgaggactacattggccatcttgcaatggcaacaatggcttcctccgagttgacaagcgataacgacacccccgaaaagcttcaggataggctcaagaatgtacaaagggaaagagaagaaaagctagctagattcctcaaggaattcctctctcagtatgttcgtggagacaaagaaggatttgctaatcgtgccgaagctgaggcaaagaagctctcatgcacttcatctgggttggatattcttcgcaccattggatatgtctattctcgacaggcagcaaaggagcttggcaagaaggccatgtacctaggagtgccattcgtagccgagtgggtcaggaacaagggtcatctgtggaagtcacagatcaccgcagcgaaaggagaaatgcaggggccttgcagctgttgcagttgcaagaggaggcctgccggcagagtagcaaggatggcaatgccaccgagcaggatgtcgacttgcagatgaggatgaacaaggacctgatgatgagctcactgtggaagctgaatgttgtggatattgaaatgactctgttgcatgtttgtgaaatggtgctgtctgaaaacaatgtcaagaaagatgatctgaaggcccgagcaacggccttgaaatttcttgggaaaatatttatgagggaaaaggaggcattgccagggccagcaccagcgccaggtccatcaggaccgtcgaaacgaacggttcttgacgacgacagcagctcagatgacagttcagatgatgacctgactcggacagcgccataccggactcctgcatttacccagggaatcggcaggctgttccgatgcttatgcaatccggcttatgatgttgatgatgattttgagccccacaaatgagtcctaaagaggaaggtaccaataccaatggattttccaaaggttggtgacttttgtcaagcgtatgattcagaacagtgtgaattcggatcatacgttgtgatcctttgcttgccttgaggatacacgtgtagatgctatttcatctctggtgaccagaccaacagctcagagatcctcatttttttcctcccatgaacagtagacctcctctccgctttttttaataaatagatccaactgaatcttgttgagcttatgtaatcgcttgctattgttgttgtcaaaaacacaaagaagtgaaagaacaagtgcctgtaaaaatccatttctgatcctgaatcgggaattcagtgtgatgaacatcaactttttgatcctgttgccggcgtattgcctgcattctgtctgcaaatagtttgcaagttcatacacggctgccccttttgtcagaatatacggagaatagttgcttgctctcattactaagactttttagcattagccattagagaatggttgg

SEQ ID NO: 209118 - DNA, 2362 bp, Zea Mays
tgaattcttgatccactatttcgaggagaaagagggagagagatgactagctgtagttgaagccttgcaggtccaccgtcacctcgcgccgcccggcgagtcgcaggcatttgtttaagggaagggattctcttccgccgcggctgcctctgcctggctggctgcgtcgccacaccccgcgcacatcgcgctgcccagctctgctgctgctgccgctgcgtgcgcatcactggaaagatgggcctgtggggacgggctccttctttccttcaccgcgccatgaatgatgcgccttttctctgctgctttgcttccatctggctcagctctgtgcctctgtcgcccttctccttcctctcggtgtcccctctgtcggtccatgctcgtctgctggctcctgcttgttgcttaggcgttcttggtcaggtgagcagcactggcggcgatggcgaaggagacggagtactacgacgttctcggcgtctgccccgccgcatccgacgaagagatccgcaaggcctactacatcaaggcgagacaggtgcatcctgacaagaatcccaacgacccacacgcggccgagaacttccaggctcttggagaggcttaccaggtgctgagtgaccctctgcagaggaaggcctatgacggctatggcaagaacagcgtatctagggagaacatactggatggtactgtggtgtttacccttcttttcgggagcgagctgttcgaggactacattggccatcttgcaatggcaacaatggcttcctccgagttgacaagcgataacgacacccccgaaaagcttcaggataggctcaagaatgtacaaagggaaagagaagaaaagctagctagattcctcaaggaattcctctctcagtatgttcgtggagacaaagaaggatttgctaatcgtgccgaagctgaggcaaagaagctctcatgcacttcatctgggttggatattcttcgcaccattggatatgtctattctcgacaggcagcaaaggagcttggcaagaaggccatgtacctaggagtgccattcgtagccgagtgggtcaggaacaagggtcatctgtggaagtcacagatcaccgcagcgaaaggggccttgcagctgttgcagttgcaagaggaggcctgccggcagagtagcaaggatggcaatgccaccgagcaggatgtcgacttgcagatgaggatgaacaaggacctgatgatgagctcactgtggaagctgaatgttgtggatattgaaatgactctgttgcatgtttgtgaaatggtacgtgtctcgaggtatctaatttatatacggtatgataagtatgagcagtatgtgttcttggcttttctttgacagccgatggctggaacttcgtaataaccggaataaaatcccttcatttaaaaaaagcgcctctactggattacgagtagtctcttattccaggtttatctgatcaaattatcagcacatgaaggcttatttgttttgacaagtttttttttctttaggtgctgtctgaaaacaatgtcaagaaagatgatctgaaggcccgagcaacggccttgaaatttcttgggaaaatatttatgagggaaaaggaggcattgccagggccagcaccagcgccaggtccatcaggaccgtcgaaacgaacggttcttgacgacgacagcagctcagatgacagttcagatgatgacctgactcggacagcgccataccggactcctgcatttacccagggaatcggcaggctgttccgatgcttatgcaatccggcttatgatgttgatgatgattttgagccccacaaatgagtcctaaagaggaaggtaccaataccaatggattttccaaaggttggtgacttttgtcaagcgtatgattcagaacagtgtgaattcggatcatacgttgtgatcctttgcttgccttgaggatacacgtgtagatgctatttcatctctggtgaccagaccaacagctcagagatcctcatttttttcctcccatgaacagtagacctcctctccgctttttttaataaatagatccaactgaatcttgttgagcttatgtaatcgcttgctattgttgttgtcaaaaacacaaagaagtgaaagaacaagtgcctgtaaaaatccatttctgatcctgaatcgggaattcagtgtgatgaacatcaactttttgatcctgttgccggcgtattgcctgcattctgtctgcaaatagtttgcaagttcatacacggctgccccttttgtcagaatatacggagaatagttgcttgctctcattactaagactttttagcattagccattagagaatggttgg

SEQ ID NO: 209119 - DNA, 1357 bp, Zea Mays
aaatcccccacagttccctttccctccgtccacccgcccttctccttcgttcccggctaagtggccaacggacgtgcgatccggcgcgcttcctcgccgtcgatcggaggccgagaggaatgtcaggggcggcatccgtgaaggaccgggccaccggcctcatcgacaagttcgtgctccgcgaggcccgcggcagctccgtcgaggtatatttatacggaggccaagtgacattttggaaaaacaacttcggtcagcaactgctttttatcagtaacaaggctacttttaaaccgccaaaagcagttcgtggtggtatccaaatttgcttccctcaactaggtaaccatggagttcttgaacagcatggatttgcaaggaaccggttttggagtgtcgatgaaagcccacctccttttccagttgctacttccaattgtcatgttgacttgatactcaagtcatctcccgaggatttgaagatctggccacatagttacgaatttcgtctgagagttgctctgagtccaaggggagatcttattcttacatctcgcataaaaaacatcagctcagacagcaagccattccaatttacatttgcataccacacctacttttcggtgtctgacatcagtgaagtgagggttgaaggtctggagaccttggactatcttgacaacctgcactccaagaaacgttttactgaacaaggagatgcggttgtattcgagtccgaagtggacaaggtgtatttgagtgctccgccgaaggttgcgatcatcgaccacgagaagaaaagaacgtttgtgttgagaaaagagggccttcctgacgttgtcgtttggaacccctgggacaagaaggacgaggggtacaagagcatgctgtgcgtcggggctgcggctattgagaagtcagtcactttaaagccaggcgaagagtggacagggaagcaggaaatttctgctgtgccgtccagttacagcagcgggcagttggaccctgaactgattcgtcgaatgcacacaatataaagtttacctgcgattgcatcctacgttccaaactagcctgtggttttttttttattattattattctgaagcagcactgggattggaatcatcaccctgttaattactagacaaattgggccgggggagtttttcatccatagctggggccggaggtgccattccgatccgtatacaatattctttttctctgtgtttttttggtattgtattgtaccactagtccgctgcaaaaggaagccccaagtttgtactgcatgtggcaaacaaaactaccaagatatactaattgagttgtataataaagcgtcacacgtttc

SEQ ID NO: 209120 - DNA, 1307 bp, Zea Mays
aaatcccccacagttccctttccctccgtccacccgcccttctccttcgttcccggctaagtggccaacggacgtgcgatccggcgcgcttcctcgccgtcgatcggaggccgagaggaatgtcaggggcggcatccgtgaaggaccgggccaccggcctcatcgacaagttcgtgctccgcgaggcccgcggcagctccgtcgaggtatatttatacggaggccaagtgacattttggaaaaacaacttcggtcagcaactgctttttatcagtaacaaggctacttttaaaccgccaaaagcagttcgtggtggtatccaaatttgcttccctcaactaggtaaccatggagttcttgaacagcatggatttgcaaggaaccggttttggagtgtcgatgaaagcccacctccttttccagttgctacttccaattgtcatgttgacttgatactcaagtcatctcccgaggatttgaagatctggccacatagttacgaatttcgtctgagagttgctctgagtccaaggggagatcttattcttacatctcgcataaaaaacatcagctcagacagcaagccattccaatttacatttgcataccacacctacttttcggtgtctgacatcagtgaagtgagggttgaaggtctggagaccttggactatcttgacaacctgcactccaagaaacgttttactgaacaaggagatgcggttgtattcgagtccgaagtggacaaggtgtatttgagtgctccgccgaaggttgcgatcatcgaccacgagaagaaaagaacgtttgtgttgagaaaagagggccttcctgacgttgtcgtttggaacccctgggacaagaaggacgaggggtacaagagcatgctgtgcgtcggggctgcggctattgagaagtcagtcactttaaagccaggcgaagagtggacagggaagcaggaaatttctgctgtgccgtccagttacagcagcgggcagttggaccctgaactgattcgtcgaatgcacacaatataaagtttacctgcgattgcatcctaccactgggattggaatcatcaccctgttaattactagacaaattgggccgggggagtttttcatccatagctggggccggaggtgccattccgatccgtatacaatattctttttctctgtgtttttttggtattgtattgtaccactagtccgctgcaaaaggaagccccaagtttgtactgcatgtggcaaacaaaactaccaagatatactaattgagttgtataataaagcgtcacacgtttc

SEQ ID NO: 209121 - DNA, 2293 bp, Zea Mays
cacccacacaaaccaccatgccaccgcggaatccacccactattttgcactgtttgtttttagttccctttaaaatgccgcggccggcgcggcgcatccggctgcgtaccggcccccttttccacccacccgcccacccctcgtttcctgcaattcgccgccatcgttcgctgaacttgagcgcgtctgccgcctgccaccaccgctctctgcctctctgctgctctgttctttctcccgccggggcagaggagggcggggaggcccgttgagcgagcctcggtcggtatggggatctgcgcctcgtccaagcgcgtgcggcaggaggagcaggactccgacgagaacgtggtgtacgtgatggacgagcagggcggcgggggagaaggcgaggacggccgtggcgcccgcgcggcggcatcccgcaaggtggcctccctcttctcgcagaagggcaagaaggggcccaaccaggacgccgtcatactctgccaggtccgcgctcgcaccaccacccctcctgctgctgccttgcccgaggaattctctcgatgtctcagctttttcttcttcttcttctctcctatatctgtttgtttatttattttgctacacagcgctggtagatgtagatctgtactgatacagattttgtttggtactccaccgactgtactgcactgctccgtatagtctcttgcagaggaaaaccactagttttttttcctcctgggtactctgtccttgcaagggactttgacgtggtgggaggtcatgaaattccaggaactgtcctctgtattctgcaattattatcaggacatacgtacacagctgccaccccaccacaaccaattcaccatacagcgggggggaaatcgtgatggttcactttccaaaccacggaaacgagtttcgtcgtcctacggatttcctcgcggttttggtttgctacgacagcggaacagatcagaattatcattagttccctgttcttgccccctttattttcagaccctttttttaaaattcccccaagaaccaaccagtctcatctgccgtttgggctcaattgtcaacgatggccactgatgctatcatttgatattcatcacaagctgtcggcttgttgctcgagtccatgcaatctgaatgcgtgtaatcaagctattcggttcggaccacgattctgacgcccaccgtgcgctccacgtctccagggattcggcatggaggacggcgtgttctgcggcgtgttcgacgggcacggccggtgcgggcagttcatcagcaagctggtgagggactacctcccgttcatgatcctgagccaccggaacgcgctcctcatgggctccgacgacgacgacgatgatccggcgcagctgctggaggagtggcgggaggcctgcgccaacgcgttcgaggccatggacaaggagctcaagctccaggccaacgtggactgcaacttcagcggcaccaccgccgtgtgcgccatcaagcaggggaaggacctcatcgtcgccaacctcggcgactccagggccgtgctggcgaccatgtcggacacgggctacctcaaggccgtgcagctcaccaccgaccagaagcccaacgtgccccaggaggctgagcgtatcaagcgctgcaacggccgcgtgttcgcgctcaaggacgagccgtcggtgctgcgcgtgtggcttcccgacgaggactgcccgggcctcgccatggcgcgctctctgggcgactaccgcctcaagcgccacggcgtggtgtcggagccggaggtgacgcaccgccgcgtcgcgccgggggacctgttcatcatcctggccacggacggcgtgtgggacgtgctcagcaacgaggaggtcgtgtccatcgtctgcgccacgccgcggaagcagcacgcgtccaaggccgtcgccgaggccgcggcgcagcgctggcggaccaggtacccgacgtcccgcgtcgacgactctcgctccgacgataagcctgcggacggcgatccataacggcagctaatgtactgggagtgtaattaagtgctgtaacatagtgttaattaagctctgatgtttttgcgaggagagaaaaaagtcgtttaattctcagttttgagttttgactcctgatcggtgaccagctgaccttgcatgttatggtgtcggacgaagcgaatggctggcaggaacgccgtttgtactctgtgtggcatgtaaattgttaccggttgaagaagagttaccagtccaagtgcctttttttgtcgatataaatg

SEQ ID NO: 209122 - DNA, 569 bp, Zea Mays
agaaaatcgccgcgtggtcggtccatccgggtcgacttgacttccctctgcaacctcggaacccagccaatccgctgatctcaactgccgggcactccgatccggcaacgatggaggggagcgccgactccttcgggtccttgacggcgccgcttgcctggcacgacttcctcgagcgcatgcgccagccttccgccgccgagttcgtcaagtccattaaaagctttattgtgacattctcaaacagagctcctgatccagagaaggatagtactgctatccaggagttcctggaaaacatggaaggggctttcagagcccacaccccttgggctggcagttcagaggaagaactagagagtgctggtgagggacttgagaaatatgttatgacaaagctgtttaatcgggtattcgcatcagtcccagaagatgtgaagagtgatgaagaactttttgagaaaatgtctttgctacagcaatttgtaaggcctgaaaacttggatataaaaccagagtaccagaatgaaacatcctggctggaggaaggagatgcttttgcatttttg

SEQ ID NO: 209123 - DNA, 2076 bp, Zea Mays
gcactcctcaggtcctaggttcgactccccgttggggcgaatttcgggctatggttaaaaaaccccctcgtctgtcccacgccaaagcacatgtgtaaggcccggtcgcggtcgtttctcacatgggctacggtgccgctgtgtatgggtggggcaggggtttggggttttctcgacctgtgtgagaaggtcttcttcttaatataatgcccgagggctatctaccccccctccccgcaggtcgatttttgtttttaaattatgaagtttggaactcaaataactaaaaatatttaacattgaatattatgttaaagcatcctctctgaaaccattattttcatatttttgcaaactcacagttgtggcatttattcaccatactattcactgtattggcatatgcatgtaagatgtgcccctagagaacatgcaagcacattttatgtcaacgattactaagttcatgatgtggtatctgtttgtggttatctaatgtgtccaattctaatgcacttcttaaaaaaacaaccaaatctgcttgttacaaatataattgcttattctgataaaatattctgaatagaataagttacatacctctgaactcttatcttactgattttttgggttcccaataaatatgtgaaatatggaacatattgatattgtagcttacttttccactctctctcagtgaaatgaggcatgataagaagcctgatgatggagaaactaactcatctaggagtctcagtgtctctgacaataatgatgatagaaaaaaggagacactgttaagtggtgatgataaagaggatcacgaaatacagctcaaacaaataagacaggacatggaacttttgcgtgatgataaatctctcttggagataattttggatgagaagaatgctgaagtgcgcaagatttctagcagattaaatgatcttgatctgcagttaaggaaggagaaagaggaatgccacaggatgacctcaaaaattaaaaagttccttaaagcccatgctcgctttttgaaagcacaggaagaattaaaaaggtcacaagctcgttttgagagactcggtgatttacttgcttcagatattctgaagcgtggtgctaatgaagaagtttctagtatcaatgttgatgaagatccaaatgttccttatgaaaggagcccaaatgctgctatagctaagaagagatcaataccatactcaacaagtgaagaagcgaaagccgtgaagaaaagaagagagcgggactctgacacaactaggccagataaatataggtttgaaggtactattgcaggatttgaaaaactaagcaagggaaccgagccaacaaaatctttatatttgaagaagaaactgtgggaagatgaaaaggataagataggcaactttgtctcctcagccaacaccgacaaggtcaaagaatctccggtcaaacatgttttgccctccactggtatggctgctcatgctttggacgatctgtttgaagctgttgaactggaggatagacgtgacacatcaatagaaaatgatgctgatgacgaaactaggtcgcctgttatgcccccacaaccaccaccggtggttaatacttacgagcagtacgaggctgatgacgaggaagtcgacgtggaatgattagaatgccgagatggtactggaatgagctatatagctctcgcgcctgtgtaaagcattatgtaatatgtatttgatgctggagtttaccttgcataaaaagaatcgtcattaatgatccttggtggatgcggtttaagcactcaacttttttgttaatttgatgaaggcaacatgccctgttacctgtacctaatataccacgtggtggctagctagccagccttgtcagtgccctggtacttttgggtggtcttgctgtgctgttcgcggcacttgaaaactgatgttttgtaggactgatgttttgtaggagtattatttgaatggtagccgttgatcttcggctgttgatgcgctgcttggtggcattggatgtgatgcattggcaggtttacattgggcgtgattg

SEQ ID NO: 209124 - DNA, 3235 bp, Zea Mays
gacggcattacctaaaccataccatagaccatcaatcacttctaacacttttcccgtctcccccttcctcgccgcctccactacagggctttgctcctcccaactctcgaaaccctacccacgcgatgagagatcgatcggtcgagcgcgaattccccagccgcgagcggggggatcggccgccgcccggggtgctgggtcccccgcgccgcgggccggcttacaagacgaagttgtgcgcgctgtggcagcgcggcggctgttcccgcgacacatgcagcttcgcgcacggacacgccgagctccgccggttccccggatcgcgcacctcgttcccaccccgcgccggttttgttgtaagatgtcactaattctgcaccctaccgtgaatggttgctcatgtaatccatgtgatctatctgtttcggaagaacaacggtatgtgaccattcaatttatgagatgaagaagaaaggccatggtgcagcaaaaaaagggggatatttaactttttgccatctttatggatggccctaaaccaccagtcactgaccatctgtggagctacaaggggtgacatacatggacatggaaccacatgtgtctgggtatcaatgtccgatttaggtgtatgatttagcagattttttgaaatgccgaatagcacctgaattctgacacggtgtttataattatactggtgtcagtccgggtaactaatgtacctctggacatcgtggttcaaatggaactttattttttctccatgattttatagtagcatgttctctatgttttgtattaagtgctcgtgtgttttattaaattcgtgcttcaattcaacctcagttgctgcagatagaaaataattctcacaagtggaagcttgttgcagtctgcagaattaggcggcattcttactggttgccttttgatttaactaccattcaaattagcagactcctgagcagatttattagattcaactgctgccagaggataagatgacttttatatagattcttcagttggcatttcaacgatttattgtgacctgtaatgcttgtccctacatcaagaaggtgggcatatcagtatcttggatgatgactccactgaatgatgtccataatacatttgatgtgctatggtcatgtgcttagcagctttaacggttaattgcacatacccttgaatattgtgcatcagttagatcattgggaagtgttattctcactggtaattgcaagttattgtaattcttgcaagtcgccgcggaagatatctggacaaatgatagtagatttatattgtgatattgggattatagaagacatcaacttgtcataattgttatgtgatgttgttcatggtcttcatcaatttgattttcaacaatcaacattatgagtttggtatcatcttaatgggtatgtcagtggtttcataccatactttggtatctacccatggcattaatttttggctctactttgttgtggctaatgatattatcctggagacccttctacttattgtgcattgaattatcttatagctcaaaggctgtggtaaggttacaggcttatgggtgacctatctctattagttcatattgacacattttttgttcagcttcatttatccttttcttgtataaatttttctctatcctgacttctagggagaagagattatagaggtggtgactttagagataggtttgataggaggcgctcacctcataggaggcattcccctgatggagattccaggggccatcgctcccttcgtgaccgacgaccaaattcccaagaaagggaatctagctattcacggtctcccagtaggaagagtgaaatgaggcatgataagaagcctgatgatggagaaactaactcatctaggagtctcagtgtctctgacaataatgatgatagaaaaaaggagacactgttaagtggtgatgataaagaggatcacgaaatacagctcaaacaaataagacaggacatggaacttttgcgtgatgataaatctctcttggagataattttggatgagaagaatgctgaagtgcgcaagatttctagcagattaaatgatcttgatctgcagttaaggaaggagaaagaggaatgccacaggatgacctcaaaaattaaaaagttccttaaagcccatgctcgctttttgaaagcacaggaagaattaaaaaggtcacaagctcgttttgagagactcggtgatttacttgcttcagatattctgaagcgtggtgctaatgaagaagtttctagtatcaatgttgatgaagatccaaatgttccttatgaaaggagcccaaatgctgctatagctaagaagagatcaataccatactcaacaagtgaagaagcgaaagccgtgaagaaaagaagagagcgggactctgacacaactaggccagataaatataggtttgaaggtactattgcaggatttgaaaaactaagcaagggaaccgagccaacaaaatctttatatttgaagaagaaactgtgggaagatgaaaaggataagataggcaactttgtctcctcagccaacaccgacaaggtcaaagaatctccggtcaaacatgttttgccctccactggtatggctgctcatgctttggacgatctgtttgaagctgttgaactggaggatagacgtgacacatcaatagaaaatgatgctgatgacgaaactaggtcgcctgttatgcccccacaaccaccaccggtggttaatacttacgagcagtacgaggctgatgacgaggaagtcgacgtggaatgattagaatgccgagatggtactggaatgagctatatagctctcgcgcctgtgtaaagcattatgtaatatgtatttgatgctggagtttaccttgcataaaaagaatcgtcattaatgatccttggtggatgcggtttaagcactcaacttttttgttaatttgatgaaggcaacatgccctgttacctgtacctaatataccacgtggtggctagctagccagccttgtcagtgccctggtacttttgggtggtcttgctgtgctgttcgcggcacttgaaaactgatgttttgtaggactgatgttttgtaggagtattatttgaatggtagccgttgatcttcggctgttgatgcgctgcttggtggcattggatgtgatgcattggcaggtttacattgggcgtgattg

SEQ ID NO: 209125 - DNA, 1693 bp, Zea Mays
cgacaacatgaataaatcatgcattcagtcaagtgattctgtcaaaattattgacatgacactttcatacttctgtatgtatttttgtccaaaacaatgcttcgaatggtggtatttacctgacttcgaacatggttcaatcaaggatgattattgtgggggaagctcaggatacaactcggaattactgaagatcatggaaactaaccaatctcccccttgcaagcgaccgcggagagatcgaaaccgtgaaaaggcaccctcctcaaacaaaattgaagtcatggaacaagagatatggagagatttccctgaagatcttttcgaaactgtcatagcaaggcttcctgttgctgcaatttttcgattccgcactgtctgccgaaggtggtcttcccttttgggctcagacagtttctctcgtcagtactctgaagctccacatggactgccatggttctatacaatcactcatgagaattcaaacaacaatgttgcgatgtatgatcctttgctgaagaaatggcaccaccaatctgttcctctcaatcatacgaagatagttattccagtggcatccgtgggtggccttgtatgtttattggatctgagccacaggaatttttacatctgcaaccctcttacgcaatcactgaaggagatcccaccaagatcagtccatggttggtcaagagtcgttgtagggatggtgttgaatggaagaagttctagtgatggctacaaagtaatgtggttagatattgatgggacttgcgaagtttatgactctacaaagaacgtgtggtcttgccctggaacttttcctccaagcatcaaacttccacttgctctaaatttgaggtcacaaccagtggcggttggcagcatgatatacttcatgtgcgcagaaccagatggtgttttgtcatatgatgtaagcaccgggatttggaggcaatttgccatcccactgccactgcatctgactgatcacacacttgccgagttccagggaagggttatgctggtgggtctgctgtgcaaaaatgcagcgacctgcatctgcatatgggagttgcagaagatgactctcctctggaaggaggtggacagaatgccaaatctctggtgcttagagttctacggtaagcacatgaagatgaaatgcctgggcaacagtggtttgctcatgctctccttgaaggcgaagcatatgaaccgccttgttacatacaaccttttgaaaagggagtggcagaaggttcctgattgcatgctaccatggagtcgaaaaaggcaatggataacatgtggcacagcatttgatccggtcccctgcgccttggtctgacatggaattttaccttctttgtctgagcactataatattttagtcctttcatatcattggcctatctttagatctttctatgttgttgtgacaagttctgcgaaaacgcattactgtggtttgctttgtataacgccgccgaaacaatcgaacggtttcctttatcacctgctgttctgttaagcttgtaatctttctgaacgtgcagttacctgcccagagctgagttcattatacaataaataccgggatgttaatgtttggactctggtgcatggagatgcagtggtgcttgttattaccatgaaaataatgtttttaattattgtgcatggagatgta

SEQ ID NO: 209126 - DNA, 1618 bp, Zea Mays
atggaatcgagaccagggcagcctccaccctaggtggtatttacctgacttcgaacatggttcaatcaaggatgattattgtgggggaagctcaggatacaactcggaattactgaagatcatggaaactaaccaatctcccccttgcaagcgaccgcggagagatcgaaaccgtgaaaaggcaccctcctcaaacaaaattgaagtcatggaacaagagatatggagagatttccctgaagatcttttcgaaactgtcatagcaaggcttcctgttgctgcaatttttcgattccgcactgtctgccgaaggtggtcttcccttttgggctcagacagtttctctcgtcagtactctgaagctccacatggactgccatggttctatacaatcactcatgagaattcaaacaacaatgttgcgatgtatgatcctttgctgaagaaatggcaccaccaatctgttcctctcaatcatacgaagatagttattccagtggcatccgtgggtggccttgtatgtttattggatctgagccacaggaatttttacatctgcaaccctcttacgcaatcactgaaggagatcccaccaagatcagtccatggttggtcaagagtcgttgtagggatggtgttgaatggaagaagttctagtgatggctacaaagtaatgtggttagatattgatgggacttgcgaagtttatgactctacaaagaacgtgtggtcttgccctggaacttttcctccaagcatcaaacttccacttgctctaaatttgaggtcacaaccagtggcggttggcagcatgatatacttcatgtgcgcagaaccagatggtgttttgtcatatgatgtaagcaccgggatttggaggcaatttgccatcccactgccactgcatctgactgatcacacacttgccgagttccagggaagggttatgctggtgggtctgctgtgcaaaaatgcagcgacctgcatctgcatatgggagttgcagaagatgactctcctctggaaggaggtggacagaatgccaaatctctggtgcttagagttctacggtaagcacatgaagatgaaatgcctgggcaacagtggtttgctcatgctctccttgaaggcgaagcatatgaaccgccttgttacatacaaccttttgaaaagggagtggcagaaggttcctgattgcatgctaccatggagtcgaaaaaggcaatggataacatgtggcacagcatttgatccggtcccctgcgccttggtctgacatggaattttaccttctttgtctgagcactataatattttagtcctttcatatcattggcctatctttagatctttctatgttgttgtgacaagttctgcgaaaacgcattactgtggtttgctttgtataacgccgccgaaacaatcgaacggtttcctttatcacctgctgttctgttaagcttgtaatctttctgaacgtgcagttacctgcccagagctgagttcattatacaataaataccgggatgttaatgtttggactctggtgcatggagatgcagtggtgcttgttattaccatgaaaataatgtttttaattattgtgcatggagatgta

SEQ ID NO: 209127 - DNA, 1388 bp, Zea Mays
cacacccctacctcctccgcgctagatttggcactgttgaacggaggaacagggcgcgcgccgtagaaatgtggtatttacctgacttcgaacatggttcaatcaaggatgattattgtgggggaagctcaggatacaactcggaattactgaagatcatggaaactaaccaatctcccccttgcaagcgaccgcggagagatcgaaaccgtgaaaaggcaccctcctcaaacaaaattgaagtcatggaacaagagatatggagagatttccctgaagatcttttcgaaactgtcatagcaaggcttcctgttgctgcaatttttcgattccgcactgtctgccgaaggtggtcttcccttttgggctcagacagtttctctcgtcagtactctgaagctccacatggactgccatggttctatacaatcactcatgagaattcaaacaacaatgttgcgatgtatgatcctttgctgaagaaatggcaccaccaatctgttcctctcaatcatacgaagatagttattccagtggcatccgtgggtggccttgtatgtttattggatctgagccacaggaatttttacatctgcaaccctcttacgcaatcactgaaggagatcccaccaagatcagtccatggttggtcaagagtcgttgtagggatggtgttgaatggaagaagttctagtgatggctacaaagtaatgtggttagatattgatgggacttgcgaagtttatgactctacaaagaacgtgtggtcttgccctggaacttttcctccaagcatcaaacttccacttgctctaaatttgaggtcacaaccagtggcggttggcagcatgaagatgaaatgcctgggcaacagtggtttgctcatgctctccttgaaggcgaagcatatgaaccgccttgttacatacaaccttttgaaaagggagtggcagaaggttcctgattgcatgctaccatggagtcgaaaaaggcaatggataacatgtggcacagcatttgatccggtcccctgcgccttggtctgacatggaattttaccttctttgtctgagcactataatattttagtcctttcatatcattggcctatctttagatctttctatgttgttgtgacaagttctgcgaaaacgcattactgtggtttgctttgtataacgccgccgaaacaatcgaacggtttcctttatcacctgctgttctgttaagcttgtaatctttctgaacgtgcagttacctgcccagagctgagttcattatacaataaataccgggatgttaatgtttggactctggtgcatggagatgcagtggtgcttgttattaccatgaaaataatgtttttaattattgtgcatggagatgta

SEQ ID NO: 209128 - DNA, 1711 bp, Zea Mays
atttcgatccactgttttcggcccctcgaattggtgttacctgcgtccactccccccacacccctacctcctccgcgctagatttggcactgttgaacggaggaacagggcgcgcgccgtagaaatgtggtatttacctgacttcgaacatggttcaatcaaggatgattattgtgggggaagctcaggatacaactcggaattactgaagatcatggaaactaaccaatctcccccttgcaagcgaccgcggagagatcgaaaccgtgaaaaggcaccctcctcaaacaaaattgaagtcatggaacaagagatatggagagatttccctgaagatcttttcgaaactgtcatagcaaggcttcctgttgctgcaatttttcgattccgcactgtctgccgaaggtggtcttcccttttgggctcagacagtttctctcgtcagtactctgaagctccacatggactgccatggttctatacaatcactcatgagaattcaaacaacaatgttgcgatgtatgatcctttgctgaagaaatggcaccaccaatctgttcctctcaatcatacgaagatagttattccagtggcatccgtgggtggccttgtatgtttattggatctgagccacaggaatttttacatctgcaaccctcttacgcaatcactgaaggagatcccaccaagatcagtccatggttggtcaagagtcgttgtagggatggtgttgaatggaagaagttctagtgatggctacaaagtaatgtggttagatattgatgggacttgcgaagtttatgactctacaaagaacgtgtggtcttgccctggaacttttcctccaagcatcaaacttccacttgctctaaatttgaggtcacaaccagtggcggttggcagcatgatatacttcatgtgcgcagaaccagatggtgttttgtcatatgatgtaagcaccgggatttggaggcaatttgccatcccactgccactgcatctgactgatcacacacttgccgagttccagggaagggttatgctggtgggtctgctgtgcaaaaatgcagcgacctgcatctgcatatgggagttgcagaagatgactctcctctggaaggaggtggacagaatgccaaatctctggtgcttagagttctacggtaagcacatgaagatgaaatgcctgggcaacagtggtttgctcatgctctccttgaaggcgaagcatatgaaccgccttgttacatacaaccttttgaaaagggagtggcagaaggttcctgattgcatgctaccatggagtcgaaaaaggcaatggataacatgtggcacagcatttgatccggtcccctgcgccttggtctgacatggaattttaccttctttgtctgagcactataatattttagtcctttcatatcattggcctatctttagatctttctatgttgttgtgacaagttctgcgaaaacgcattactgtggtttgctttgtataacgccgccgaaacaatcgaacggtttcctttatcacctgctgttctgttaagcttgtaatctttctgaacgtgcagttacctgcccagagctgagttcattatacaataaataccgggatgttaatgtttggactctggtgcatggagatgcagtggtgcttgttattaccatgaaaataatgtttttaattattgtgcatggagatgta

SEQ ID NO: 209129 - DNA, 1937 bp, Zea Mays
gctcataacactaaggcccacgtcccttcgcccagacccccaccggaagggctctcatcgtcccctccactccactcgtttctttcgcttcccgcggcgaaagccctcgaagcagataaggcctaccggctgccgccgtgcccgtgctcgcgctcgaccaccgccggccatggtcggcgtcgccctcgcgccggcagtgtcccgcgtgccttgccgtcccggcgcttccttccacgcctcgcgcccctcctcttcggcgcggctcccggccaggccgcgggcgcgggcgcgggcgccgccggagaggctcgtggttgtcgcgcggtactcgtcctcgtacgaggtcgagggcgaggaggaggaggaagatgaggaagggctcgggggtggcggaggctgggggaggagggaccgcgggcccgaccccgactacgacccggcccttgacatcgaacgcatcgagtcctcgaccgtaaggctattggacgaacagaaaagaatggttggtgtagtatctgtcagcgaggcagttcagattgcagacgataatgatcttatactggcaatattatcaatggatggggaccccccagtacttcgactctttgatgagagagattacaaaaaacataggtatgaacaacagaagaagaaaaagattcagcagaaaagatctgtcgcgaaacgcatgggcttgaaggagctgaaaatgggatacaacattgacatccatgattacagcgtgaggcttaaagctgcaaaaaagtttcttaaagctggcgacaaggttaagataattgtgaacctgaaaggacgggaaaacttgtacaaaaaagaagctatcgaactccttagaagattccaaaatgacgttggcgagctggcgaccgaagaaagtaagaatttcgcggagaggaatatatatctggttcttgttcccaataagatagctatacagaaagaacaggatgaattgaacaaaaagggtgctgtgagagaagagaaagaccaatcagacagtgatgaaccagaagagaacgaccaaccagacagcgatgtacccctgacagaactgctggaggaaagtatggaacccgaggcagaagtctcagcaaacgtttgatttgaactgtagaggccaaggtgcctgagattgaaacaagtatcacgcaggtacagttgctgtagaattgcagctctcgtaaatacaaggcaggctggttcttttgtgcaacaattatatctgttaaactccatctccacaagctatccgataggcgccaaggcgtctgacaagtaaacaaggcttgatgatgtatgtcctccaagtctccaacccctcagcattgaaggatgatgatacctaggaactggaaatcaccacccctcgcataaatggattgagacagagaaaagttgagacgtgtctatttgacaagtgcacatgttattgcgagtttgagaccttgtgacttccttccaggacaggatatagatgattttgatcattggtggtgcttcaatagtgctcggttgggtggaatgagtaaaaagggctttgactccttggttgctttaggcgcgtggatgttgtggaaacatagaaatggtgttgtcttcaatggctcccatccaaatttgatgggggtcgtctggttggccagggaggaagctttcttgtggtctttggctggggctaagggtttttcttacctcctagctcaaagacgggtggtgtagtttttttttttctctgttttagttggggtgtttgtcagctgacaaacgctctgtccctgcccctgttccagttgttctttctggctaggtgggttcggtgtgtgtgtgtttgtgtgtgtatgtgtgtctgtctgtttcggggtatttttccctttttttcttcttaatatattgatgcgcagctctcctgcgtgttc

SEQ ID NO: 209130 - DNA, 1672 bp, Zea Mays
ccagtcctcaccccacgtccccacccttgtcgccctttcgcttccgtctcgtttggacctccatccgcggccgccgccgccgcgctgagtttgggccgggctctgttaatctgggcgactttgattttctctgctcccgctgccacggccgtcaggagtgaagcgatgctggagaaagaccggatatcctacttctacgacggagatgttggcaatgtctactttgggccaaatcaccccatgaagccacatcgtctctgtatgacacatcaccttgttctttcatatggacttcatcaaaagatggagatatatagaccacacaaagcatatccaatagagcttgcccaattccattctgctgattatgtggaattcttgcaccggataactcctgattcccagcacctatatgcaagtgaactaactagatacaatcttggagaagactgtccggtctttgataatttgtttgagttctgccaaatctatgcgggaggaactttagatgctgctcgcagattaaatcataaaatatgtgacattgccattaattgggctggtgggctacatcatgccaaaaagtgtgaggcttcaggcttctgttacattaatgatctagtattaggaattctggagcttctcaagtaccatgccagggttctttatattgacattgatgtccatcatggagatggagttgaagaagccttttatttcactgacagggtaatgactgtgagtttccacaagtatggtgacctgttctttcctggaacaggtgatattaaagatataggagaaagggaaggaaaatattatgccatcaacattccacttaaagatgggatagatgacactagctttactcggctttttaaaacagtcatgctgaatgtgtaaagtttgtcaagaaattcaatattccccttctggtaactggaggtggtggatacaccaaggagaatgtagcacggtgttgggctgttgaaactggggtccttttagacacagaactcccaaatgagattccaaaaaatgaatatattgagtactttgctccagattatacattgaaagttccaaatttgaacatggacaatttgaacagtaagacctatctcagttcaatcaaagtgcaagtgatggagagtttgcggtacatacagcatgctcctggtgttcaaatgcaagaggttcctcccgatttttatatcccggactttgatgaagatgaattggatcctgatgaacgtgttgaccagcacactcaagacaagcagattcaccgtgatgatgagtactatgaaggtgacaatgacaacgatcacgacgacggcacacgctaatctgcttcttctgaggccctggtgtaaatggaaacctgagattcttcactgttgtgtgtagttcagcagccttgagatgtaatagtttgtcagttgacagcagggatctaatttagcaggtcaaagtggtttagacttttataagggattctgacccctcctgaattacacattgtagtacaagtctgcatatttttaagcatgcaaaaattcaaatttctcagtggtattagtatctcaagaaaatacaaattcctcgctcagtaacattgctgatatgtggtgaatttgattatatctagaaccccaaggcctagtttgag

SEQ ID NO: 209131 - DNA, 1841 bp, Zea Mays
ccagtcctcaccccacgtccccacccttgtcgccctttcgcttccgtctcgtttggacctccatccgcggccgccgccgccgcgctgagtttgggccgggctctgttaatctgggcgactttgattttctctgctcccgctgccacggccgtcaggagtgaagcgatgctggagaaagaccggatatcctacttctacgacggagatgttggcaatgtctactttgggccaaatcaccccatgaagccacatcgtctctgtatgacacatcaccttgttctttcatatggacttcatcaaaagatggagatatatagaccacacaaagcatatccaatagagcttgcccaattccattctgctgattatgtggaattcttgcaccggataactcctgattcccagcacctatatgcaagtgaactaactagatgtatggatgctggagttttctctttccaaactattcttcaggactgctaatttcacaatgaaatacatgccatacaatcttggagaagactgtccggtctttgataatttgtttgagttctgccaaatctatgcgggaggaactttagattaaatcataaaatatgtgacattgccattaattgggctggtgggctacatcatgccaaaaagtgtgaggcttcaggcttctgttacattaatgatctagtattaggaattctggagcttctcaagtaccatgccagggttctttatattgacattgatgtccatcatggagatggagttgaagaagccttttatttcactgacagggtaatgactgtgagtttccacaagtatggtgacctgttctttcctggaacaggtgatattaaagatataggagaaagggaaggaaaatattatgccatcaacattccacttaaagatgggatagatgacactagctttactcggctttttaaaacaattattgccaaagttgttgagacatatctgcctggtgctattgttcttcaatgtggggctgattcattggcgagggatcgtttaggctgcttcaatctctctattgaaggtcatgctgaatgtgtaaagtttgtcaagaaattcaatattccccttctggtaactggaggtggtggatacaccaaggagaatgtagcacggtgttgggctgttgaaactggggtccttttagacacagaactcccaaatgagattccaaaaaatgaatatattgagtactttgctccagattatacattgaaagttccaaatttgaacatggacaatttgaacagtaagacctatctcagttcaatcaaagtgcaagtgatggagagtttgcggtacatacagcatgctcctggtgttcaaatgcaagaggttcctcccgatttttatatcccggactttgatgaagatgaattggatcctgatgaacgtgttgaccagcacactcaagacaagcagattcaccgtgatgatgagtactatgaaggtgacaatgacaacgatcacgacgacggcacacgctaatctgcttcttctgaggccctggtgtaaatggaaacctgagattcttcactgttgtgtgtagttcagcagccttgagatgtaatagtttgtcagttgacagcagggatctaatttagcaggtcaaagtggtttagacttttataagggattctgacccctcctgaattacacattgtagtacaagtctgcatatttttaagcatgcaaaaattcaaatttctcagtggtattagtatctcaagaaaatacaaattcctcgctcagtaacattgctgatatgtggtgaatttgattatatctagaaccccaaggcctagtttgag

SEQ ID NO: 209132 - DNA, 1634 bp, Zea Mays
ccagtcctcaccccacgtccccacccttgtcgccctttcgcttccgtctcgtttggacctccatccgcggccgccgccgccgcgctgagtttgggccgggctctgttaatctgggcgactttgattttctctgctcccgctgccacggccgtcaggagtgaagcgatgctggagaaagaccggatatcctacttctacgacggagatgttggcaatgtctactttgggccaaatcaccccatgaagccacatcgtctctgtatgacacatcaccttgttctttcatatggacttcatcaaaagatggagatatatagaccacacaaagcatatccaatagagcttgcccaattccattctgctgattatgtggaattcttgcaccggataactcctgattcccagcacctatatgcaagtgaactaactagatgtatggatgctggagttttctctttccaaactattcttcaggactgctaatttcacaatgaaatacatgccatacaatcttggagaagactgtccggtctttgataatttgtttgagttctgccaaatctatgcgggaggaactttagggtaatgactgtgagtttccacaagtatggtgacctgttctttcctggaacaggtgatattaaagatataggagaaagggaaggaaaatattatgccatcaacattccacttaaagatgggatagatgacactagctttactcggctttttaaaacaattattgccaaagttgttgagacatatctgcctggtgctattgttcttcaatgtggggctgattcattggcgagggatcgtttaggctgcttcaatctctctattgaaggtcatgctgaatgtgtaaagtttgtcaagaaattcaatattccccttctggtaactggaggtggtggatacaccaaggagaatgtagcacggtgttgggctgttgaaactggggtccttttagacacagaactcccaaatgagattccaaaaaatgaatatattgagtactttgctccagattatacattgaaagttccaaatttgaacatggacaatttgaacagtaagacctatctcagttcaatcaaagtgcaagtgatggagagtttgcggtacatacagcatgctcctggtgttcaaatgcaagaggttcctcccgatttttatatcccggactttgatgaagatgaattggatcctgatgaacgtgttgaccagcacactcaagacaagcagattcaccgtgatgatgagtactatgaaggtgacaatgacaacgatcacgacgacggcacacgctaatctgcttcttctgaggccctggtgtaaatggaaacctgagattcttcactgttgtgtgtagttcagcagccttgagatgtaatagtttgtcagttgacagcagggatctaatttagcaggtcaaagtggtttagacttttataagggattctgacccctcctgaattacacattgtagtacaagtctgcatatttttaagcatgcaaaaattcaaatttctcagtggtattagtatctcaagaaaatacaaattcctcgctcagtaacattgctgatatgtggtgaatttgattatatctagaaccccaaggcctagtttgag

SEQ ID NO: 209133 - DNA, 1712 bp, Zea Mays
ccagtcctcaccccacgtccccacccttgtcgccctttcgcttccgtctcgtttggacctccatccgcggccgccgccgccgcgctgagtttgggccgggctctgttaatctgggcgactttgattttctctgctcccgctgccacggccgtcaggagtgaagcgatgctggagaaagaccggatatcctacttctacgacggagatgttggcaatgtctactttgggccaaatcaccccatgaagccacatcgtctctcatatccaatagagcttgcccaattccattctgctgattatgtggaattcttgcaccggataactcctgattcccagcacctatatgcaagtgaactaactagatacaatcttggagaagactgtccggtctttgataatttgtttgagttctgccaaatctatgcgggaggaactttagatgctgctcgcagattaaatcataaaatatgtgacattgccattaattgggctggtgggctacatcatgccaaaaagtgtgaggcttcaggcttctgttacattaatgatctagtattaggaattctggagcttctcaagtaccatgccagggttctttatattgacattgatgtccatcatggagatggagttgaagaagccttttatttcactgacagggtaatgactgtgagtttccacaagtatggtgacctgttctttcctggaacaggtgatattaaagatataggagaaagggaaggaaaatattatgccatcaacattccacttaaagatgggatagatgacactagctttactcggctttttaaaacaattattgccaaagttgttgagacatatctgcctggtgctattgttcttcaatgtggggctgattcattggcgagggatcgtttaggctgcttcaatctctctattgaaggtcatgctgaatgtgtaaagtttgtcaagaaattcaatattccccttctggtaactggaggtggtggatacaccaaggagaatgtagcacggtgttgggctgttgaaactggggtccttttagacacagaactcccaaatgagattccaaaaaatgaatatattgagtactttgctccagattatacattgaaagttccaaatttgaacatggacaatttgaacagtaagacctatctcagttcaatcaaagtgcaagtgatggagagtttgcggtacatacagcatgctcctggtgttcaaatgcaagaggttcctcccgatttttatatcccggactttgatgaagatgaattggatcctgatgaacgtgttgaccagcacactcaagacaagcagattcaccgtgatgatgagtactatgaaggtgacaatgacaacgatcacgacgacggcacacgctaatctgcttcttctgaggccctggtgtaaatggaaacctgagattcttcactgttgtgtgtagttcagcagccttgagatgtaatagtttgtcagttgacagcagggatctaatttagcaggtcaaagtggtttagacttttataagggattctgacccctcctgaattacacattgtagtacaagtctgcatatttttaagcatgcaaaaattcaaatttctcagtggtattagtatctcaagaaaatacaaattcctcgctcagtaacattgctgatatgtggtgaatttgattatatctagaaccccaaggcctagtttgag

SEQ ID NO: 209134 - DNA, 2055 bp, Zea Mays
ccagtcctcaccccacgtccccacccttgtcgccctttcgcttccgtctcgtttggacctccatccgcggccgccgccgccgcgctgagtttgggccgggctctgttaatctgggcgactttgattttctctgctcccgctgccacggccgtcaggagtgaagcgatgctggagaaagaccggatatcctacttctacgacggagatgttggcaatgtctactttgggccaaatcaccccatgaagccacatcgtctctgtatgacacatcaccttgttctttcatatggacttcatcaaaagatggagatatatagaccacacaaagcatatccaatagagcttgcccaattccattctgctgattatgtggaattcttgcaccggataactcctgattcccagcacctatatgcaagtgaactaactagatacaatcttggagaagactgtccggtctttgataatttgtttgagttctgccaaatctatgcgggaggaactttagatgctgctcgcagattaaatcataaaatatgtgacattgccattaattgggctggtgggctacatcatgccaaaaagtgtgaggcttcaggcttctgttacattaatgatctagtattaggaattctggagcttctcaagtaccatgccagggttctttatattgacattgatgtccatcatggagatggagttgaagaagccttttatttcactgacagggtaatgactgtgagtttccacaagtatggtgacctgttctttcctggaacaggtgatattaaagatataggagaaagggaaggaaaatattatgccatcaacattccacttaaagatgggatagatgacactagctttactcggctttttaaaacaattattgccaaagttgttgagacatatctgcctggtgctattgttcttcaatgtggggctgattcattggcgagggatcgtttaggctgcttcaatctctctattgaaggttctccagtttttaacagatatatacacacatagaatctacaagactcatgtgtgtatataatatttatccatcggctgctagagtgtcttttgtgggaatgggaagccccatgtccttgattatccattttttctgtttttgctgagtttcctcgcattattggaggtttagagttccttcggacaagtcacctagtttcctgaagctaagcctactatatttgtccattagtgcttaactgcttacttgccctatctgttttcataaacaggtcatgctgaatgtgtaaagtttgtcaagaaattcaatattccccttctggtaactggaggtggtggatacaccaaggagaatgtagcacggtgttgggctgttgaaactggggtccttttagacacagaactcccaaatgagattccaaaaaatgaatatattgagtactttgctccagattatacattgaaagttccaaatttgaacatggacaatttgaacagtaagacctatctcagttcaatcaaagtgcaagtgatggagagtttgcggtacatacagcatgctcctggtgttcaaatgcaagaggttcctcccgatttttatatcccggactttgatgaagatgaattggatcctgatgaacgtgttgaccagcacactcaagacaagcagattcaccgtgatgatgagtactatgaaggtgacaatgacaacgatcacgacgacggcacacgctaatctgcttcttctgaggccctggtgtaaatggaaacctgagattcttcactgttgtgtgtagttcagcagccttgagatgtaatagtttgtcagttgacagcagggatctaatttagcaggtcaaagtggtttagacttttataagggattctgacccctcctgaattacacattgtagtacaagtctgcatatttttaagcatgcaaaaattcaaatttctcagtggtattagtatctcaagaaaatacaaattcctcgctcagtaacattgctgatatgtggtgaatttgattatatctagaaccccaaggcctagtttgag

SEQ ID NO: 209135 - DNA, 1561 bp, Zea Mays
ccagtcctcaccccacgtccccacccttgtcgccctttcgcttccgtctcgtttggacctccatccgcggccgccgccgccgcgctgagtttgggccgggctctgttaatctgggcgactttgattttctctgctcccgctgccacggccgtcaggagtgaagcgatgctggagaaagaccggatatcctacttctacgacggagatgttggcaatgtctactttgggccaaatcaccccatgaagccacatcgtctctgtatgacacatcaccttgttctttcatatggacttcatcaaaagatggagatatatagaccacacaaagcatatccaatagagcttgcccaattccattctgctgattatgtggaattcttgcaccggataactcctgattcccagcacctatatgcaagtgaactaactagatacaatcttggagaagactgtccggtctttgataatttgtttgagttctgccaaatctatgcgggaggaactttagggtaatgactgtgagtttccacaagtatggtgacctgttctttcctggaacaggtgatattaaagatataggagaaagggaaggaaaatattatgccatcaacattccacttaaagatgggatagatgacactagctttactcggctttttaaaacaattattgccaaagttgttgagacatatctgcctggtgctattgttcttcaatgtggggctgattcattggcgagggatcgtttaggctgcttcaatctctctattgaaggtcatgctgaatgtgtaaagtttgtcaagaaattcaatattccccttctggtaactggaggtggtggatacaccaaggagaatgtagcacggtgttgggctgttgaaactggggtccttttagacacagaactcccaaatgagattccaaaaaatgaatatattgagtactttgctccagattatacattgaaagttccaaatttgaacatggacaatttgaacagtaagacctatctcagttcaatcaaagtgcaagtgatggagagtttgcggtacatacagcatgctcctggtgttcaaatgcaagaggttcctcccgatttttatatcccggactttgatgaagatgaattggatcctgatgaacgtgttgaccagcacactcaagacaagcagattcaccgtgatgatgagtactatgaaggtgacaatgacaacgatcacgacgacggcacacgctaatctgcttcttctgaggccctggtgtaaatggaaacctgagattcttcactgttgtgtgtagttcagcagccttgagatgtaatagtttgtcagttgacagcagggatctaatttagcaggtcaaagtggtttagacttttataagggattctgacccctcctgaattacacattgtagtacaagtctgcatatttttaagcatgcaaaaattcaaatttctcagtggtattagtatctcaagaaaatacaaattcctcgctcagtaacattgctgatatgtggtgaatttgattatatctagaaccccaaggcctagtttgag

SEQ ID NO: 209136 - DNA, 1854 bp, Zea Mays
ccagtcctcaccccacgtccccacccttgtcgccctttcgcttccgtctcgtttggacctccatccgcggccgccgccgccgcgctgagtttgggccgggctctgttaatctgggcgactttgattttctctgctcccgctgccacggccgtcaggagtgaagcgatgctggagaaagaccggatatcctacttctacgacggagatgttggcaatgtctactttgggccaaatcaccccatgaagccacatcgtctctgtatgacacatcaccttgttctttcatatggacttcatcaaaagatggagatatatagaccacacaaagcatatccaatagagcttgcccaattccattctgctgattatgtggaattcttgcaccggataactcctgattcccagcacctatatgcaagtgaactaactagatgtatggatgctggagttttctctttccaaactattcttcaggactgctaatttcacaatgaaatacatgccatacaatcttggagaagactgtccggtctttgataatttgtttgagttctgccaaatctatgcgggaggaactttagatgctgctcgcagattaaatcataaaatatgtgacattgccattaattgggctggtgggctacatcatgccaaaaagtgtgaggcttcaggcttctgttacattaatgatctagtattaggaattctggagcttctcaagtaccatgccagggttctttatattgacattgatgtccatcatggagatggagttgaagaagccttttatttcactgacagggtaatgactgtgagtttccacaagtatggtgacctgttctttcctggaacaggtgatattaaagatataggagaaagggaaggaaaatattatgccatcaacattccacttaaagatgggatagatgacactagctttactcggctttttaaaacaattattgccaaagttgttgagacatatctgcctggtgctattgttcttcaatgtggggctgattcattggcgagggatcgtttaggctgcttcaatctctctattgaaggtcatgctgaatgtgtaaagtttgtcaagaaattcaatattccccttctggtaactggaggtggtggatacaccaaggagaatgtagcacggtgttgggctgttgaaactggggtccttttagacacagaactcccaaatgagattccaaaaaatgaatatattgagtactttgctccagattatacattgaaagttccaaatttgaacatggacaatttgaacagtaagacctatctcagttcaatcaaagtgcaagtgatggagagtttgcggtacatacagcatgctcctggtgttcaaatgcaagaggttcctcccgatttttatatcccggactttgatgaagatgaattggatcctgatgaacgtgttgaccagcacactcaagacaagcagattcaccgtgatgatgagtactatgaaggtgacaatgacaacgatcacgacgacggcacacgctaatctgcttcttctgaggccctggtgtaaatggaaacctgagattcttcactgttgtgtgtagttcagcagccttgagatgtaatagtttgtcagttgacagcagggatctaatttagcaggtcaaagtggtttagacttttataagggattctgacccctcctgaattacacattgtagtacaagtctgcatatttttaagcatgcaaaaattcaaatttctcagtggtattagtatctcaagaaaatacaaattcctcgctcagtaacattgctgatatgtggtgaatttgattatatctagaaccccaaggcctagtttgag

SEQ ID NO: 209137 - DNA, 544 bp, Zea Mays
aaggcgctcatcgactccagccagccgcccaaaaatccaggcgcaaatcacaacctcgcatcctcttctgtcccgtctccagctcttcgttcgttcccctctcgccgcccgtctcccccgcggtcgaggagccgccaatagcaaggagagggtttcctcctccctccacggctccaccgagctccccgatccctccgccccaaatcccacacacccggttggccaccgcctcgccatggatttggatctgtggatctccaaggtcaaggagggtcagcacctcgccgagcacgagcttcagtccctctgcgaatatgtgaaggagatcctcatcgaagagtcgaacgtgcaaccagtgaacagccccgtgacggtttgcggtgatatccatgggcagttccatgacctaatgaagctcttcgcgacgggtggccacgtcccagagacgaactatattttcatgggtgattttgtggaccgtggcttcaatagtctagaggttttcaccatcctattgctactaaaagcgaggtatcctgcgcct

SEQ ID NO: 209138 - DNA, 1537 bp, Zea Mays
ctctagtgtagtgttgccacggccggaagaggaaccgctgtcggcctgctccacctccacggctccacctgtctgctctctgtctgtcccgcgtcctcctccgcagcacgacgaccgcatcgcgttctacgttctccgccctctccgctccccctactctgcttggtttcccagaagatttgattggtttccccaaatccggtgactccattcctgttgttcttcacgtcgaccccgggaacctcccagaaggctctagcgaccccggcgctctgagtgctgtgctgccggcggcgagatccaggagctgcctgccatggtgaaggacagcgcctactacgacgtcctaggggtcagcgtcgacgcgtcctccgccgagatcaagaaggcgtattacatcaaggcgaagctggtgcatccggacaagaatcccgggaaccctgacgccgcactcaagttccaggaacttggagaggcctatcaagttcttagtgatcctgggaaaaaggaggcttatgataagtatggaaaggagggtattccccaggataacatggtggatcctgctgctgtctttgggatgatttttggaagtgactattttgaagattacgttggccagcttgctctagcatctatagcctcagtagaggttgatgaaaactcaaacagtcaagaagcaagagcaaaggttcaagaaaagataaaagagttacaaagagagagagaacaaaagcttacccagagcctgaaagaccgacttcaaccatatgtagatgagagaaaggatgaatttgtgagctacgcaagcacagaagctaggcgtttatctgaagcaggtgctatttctctaatacaacttcaagaagggatgaaaaagatggaaggaagcgagaacagtgaagagcaacttatgaagagttttgaggagaaaaaagatgccatgcttagctcgctatggaaaattaatgtggttgatattgagtcaacactttcacgtgtctgccaagcagttctgagagataacacggtctccaaagatgtcctgaagctgcgagcgaaagcgttgaaaaagctcggaacgatattccaaggcgcaaaatctatgtaccgtcgtgaaaacagcctgcgcgttgaaacgagcacaaatcagcaagctaacccgtcacactgaagcccatggaccaccgtgtagcaagggatcggatttggtgatttttttttgtggttttggcctttgttaatttgtttgtctgctaacgatagcattcggaaaatgcaaatccggtctacactagtacccctctattaattttctgtagatgtgagcatttaacacgaagctgtgaattgcgcttgatgcagcactataatctgtagctgtgtttttcttccaggattttaagcattgtatttgtatacttatgtgccaagtatgtcttgcttcatttcactctgaatcgctgatgtcctggccgttctgcaccttttcagggcacgggaattttccctgtataatttcaaagaaaaatcaaaa

SEQ ID NO: 209139 - DNA, 709 bp, Zea Mays
tcaatcgattccgattttctatggttctggtgcttggatttgaagaggaacattgaaaatttggagaggaatggtgttaccagcatgcggtccatggtcaatcttggctcagaggtgtacatgcaagcagaagtaccagatacaaggcatatttttgtggatatcggtctaggttttcatgtggaatttacttggcaagaagctttacagttcatatctgtaagagaggcaaggttgactaggcaaatagacgaatacacgcatctcatcgcaagcataaaagcacagatcaagttggtatgtgaaggtatccgcgaagtgctgcagctgcctgcggagaaagagttatcgcccaggaatacgtggtagaatttggttctcaatggagcagggggtggtgttctttaaacgtggttccgtttcaactcttgcagttgaaattattgtggtgccgacagtattttagagcagagaatgaggttccccttcgtacaacaatctcttcgacgacaccacgtacaactcatactgatttctatgtattcattacgttggcatatggccttgccgatttgcagtttatttgagcctcttttccaagttaggttgagctcacaccaccgggccttccctgaccccgacgcgcgcagttgcgcacacttacccattctcggcccacgacaagttcttataacgattaatgatccag

SEQ ID NO: 209140 - DNA, 2553 bp, Zea Mays
cgcgaactaatctaagtgcctcctagaaaaagcttaaccaaagcaaacccctcgcccccacgcaaaccccgataccttcgccttttccgcccgcgccgtccgtctccgtcgatggcgatggagattccggcgcaggtgcgccgctactggctgccgatactcctattcaccgccggattcctgttccaggtcctcgtcctgccccgccacttcccgcccactcactacgacgtattgggagtggagaggttcgcgtctgtcgagcgggtcgtggaggcatacgagtcgctctccaaggagtggctatctgaaacgagtcaccaaccaactgttgatattataaagatccgttatgcatatgagctgttgacaaatccagttttaaagagggactatgatctttttggactggatgagcataaggatgtccttgagagagtcaaagaacaatatcaaatggtgcactttctcaaaattgatcttccattgttaaaagactctgtagtcagtatattcaaaggggagtcctcggtgtgctcaatttattgagtactggaagcaaattggcactcaattggatggaattgtcagaactgctatggtagaagttggtgattcacaagtggctggttatttcgccgaaaaacggttctcgaaacggccatttttccgtaatggtgtaccaacacttgttgcataccctgctaactgcaaaagtccatcctgttacatgaggtacccaggtgggctttttgtggattctgttgttgattgggttgcaacatcagttgtaggattgcctcggatcttgtactattcaaaggagacattgggcccccaattcattgggaagagtggcaatcataaggtcaaaactatctttttctcaagtactggagagcgtgctgctccattcgttcgccaagctgcccaagagtattcaagttattcatcatttggatttgtcctatggagagaagacgaatcccagatttggtggaattcgttaggggtggaatcggctccagcacttgttttcttgaaggggccaggcacaacgccttttgtacaccatggaatttttagcaagtcagagttcatagagatgatggaggagcacaagcaccatgaactgcgacagctaagaagtgacacatctttggaactgggttgtgatgctagaggtcattcacgtgctggcaatgatgcagcaatttggtattgtgtaattgttgctggtcgtccaggtgcagaattaagcaagaagagacaaattttgcggaaggctcaagacaaattgttaggtgatgttgacagaagtgctgggaacgttgacaattcagtagagacatcaagtgctgcaactgccttcaaagatgataggttaacctttgtttggttagatggagaagtacaaaagcaaatttgtgccttctaccttgccactgattatactggagcctgtggccctcgagactttggagatgacaatgataaacctgaaatttttattgttcgattccaaagaaatgcaacatatgaggcactgaaagctgaaaaaaagaacaatcttgtggatgttctccagggacagcatgctgatgcgtcccagttagtggcaaggtacaagggcccagttgaaattgaagagataaataggtggatctctcagattatcaaagatggagatactagagaaattccttactttacttcaaaggtgccagatcttgtaccagaggaaacaagcaaagcatggaattctaaaagtatccgctcagcagggaaaagtctaaaagagaacatcggtttccatttccaagattacctaacccacccaatgattggttcaactttgcttatgtgcggatgtatttctatgggaatattatggttcaggaacaacacacccactcaaagtactcgacaggagaaagctcggaaagacaaggcaaagaggccccgtccgaagcttagcacgtcgctcttcggtgaaccttctgtcccagacgtcgacccaaaagatgctcgtcagtgggaaatgtcaagctcggattcagactaatgactcgcttcttacatttggacctgacgtactgcaaagacgttttaaaattaagtaaactacatagtagtgcggtggccttagttttgggaaatggaacagagtataaccgatgtagtgaaaacagttggaccactgaagtaatccagttgccatctttccgatgcttcagctgccctgtgacgtgactccagggacgtatttgttgacacctgcttgaaaactgacaagcctctctattagacagagtgttaacctgtggtctcagaatggagtaaacaatggtagacagagtgttaacgtacatcatgtctgatgtaagccggcaggtattttcgtcgtgagccaaaactcggctaacgtcgtgacacggactattatttttatttttcttaaataataatcccttttcagacataccactcgcgttcgctgcagttgaatcaaactgcaggttgccaaacaccttctcagacgctgtcaatgcc

SEQ ID NO: 209141 - DNA, 683 bp, Zea Mays
gactggaaaaaggtgtctgaacatttgaaattactgaagatgcaaaaccagattggacagacaaagaaactcttcactttgcttgaggctgtcttgcattatggggaagactggaaaaaggtgtctgaacatgttagtagtcggtcagaaaaagattgtattgcaagatttataaggctaccttttggagaacagttcatgggacacaaggaggatagaatgaggtttgagaatactgatgacaacactgatgagcctggagcaaatgtctcaaaacgaccacgtctcactccactagcagatgcaagcaatccgattatggctcaggggagttcattgccagtggaagtgatgatggtagatggtttatatgggagaaaagaacaggaaggcttactaaaatgcttgcaggggatcgagcagctgtgaactgcatacagtctcatcccctcgactgtgcagttgcaacaagcggaattgataacacaataaaggtatacaatctatgtttccattaacttgatgtattaagtgccatagagaataaccagcggacattatgtcgaaagcgtcaaattgtactgccttttgattttttggaacgagttcggatgcgagagttttcagaaagtttcgagtgtaaccagagctgatttactatcgctggagttactgaggtactt

SEQ ID NO: 209142 - DNA, 2159 bp, Zea Mays
gttagatgtcgccactacttaatactggaagctgtcaaactcatctctcaagggattcatcgcacctgaacttgggcggcttagtttcttgcaagagctgtatttggaccataacctgctctttggtacaattccaaaactaattggctcactgaagaacctgagggttctggacttgagcgtcaatcgactcactggaccgatcccttccgaattaggtggcttgagcagtgtgagcatagtaaatttccattccaatgggttgactgggaatataccgtcggagctgggaaaattacagaatctcgtcgaacttaggttggataggaatagattgaagggatcaattccaggaagcaatactgccagtttttctcctgcttcaaatattggatccacagctcacaatggactatgcccttcttcccgattatatgttgcggatttttcttacaactttcttgtcggaaaaattccatcctgcttgaaatatcttccaaggtcaagtttccaagggaactgcttccaggatgagtactctgtccaacaacgacctttgcaaatttgtacaagtggttctactggccagcaaggtgtcatatacggatccaaacatcctggccataaacatgaaaaaatggagcaaccaatttggcttcttgctttagaaatcgcaactggtgttcttctggttgtttttgtgattactggtatagttactgcttccagaagttgcaagctgaagccttctataagaatatcatcatggaatcgatcgaaaagttggagcgacgagataacagtgttgattgattctgatatgctgaaaagtctaccaaaattaagtcgccaggagcttgaagtggcctgtgaggattttagcaacatcattggctcaactccagagacggtagtctacaaaggaaccatgaaggatggacctgaagtttctgtgatatcgttgtgcgccttcgaaggtcattggactagccaccatgaactcttttaccaaaacaaggtcattgatctggcaagattgaatcatgagaacatagcaaagttcttagggtactgcagggagagtgatccattctctcggatgctagtcttcgagtacgcaccaaatgggacgttatttgagcatctacattatggagagggaggccaattttcttggctcaggcgaatgaagatagccattggaattgcccaggggttaagatacctgcacacggagctgcagcccccatttgctatatctgagctgaattcgaactccgtgtatgttacggaagattttactccaaagctggtggattttgaatgctggaaaatgatgttctcgagacactccatctcgagagacgagaaggctcgtgggcacttgaacagcaaatcctcttttcccggccacggggattctgcagcggatagacaagccgatgatatccaggccaacaccttcgctttcggagtgattttactggagatcatcagcgggcggcttccatactgcaaggataaaggctatttggtcgactgggcgagcaagtacctccagcaggcagaggagatcgggaagctggtggacccggagctgggcagcgtgcggagcgaggacctggcggtgctgtgcagcgtggtgagccggtgcatcgacccggacccgtcgaagcggccgtcgatgcagatcatcacgggcgtgctggagaacgggatcgacctgtcggcggccgccatcctcaaggagtcgtcgctggcgtgggccgagctcgccctcgccttgtgacacgctctactcccaccacctttgtgaatccatacggctgctgattgatttccttgactggcgtagggtttgctgccggtctcaactgagcagccgtttcgtatgaatgaatgaaacctgaaaggccatatgtatgttcttttcatccatccgttcgttctacacatccatcccgcacagatcatttgttttttttttttttgctccaatctattttaggttcagaaaacagtgtcggcaaaagaattatccggtaaaacgacagacgccgaatccatattgttgttattccttgacagcaacgatgactgatcaaatcaaaaggtcaggcgcgcgtgagacaaaaaataacgacgggtgacgaattgcg

SEQ ID NO: 209143 - DNA, 2271 bp, Zea Mays
aagtggagcgggacacaacgaagcggtgacgaagaacaagttaacccaacctggaagcgagtaagcgaccttcttgagcgtgaagccaaaggttggacctcaccgatccgccaccacgccacgaaatcatctcctactccagcagttccgctcctcgcgccgccaccgccaccgccacgatgccggaagacgtgcagatgaacgactcggagccccagtctgcggccccagctcccgccgccgccgcggcgccggcgctctccacactacaccatctgaaggagatcgcgtccgtgatcgaggctggttctctgtccaaggaggtccgccggatctcccgcgccttccgcctcaccgtcgcgctccgccgccgccttgccgcacgggacgtctccgccttcctcgccttcgcgctacccgcgtcctccgaagcctacgggcgcctcatcgccctggtgcccaaggaagatgatactgagatggacgttgatgctgtggctccagcaactcagatttcaatcaaacatggtctccctgagattgaaatatattgctacttgcttgcactgatttttcttattgatcagaagaaatacgatgaggtacatctggaacctttgattttccttatgtttgatgtgtgaaatttgactgctttgtattaaggctaaagtatgtgcaagtgtgagcattgctcgcctgaagaatctaaaccggagaactgttgatgtcttggcatctcgtctgtacttttattactcttatgtgtatgagcttaccaacagccttgctgaaatccgcggaatggcaactttgcatcgtgacgagctcggccaggaaactctgctgaatcttctcctccgcaattacctccactacaacttgtatgatcaggcagaaaagcttagatcaaaggcacctcgttttgaagcacattccaaccaacaattctgccgatacttgttctacttgggcaaaattaggacaattcagttggagtacactgatgctaaagaaagcctcctgcaagctgctcgtaaggcaccaacaactgcccgtggttttcggatccagtgcaacaaatgggctatcatagtgaggctgctgcttggtgagattccagagaggactgttttcatgcagaaaggaatgaagaaagctctgacaccttattttgagctcacaaatgctgtcagggttggggaccttgaactgttcaggactgtcgctgacaaatttgcaagcacattcagcgcagacaggactcgcaacttgattgtgaggctgcgccacaatgtcattcgaactggactgcgcaacatcagcatttcttactcaaggatctcccttgctgacattgctaagaagctaagactagactctgagaaccctgttgctgatgcggagagcattgtagccaaggccataagagatggcgcaattgacgccaccatagatcatgcaaatggctggatggtatcgaaggaaaccggtgatgtctactctacaaatgagccacaaattgcattcaactccaggattgcgttctgcctcaacatgcacaatgaggcggtcaaggcgatgagattcccccctaattctcataaggaaaaggagagcgccgagaagcgccgagagaggcttcaacaggaggaagaactggctaagcacatggctgaggaggaggatgacgacttctaaattagctgccttttgagcaaccacttgcaattgtggacttgttggaacgcctggttaaaccctgcctctagctactcgagtcatgcaaacactgtaatgttatgttgatcagggtttttctttaaattcaatacttgagttttaatctccttgaattgttaaaccacggaatttacccaccatgcaaatggctttcttttatttcatgcattctctcctcccacttggggcttttctataatgctgtattctgtgttcaatttccgtgtcttaatttaataaaattattattggttaaagtttgattataaagtaattcaatgttgtatacgtttcaaaacggtatgctttttagcgaacagaaacgttattcaactaatttttgttagccagaactagctagatgtttctcggtccatttcaatctgtttttatactagaggtagagcaaggctagacccatgtggacctactggaaagtaattagagaaaaaactattaattaattttgtgacttattactttgagatgcgtgcaaatttatatataggagtagggtggacaagaagg

SEQ ID NO: 209144 - DNA, 820 bp, Zea Mays
agtacgccgtttgcgccatcgttacgtccaccagaaggaaaacccaagccaacgacgacggcacggccaagaaacggggagtgccttccaaggcgaccgccccctctcgcgctccatacgtccatccgtcggcccagagccacaagataacgcagccaagaacaagagacaccgccgagcgagcgaggcggggagaagcaggtccaggaccaggagaaaggaaaaggaagcccagctctctctagcctggagccgagaagccgagggggcgaaggagcagcaaggcatggaggagcccgttccggctgatccccccaggattttctggaagtcaaggagttcagccaatggccggagcctgcaacaagagcctgacaaagacgctaccgaggaaactaacgagcaggctcaagaggaacccatgaagaccgacgacgcaacggacacagcagcagcagcagcagctacagctgagccgtacccgaaagctaacctatccgagaagcggaaggctctcttcgagcctctcgagccgatcaacggcaagcgcggcgctgctgagacgctgctcccaccgccggactttgagcccgcgtcgtaccccaaggggtggctggtgggcaagaaacgcaagctcgtcaacgtagacgtcgtggagagcatgcggaggattgcgatccaggaaatgaacagaaaggttcatgcataatcacatctttctagtggtcatgcaatgctgtttcttcactcgatcgtaaatgcatcgatgtgttcagttcaggcagttttgttgctgaacatgcatgcgtgcatcaaatgc

SEQ ID NO: 209145 - DNA, 1932 bp, Zea Mays
cgcgaaatgcatgccgtttaatttgatccgagcccacagtctctcctcgggcccaccgcgtccgaccggcgatggcaaagaccccgtcgttcgcggtggcggcggtcgccggaggccgcgggccggttcacaaccggacccagctcctcctcctcctcctcgtggccgtcgcagcctccgcatccacagcagggttcctcctccgcggtgccctgcgagacccttgcgacggccgtggggaccccgccgccctcaacaccgccgtcgccagcgggagtcccctcgggttcatgaggtccaagctcgtgctcctcgtctcccatgagctctccctctctggtggtccacttttactgatggaattagcatttcttctgaggcatgttggctcgcaagtggtgtggataacaaaccagagatcacaagaaacaaatgatgtcacatatagcttggagcataggatgttgaaccatggagtgcaggattttgcataaccaaaggccatgacacaccaacaaaagatgttgctaccctcattcaaagccttgatcaggttttaccagctagaggacaggaggcagttgatattgctctaaaagctgatctggttatcttaaacactgctgttgctggcaagtggcttgaccctgttctgaaagatcatgttcctaaagtccttccgaagattttgtggtggatccatgaaatgcgtgggcattactttaaggttgaatatgtcaaacatcttccctttgttgctggagccatgattgattctcatacaacggctgagtattggaatagcaggactagcgatcgcctgaaaatacagatgccacaaacttatgttgttcacctggggaatagtaaagaactaatggaagttgctgaagacaatgtcgcaagaagagtcctacgggaacatattcgtgaatcccttggagtacggagtgaggatctcctgtttgcaataataaacagtgtatcacgaggaaagggacaagacttatttcttcaagcattttatcaggctttgcagctcatccaacacgagaaacttaaagtgcctagaatacatgctgtagttgtgggaagtgatgttaatgctcagaccaaatttgagactcagttacgtgactttgtggtgaagaacacgattcatgaccgtgtccattttgtgaacaagacattggcagtggccccttacttggcagcaattgatgtgcttgttcagaattctcagggccgtggagaatgctttggaaggataacaattgaagcaatggcattcaagttgccagtattgggcacggctgctggagggaccacggagatcgtcctggacggctcgactggccttctgcatcctgctgggaaggagggcgtggcgcctcttgcaaagaacatcgtcagactcgcaagccacgccgagcagagggtctccatgggggaaaagggctatggcagggtgaaggaaatgttcatggagcaccacatggctgagaggatcgcggcggtgttgaaggatgtcctgaggaaatcacaggagcactccaggtcttgagctttgccgtgcccatcagcttgcgctaacatgttgaactagattttacgggctacgcctacgtggttcaggctgtaaactgtagattgcactctgttggtctactttttcacattcatgttttacctattaggccatgtccgattctattccaattcatataggttctatttcaatccatatagattaagagggattgaggagatttcaatcttagtaagtcaaaatctctttcaatccatatcaatcctttccaatccatatggattgaaaataactgaacgaagcctttagggatagaaccgacgctttgagggatgtttggtttgagaaattaaatcatctaaaataagatagtgtattatggg

SEQ ID NO: 209146 - DNA, 1590 bp, Zea Mays
tgtgatcccatcattggcagcttattggaacatgtgacggtgcactttgcgctttgcagtggtgattggtggtccacttttactgatggaattagcatttcttctgaggcatgttggctcgcaagtggtgtggataacaaaccagagatcacaagaaacaaatgatgtcacatatagcttggagcataggatgttgaaccatggagtgcaggttttaccagctagaggacaggaggcagttgatattgctctaaaagctgatctggttatcttaaacactgctgttgctggcaagtggcttgaccctgttctgaaagatcatgttcctaaagtccttccgaagattttgtggtggatccatgaaatgcgtgggcattactttaaggttgaatatgtcaaacatcttccctttgttgctggagccatgattgattctcatacaacggctgagtattggaatagcaggactagcgatcgcctgaaaatacagatgccacaaacttatgttgttcacctggggaatagtaaagaactaatggaagttgctgaagacaatgtcgcaagaagagtcctacgggaacatattcgtgaatcccttggagtacggagtgaggatctcctgtttgcaataataaacagtgtatcacgaggaaagggacaagacttatttcttcaagcattttatcaggctttgcagctcatccaacacgagaaacttaaagtgcctagaatacatgctgtagttgtgggaagtgatgttaatgctcagaccaaatttgagactcagttacgtgactttgtggtgaagaacacgattcatgaccgtgtccattttgtgaacaagacattggcagtggccccttacttggcagcaattgatgtgcttgttcagaattctcagggccgtggagaatgctttggaaggataacaattgaagcaatggcattcaagttgccagtattgggcacggctgctggagggaccacggagatcgtcctggacggctcgactggccttctgcatcctgctgggaaggagggcgtggcgcctcttgcaaagaacatcgtcagactcgcaagccacgccgagcagagggtctccatgggggaaaagggctatggcagggtgaaggaaatgttcatggagcaccacatggctgagaggatcgcggcggtgttgaaggatgtcctgaggaaatcacaggagcactccaggtcttgagctttgccgtgcccatcagcttgcgctaacatgttgaactagattttacgggctacgcctacgtggttcaggctgtaaactgtagattgcactctgttggtctactttttcacattcatgttttacctattaggccatgtccgattctattccaattcatataggttctatttcaatccatatagattaagagggattgaggagatttcaatcttagtaagtcaaaatctctttcaatccatatcaatcctttccaatccatatggattgaaaataactgaacgaagcctttagggatagaaccgacgctttgagggatgtttggtttgagaaattaaatcatctaaaataagatagtgtattatggg

SEQ ID NO: 209147 - DNA, 1405 bp, Zea Mays
ttgggttccctatggccagtttattcgttttaccagctagaggacaggaggcagttgatattgctctaaaagctgatctggttatcttaaacactgctgttgctggcaagtggcttgaccctgttctgaaagatcatgttcctaaagtccttccgaagattttgtggtggatccatgaaatgcgtgggcattactttaaggttgaatatgtcaaacatcttccctttgttgctggagccatgattgattctcatacaacggctgagtattggaatagcaggactagcgatcgcctgaaaatacagatgccacaaacttatgttgttcacctggggaatagtaaagaactaatggaagttgctgaagacaatgtcgcaagaagagtcctacgggaacatattcgtgaatcccttggagtacggagtgaggatctcctgtttgcaataataaacagtgtatcacgaggaaagggacaagacttatttcttcaagcattttatcaggctttgcagctcatccaacacgagaaacttaaagtgcctagaatacatgctgtagttgtgggaagtgatgttaatgctcagaccaaatttgagactcagttacgtgactttgtggtgaagaacacgattcatgaccgtgtccattttgtgaacaagacattggcagtggccccttacttggcagcaattgatgtgcttgttcagaattctcagggccgtggagaatgctttggaaggataacaattgaagcaatggcattcaagttgccagtattgggcacggctgctggagggaccacggagatcgtcctggacggctcgactggccttctgcatcctgctgggaaggagggcgtggcgcctcttgcaaagaacatcgtcagactcgcaagccacgccgagcagagggtctccatgggggaaaagggctatggcagggtgaaggaaatgttcatggagcaccacatggctgagaggatcgcggcggtgttgaaggatgtcctgaggaaatcacaggagcactccaggtcttgagctttgccgtgcccatcagcttgcgctaacatgttgaactagattttacgggctacgcctacgtggttcaggctgtaaactgtagattgcactctgttggtctactttttcacattcatgttttacctattaggccatgtccgattctattccaattcatataggttctatttcaatccatatagattaagagggattgaggagatttcaatcttagtaagtcaaaatctctttcaatccatatcaatcctttccaatccatatggattgaaaataactgaacgaagcctttagggatagaaccgacgctttgagggatgtttggtttgagaaattaaatcatctaaaataagatagtgtattatggg

SEQ ID NO: 209148 - DNA, 1516 bp, Zea Mays
gaactgaagctttgcaaacaagcctgttttagaaatatgcaaaacatgttggattgaaaagagactttcgactggttgtccggggtgctgctcgaaatatggcaccaatactgaagggctcctgtaatgctgtaatcctgatttcttccaatatactatttgtcccttttatataatatgctgtaatccggatttatataatatataactacattcgtgttaacaaacaaatgcaaacttattatcgtttttacaagttccatttatggctgaagttaatgttatcgaatagagtttacatgggtggtaaatatttctgttatagcacatgtgggctgcttttgaaacaagatgtgactatcttgctttccctgcagccgatgaggcacttatcattaaaagtttgacgcacaaagaaatcaatgcggtgataaaggaacttccaaatcctgtctacctttttcaaggtatagttttaagaagaggtgctaaagggactggcatgaagtccatagaacttgccctttccatgtgtgatattgttgacatgtatggttttacagttgatcctgggtacacggaatggacacggtatttctcagcccctaggaaagggcacaatccactgcaaggccgagcttattatcaacttctagaatgccttggggtcattcgtatccattcccccatgagagcacagagagtggaagattggtcagacataccaagcaaagaagagatcagaagggcacacaccatagcttttcgtctaaagaagcatgaaactggccagctagctgaactggggccatttagcaactgcaaggtatggggaacagtcgacccagactacggaccggtatcaggtacttcagacatgagcgagacgcgcaagaattcaaactacagcaagtgggagttgcttccgtttgagaagctgagaagagaagcgcaagaacaccatatccaaatgggtggcgtgtctctatacaagatggacggaaacaagttggatgatcttgtctgtgtgaggcatcagcgttcatcaagttaagaccgtggccgcctaagcctagttgtttggacgctgaattgatttcatggtggatctgaaaggatgctagacagcaagagccagaagatccgatgaagcagctctgctgtacccacttgtaaaattacatgagccatcgggttcagagcgaggcagccctctacctggaatatggaattcttttattggttgttttgggacttgtagccttctaggaatagctacttaagctgtctaggggttgttatgcgcacaccacatgacatggttttcacttcttttaacacagctgtaactgatgcaaatgggtcttgccatttctcaactatgaggtgcagttttgttaccgatccagcagtctctcgattccaaattcgtgacgtttgttgttaactgacaccttatttgactgtcccagttgagttcatttacaggattaatggatacccttcaatcttacaa

SEQ ID NO: 209149 - DNA, 2595 bp, Zea Mays
atacttttcccgctgccgcgtgatgctattttgagccggtcaatgtatgcgtaatacagggcgtaattatggattcttttgagggctctgatcatataactcaaagaaaggttgttcctgcaaaacatattgcattggttgatggaaagaatgagcctgctgtagaggggttgcctaatggttggctgaaagaatgcaggcctagaaagaaccgatatggatccagagtcaagagtgacacgttctatattgatccaatcaatggatacgaatttcactctctcaaggatgtacaccgctatcttgaatctggagacatcagtaaatgtattagattgccaaacaagagaaaaattgaggacctgcatactaaagaggaccaatctcatcatgtaagtttcatcttcaagttttggcccacatctgaatttgccctcgatcttgtgttagctgctacattggattgacaattggattcaaatcaacaaggagttaattcttaaggtagtatgattctttttaaggcaaaggtttatgaatttcatttgaactattttaccatccccccgagaagtactaagaggttacacaaattgtaatttgggagataccaaatccctagttgtaattttggtctttccccaaggactgtaaaaagcctcatttctggtctcatttcttctttaaatgaactgcggcgattctcttgtcgccctttcggaaaaaaatatctactattataaagcaccaatttttctggtttccacactcgtcacttttgtaaaaaaaacccttatatttcatagcacgggcaaaccatcctttcccatccttatgtgcaaaaaaaaacctatatgcacctgaacacaagcactgttcttgatagacacttgttcggagtctatccaatgcgtatttgcaatgcacctccgttatagttgacgtaagatgcatcttgtattgatgtaggctgtcatgctgaattatgatgcatttttatattctaactgagtgaactggaaggaattcttttcttgttgttattgctctttcagaaatacccaaactgttgatttgttttgtaaaatccagacaggaaaactatcagatcatacccagctggatactgctgatgagtctaatcgatatgatctaccggaaggtaccaatgcactgggatatgctctgcaaaatccagaaagcggagagaataatgaaaacattgcactgtccaagcctgacaatataagctcaatccaaattgaagctggtcaggttgaagctacagaagataagagcatccaatcaggctctatagaatacactccaggggaagctaaatctgtcactaggaaaggaatagatgtgaaggagaaaccgaaggggaaaaagtacaaaactaaacatgccaaagggattgctatacctcttagatcgtcacctcgtttagctgcactgaagattagccaggaagcaaataatgcaaccagagatggacatattggcacacagacagacaccaataacgtgccagaaccaaagcaagtcgaaaaacccaggcgaaagacgaattcttctgtaattcctgagaggaaagatggggaacctaccaggagttgtgcagaaacccttccttcacttcccaatcagatacagggagcatcattcccacagtcttcaggagatgctggatgccaggatgcaccagccgaggcacctgttctgcgacaacaagcaggagcaggacaaggcgaaacatctgatggtttgcctggatctgccctgacgtcgctgtttcaacatgtctggtcagacccgtgccttgtgttcgcgttcaggactctcctgggtgatatccctgttcttgatgacgctcgagcatatcggtcttcggcttatgatggtaacagagactactaccttccaccacagaacatgaataaaaatgctgcagccaactggtccgctctggcttatgatagtaacagaaaccacgcgcaagtcgaccatgttatgccgaggacatcagatacgttctacagcagtggttggttccctccccagtgaattcaatctaggaaatatgaaagcaatttcttacctggcaaaggacaaatcagaagcaaggatgcatgttgcaagcaagactgcagctcgttgtaattgtgtagacgatccataactaatagtctaatgtagctatcacatgctaccgtgcgccatcagcatcagtctaattcacaggaagctgtctggtggtagacttggcaatactttctgttgtttgtgtttttgtagtaccaacttgatcatgcattcacttgttgcattgttacgtgttagagcagcctcaatagtcaatatcccaggaagtgatctgggctgtactttgtctatgagcatccacttgtgtattactacttgtaacttggtagactttcaacgtgcatcgtggcatcggactaagttgtaccaatgtgtttgtttcgaaataaggtagtccatcatctttctactcctcacttttttatttggtttataaaataaaataagtcgatcatgttagagccccgtttagggttttagtgctagccc

SEQ ID NO: 209150 - DNA, 2019 bp, Zea Mays
cgcctacatacttttcccgctgccgcgtgatgctattttgagccggtcaatgtatgcgtaatacagtacagggcgtaattatggattcttttgagggctctgatcatataactcaaagaaaggttgttcctgcaaaacatattgcattggttgatggaaagaatgagcctgctgtagaggggttgcctaatggttggctgaaagaatgcaggcctagaaagaaccgatatggatccagagtcaagagtgacacgttctatattgatccaatcaatggatacgaatttcactctctcaaggatgtacaccgctatcttgaatctggagacatcagtaaatgtattagattgccaaacaagagaaaaattgaggacctgcatactaaagaggaccaatctcatcatgtaagtttcatcttcaagttttggcccacatctgaatttgccctcgatcttgtgttagctgctacattggattgacaattggattcaaatcaacaaggagttaattcttaagacaggaaaactatcagatcatacccagctggatactgctgatgagtctaatcgatatgatctaccggaaggtaccaatgcactgggatatgctctgcaaaatccagaaagcggagagaataatgaaaacattgcactgtccaagcctgacaatataagctcaatccaaattgaagctggtcaggttgaagctacagaagataagagcatccaatcaggctctatagaatacactccaggggaagctaaatctgtcactaggaaaggaatagatgtgaaggagaaaccgaaggggaaaaagtacaaaactaaacatgccaaagggattgctatacctcttagatcgtcacctcgtttagctgcactgaagattagccaggaagcaaataatgcaaccagagatggacatattggcacacagacagacaccaataacgtgccagaaccaaagcaagtcgaaaaacccaggcgaaagacgaattcttctgtaattcctgagaggaaagatggggaacctaccaggagttgtgcagaaacccttccttcacttcccaatcagatacagggagcatcattcccacagtcttcaggagatgctggatgccaggatgcaccagccgaggcacctgttctgcgacaacaagcaggagcaggacaaggcgaaacatctgatggtttgcctggatctgccctgacgtcgctgtttcaacatgtctggtcagacccgtgccttgtgttcgcgttcaggactctcctgggtgatatccctgttcttgatgacgctcgagcatatcggtcttcggcttatgatggtaacagagactactaccttccaccacagaacatgaataaaaatgctgcagccaactggtccgctctggcttatgatagtaacagaaaccacgcgcaagtcgaccatgttatgccgaggacatcagatacgttctacagcagtggttggttccctccccagtgaattcaatctaggaaatatgaaagcaatttcttacctggcaaaggacaaatcagaagcaaggatgcatgttgcaagcaagactgcagctcgttgtaattgtgtagacgatccataactaatagtctaatgtagctatcacatgctaccgtgcgccatcagcatcagtctaattcacaggaagctgtctggtggtagacttggcaatactttctgttgtttgtgtttttgtagtaccaacttgatcatgcattcacttgttgcattgttacgtgttagagcagcctcaatagtcaatatcccaggaagtgatctgggctgtactttgtctatgagcatccacttgtgtattactacttgtaacttggtagactttcaacgtgcatcgtggcatcggactaagttgtaccaatgtgtttgtttcgaaataaggtagtccatcatctttctactcctcacttttttatttggtttataaaataaaataagtcgatcatgttagagccccgtttagggttttagtgctagccc

SEQ ID NO: 209151 - DNA, 1919 bp, Zea Mays
gttctttcttgctccgacgcctacatacttttcccgctgccgcgtgatgctattttgagccggtcaatgtatgcgtaatacagggcgtaattatggattcttttgagggctctgatcatataactcaaagaaaggttgttcctgcaaaacatattgcattggttgatggaaagaatgagcctgctgtagaggggttgcctaatggttggctgaaagaatgcaggcctagaaagaaccgatatggatccagagtcaagagtgacacgttctatattgatccaatcaatggatacgaatttcactctctcaaggatgtacaccgctatcttgaatctggagacatcagtaaatgtattagattgccaaacaagagaaaaattgaggacctgcatactaaagaggaccaatctcatcatacaggaaaactatcagatcatacccagctggatactgctgatgagtctaatcgatatgatctaccggaaggtaccaatgcactgggatatgctctgcaaaatccagaaagcggagagaataatgaaaacattgcactgtccaagcctgacaatataagctcaatccaaattgaagctggtcaggttgaagctacagaagataagagcatccaatcaggctctatagaatacactccaggggaagctaaatctgtcactaggaaaggaatagatgtgaaggagaaaccgaaggggaaaaagtacaaaactaaacatgccaaagggattgctatacctcttagatcgtcacctcgtttagctgcactgaagattagccaggaagcaaataatgcaaccagagatggacatattggcacacagacagacaccaataacgtgccagaaccaaagcaagtcgaaaaacccaggcgaaagacgaattcttctgtaattcctgagaggaaagatggggaacctaccaggagttgtgcagaaacccttccttcacttcccaatcagatacagggagcatcattcccacagtcttcaggagatgctggatgccaggatgcaccagccgaggcacctgttctgcgacaacaagcaggagcaggacaaggcgaaacatctgatggtttgcctggatctgccctgacgtcgctgtttcaacatgtctggtcagacccgtgccttgtgttcgcgttcaggactctcctgggtgatatccctgttcttgatgacgctcgagcatatcggtcttcggcttatgatggtaacagagactactaccttccaccacagaacatgaataaaaatgctgcagccaactggtccgctctggcttatgatagtaacagaaaccacgcgcaagtcgaccatgttatgccgaggacatcagatacgttctacagcagtggttggttccctccccagtgaattcaatctaggaaatatgaaagcaatttcttacctggcaaaggacaaatcagaagcaaggatgcatgttgcaagcaagactgcagctcgttgtaattgtgtagacgatccataactaatagtctaatgtagctatcacatgctaccgtgcgccatcagcatcagtctaattcacaggaagctgtctggtggtagacttggcaatactttctgttgtttgtgtttttgtagtaccaacttgatcatgcattcacttgttgcattgttacgtgttagagcagcctcaatagtcaatatcccaggaagtgatctgggctgtactttgtctatgagcatccacttgtgtattactacttgtaacttggtagactttcaacgtgcatcgtggcatcggactaagttgtaccaatgtgtttgtttcgaaataaggtagtccatcatctttctactcctcacttttttatttggtttataaaataaaataagtcgatcatgttagagccccgtttagggttttagtgctagccc

SEQ ID NO: 209152 - DNA, 2206 bp, Zea Mays
cgcacgcagagagagagataggacagtgtcacagtcggcatatgacaccacgcccacgcagcacctcatcgtatgattgatgattctgaggagagcggacaaaagtcgcgggctcgcggcggcatcagcaccagggcgctggccacaggtaaaagaaagctgcggccttttctgctactcctgcctgccagcggcctgcctgcctgcctactagtgcggcgtggaggtggagcagtgggcgctacagcctccatcagctagctgccttgccgtgtcctcctcttcctcctgtcggtggcgatctctgcggaaacccgagcttcgtccaagccgggcagtagtgcgcgccgcctgggcgtaattatggattcttttgagggctctgatcatataactcaaagaaaggttgttcctgcaaaacatattgcattggtatgtagatttgaaggttgatggaaagaatgagcctgctgtagaggggttgcctaatggttggctgaaagaatgcaggcctagaaagaaccgatatggatccagagtcaagagtgacacgttctatattgatccaatcaatggatacgaatttcactctctcaaggatgtacaccgctatcttgaatctggagacatcagtaaatgtattagattgccaaacaagagaaaaattgaggacctgcatactaaagaggaccaatctcatcatacaggaaaactatcagatcatacccagctggatactgctgatgagtctaatcgatatgatctaccggaaggtaccaatgcactgggatatgctctgcaaaatccagaaagcggagagaataatgaaaacattgcactgtccaagcctgacaatataagctcaatccaaattgaagctggtcaggttgaagctacagaagataagagcatccaatcaggctctatagaatacactccaggggaagctaaatctgtcactaggaaaggaatagatgtgaaggagaaaccgaaggggaaaaagtacaaaactaaacatgccaaagggattgctatacctcttagatcgtcacctcgtttagctgcactgaagattagccaggaagcaaataatgcaaccagagatggacatattggcacacagacagacaccaataacgtgccagaaccaaagcaagtcgaaaaacccaggcgaaagacgaattcttctgtaattcctgagaggaaagatggggaacctaccaggagttgtgcagaaacccttccttcacttcccaatcagatacagggagcatcattcccacagtcttcaggagatgctggatgccaggatgcaccagccgaggcacctgttctgcgacaacaagcaggagcaggacaaggcgaaacatctgatggtttgcctggatctgccctgacgtcgctgtttcaacatgtctggtcagacccgtgccttgtgttcgcgttcaggactctcctgggtgatatccctgttcttgatgacgctcgagcatatcggtcttcggcttatgatggtaacagagactactaccttccaccacagaacatgaataaaaatgctgcagccaactggtccgctctggcttatgatagtaacagaaaccacgcgcaagtcgaccatgttatgccgaggacatcagatacgttctacagcagtggttggttccctccccagtgaattcaatctaggaaatatgaaagcaatttcttacctggcaaaggacaaatcagaagcaaggatgcatgttgcaagcaagactgcagctcgttgtaattgtgtagacgatccataactaatagtctaatgtagctatcacatgctaccgtgcgccatcagcatcagtctaattcacaggaagctgtctggtggtagacttggcaatactttctgttgtttgtgtttttgtagtaccaacttgatcatgcattcacttgttgcattgttacgtgttagagcagcctcaatagtcaatatcccaggaagtgatctgggctgtactttgtctatgagcatccacttgtgtattactacttgtaacttggtagactttcaacgtgcatcgtggcatcggactaagttgtaccaatgtgtttgtttcgaaataaggtagtccatcatctttctactcctcacttttttatttggtttataaaataaaataagtcgatcatgttagagccccgtttagggttttagtgctagccc

SEQ ID NO: 209153 - DNA, 762 bp, Zea Mays
cttcgacgaagaaagaggccgaggggaaatctacacatttgaggaaatcgaggaaaggtgcaactcaaactgatgatgaagaaagctgattcgtttgtgctatgttgcaaggggctcctacaagaaaacacagtgcagagttggatgactgccaagatcaatgtagatatggatgcaaggagcctattgctggtaaaccatggcacctgctacggttgatgctgcctcatccgtcttggaagataaatctgtaaattcggtctgaatctcaggcggttgttgtatcaacaagtcctggcacaaagccttcgttgtaataatataagcattgcatggagctgtgtgctgaatgtgtgctacggtactttcaatactgggctcagcatcaatccagaagatgtactctaaacaaagattctggatggcttcttgtgccaactaggaacaatgtaaaatttatgcaagcatttctgctcactcctgatctatgtaatactaagctaaaagcttaaagggcttaagggcttgttcgttttaacgttaatccacgtgtattgcgtggtattgaggccttgttcggttattgatattacatgtgtattggggtgtattgtgtgggattgtgatggattttgacttgttatggatttaaaccggtttaatcccacccaatacatgtggattatcaccaaaacgaacaagccctgaattggtttaaatccataacaagttaaaatctatctgattttaatctcaatgatt

SEQ ID NO: 209154 - DNA, 672 bp, Zea Mays
ggttattgctgcctgcaccacaggctcctacaagaaaacacagtgcagagttggatgactgccaagatcaatgtagatatggatgcaaggagcctattgctggtaaaccatggcacctgctacggttgatgctgcctcatccgtcttggaagataaatctgtaaattcggtctgaatctcaggcggttgttgtatcaacaagtcctggcacaaagccttcgttgtaataatataagcattgcatggagctgtgtgctgaatgtgtgctacggtactttcaatactgggctcagcatcaatccagaagatgtactctaaacaaagattctggatggcttcttgtgccaactaggaacaatgtaaaatttatgcaagcatttctgctcactcctgatctatgtaatactaagctaaaagcttaaagggcttaagggcttgttcgttttaacgttaatccacgtgtattgcgtggtattgaggccttgttcggttattgatattacatgtgtattggggtgtattgtgtgggattgtgatggattttgacttgttatggatttaaaccggtttaatcccacccaatacatgtggattatcaccaaaacgaacaagccctgaattggtttaaatccataacaagttaaaatctatctgattttaatctcaatgatt

SEQ ID NO: 209155 - DNA, 1502 bp, Zea Mays
tggaaaacctggtacatcaacacacattgctggggtacaggatgatagggctctctacctagatccccatgaagtttagatggtaatagaataaacatagaaggcgctttcagtttgccgtgttccgcaaggaagagagctagttatagatctttctgagtgtacagtttatttggaggggagaaggataaagatgagaatggcgatgaagcgccatcgaaagtattggcaaatattaagtggcctgaaacactcgagactgattttatctacagtgctttatcatttgggacttcaattaatccacagttcattgcaagctttgcttctgctgctggtaaacgtcctcatcaagatttcgactctcaagaatctgatccagagtggggttggtggatagcaaaccatgagctgaagaagccatcaattagtctgttgtttccaacaatcatcctcctcagtcgccgccatcaacagcagcagcagcgatgctaaatagtagtggtggatctggttctaactactctggtggcgagatcctacctccaccatttttttatctttattatctgtgattctgcaatccacatgtttgattttttacttagtttctctttgagaccggtcgccatgtttggttagcacatctagaatgcattacaattggaggcaatagctgttcactatccactataacctgaaagcttagctgttcaactgagctttctgattcttccatttttttccattcaagtatatgatattcttgtgtgctattcaatattacaaataacaaatttgcatatgagaataattaagtaaatttggccacctaatcagtaggattgtttggttggaggaatttttgtagcatgtgaaacttgagctaattagaaagcaaccactaccttctcttcagcatgaaaaaatagcttagccatttcttagagttaagcccttagccacttgctggccttatcgtctggaagaagaaatggtactcaactgctggtctctttggcaaatttttctttgcacttttcttgttcgaactggcaatccacaaccaagtaccttgcttgcaccaacaaaagtcccttctactgtagggcaatccatggatttattgcttgtcctgaaatttgatagaggcattcatgatatcagttgctcgttaattccatttgtttcttgttctcttgtgcattgttatgacatatttgcaccttttgcggggaacgatcgaccaacaatggagtggcccactagattaaagatcgctctgtgtgctgccaagggtttagctcatcttcatgaagactgtcatccaaagatcatccaccgcgacattaaggcatctaacattcttcttgacttcaaatttgaatataaggttgctgactttggacttgcaaagttcactactaataataacacccatgtttcaacaagagtaatgggcacctttggtttcttgtagttatccgctggattaacggcga

SEQ ID NO: 209156 - DNA, 1542 bp, Zea Mays
agtgctttatcatttgggacttcaattaatccacagttcattgcaagctttgcttctgctgctgtggggttggtggatagcaaaccatgagctgaagaagccatcaattagtctgttgtttccaacaatcatcctcctcagtcgccgccatcaacagcagcagcagcgatgctaaatagtagtggtggatctggttctaactactctggtggcgagatcctacctccaccatttttttatctttattatctgtgattctgcaatccacatgtttgattttttacttagtttctctttgagaccggtcgccatgtttggttagcacatctagaatgcattacaattggaggcaatagctgttcactatccactataacctgaaagcttagctgttcaactgagctttctgattcttccatttttttccattcaagtatatgatattcttgtgtgctattcaatattacaaataacaaatttgcatatgagaataattaagtaaatttggccacctaatcagtaggattgtttggttggaggaatttttgtagcatgtgaaacttgagctaattagaaagcaaccactaccttctcttcagcatgaaaaaatagcttagccatttcttagagttaagcccttagccacttgctggccttatcgtctggaagaagaaatggtactcaactgctggtctctttggcaaatttttctttgcacttttcttgttcgaactggcaatccacaaccaagtaccttgcttgcaccaacaaaagtcccttctactgtagggcaatccatggatttattgcttgtcctgaaatttgatagaggcattcatgatatcagttgctcgttaattccatttgtttcttgttctcttgtgcattgttatgacatatttgcaccttttgcggggaacgatcgaccaacaatggagtggcccactagattaaagatcgctctgtgtgctgccaagggtttagctcatcttcatgaagactgtcatccaaagatcatccaccgcgacattaaggcatctaacattcttcttgacttcaaatttgaatataaggttgctgactttggacttgcaaagttcactactaataataacacccatgtttcaacaagagtaatgggcacctttgggtatttggcacctgagtatgcagcgtctggcaagctcacagaaaaatttgatgtattttctttcggagtcatgcttcttgagcttattactgggcggcgaccaattgacacaacccaattggcactgcttgctataagcacatatgtacttccatttgcatgttgtataatactaataccaattgcaaaattatagttattttttctacccttgttagttaataagcatatttctggtcaataggttgtattcttattcttgtaaccgtgttaattaatgttatggacttgtagtcttgtattaccttgtgaatatatctgtccctgcctgccatgtgaacgtgcttagcctggaatttgtgatatgtacatatatcaatgtgtttgaaatc

SEQ ID NO: 209157 - DNA, 1896 bp, Zea Mays
gggctctctacctagatccccatgaagtttagatgtttatttggaggggagaaggataaagatgagaatggcgatgaagcgccatcgaaagtattggcaaatattaagtggcctgaaacactcgagactgattttatctacagtgagaaaacaatcaattttcctatactgaaatagttactccttccataccaaattataagtcgttctagcttttttaggctcagtttttgttatccatctagatatacactatgccttggtattattttttagatgtttcttgcttgggtaaaattattttataggtgctttatcatttgggacttcaattaatccacagttcattgcaagctttgcttctgctgctggtaaacgtcctcatcaagatttcgactctcaagaatctgatccagagtggggttggtggatagcaaaccatgagctgaagaagccatcaattagtctgttgtttccaacaatcatcctcctcagtcgccgccatcaacagcagcagcagcgatgctaaatagtagtggtggatctggttctaactactctggtggcgagatcctacctccaccatttttttatctttattatctgtgattctgcaatccacatgtttgattttttacttagtttctctttgagaccggtcgccatgtttggttagcacatctagaatgcattacaattggaggcaatagctgttcactatccactataacctgaaagcttagctgttcaactgagctttctgattcttccatttttttccattcaagtatatgatattcttgtgtgctattcaatattacaaataacaaatttgcatatgagaataattaagtaaatttggccacctaatcagtaggattgtttggttggaggaatttttgtagcatgtgaaacttgagctaattagaaagcaaccactaccttctcttcagcatgaaaaaatagcttagccatttcttagagttaagcccttagccacttgctggccttatcgtctggaagaagaaatggtactcaactgctggtctctttggcaaatttttctttgcacttttcttgttcgaactggcaatccacaaccaagtaccttgcttgcaccaacaaaagtcccttctactgtagggcaatccatggatttattgcttgtcctgaaatttgatagaggcattcatgatatcagttgctcgttaattccatttgtttcttgttctcttgtgcattgttatgacatatttgcaccttttgcggggaacgatcgaccaacaatggagtggcccactagattaaagatcgctctgtgtgctgccaagggtttagctcatcttcatgaagactgtcatccaaagatcatccaccgcgacattaaggcatctaacattcttcttgacttcaaatttgaatataaggttgctgactttggacttgcaaagttcactactaataataacacccatgtttcaacaagagtaatgggcacctttgggtatttggcacctgagtatgcagcgtctggcaagctcacagaaaaatttgatgtattttctttcggagtcatgcttcttgagcttattactgggcggcgaccaattgacacaacccaattggcactgcttgctataagcacatatgtacttccatttgcatgttgtataatactaataccaattgcaaaattatagttattttttctacccttgttagttaataagcatatttctggtcaataggttgtattcttattcttgtaaccgtgttaattaatgttatggacttgtagtcttgtattaccttgtgaatatatctgtccctgcctgccatgtgaacgtgcttagcctggaatttgtgatatgtacatatatcaatgtgtttgaaatc

SEQ ID NO: 209158 - DNA, 2811 bp, Zea Mays
gtttatctttttttcgttaatttaccaatgatcctagtatccctactgaaaatttggtataacgtgggccaaacaaacatttcttttggtttcaagtcatgtattttgactaccttttctgatgttctgataagttctcgtttttgtaatgcacagagtagagagagtaaatgtatgattatgttgactgtaagattattttgactaccatgttacattcttctttgatcatttttgtttgaatgtaggcaaaggtgaaatgcttgtctggtttgctgtccaccagaattgtgctgaaccttagttcataatgatagtgccatttgtattgcatatgctttcacacactttcacttcatagcaatgccatttaacacaactgatgtcgtatagctgagccatcctacaaatttatttatctttatgcacattgggtatgctttcttcaacacagaagaatctgcctggcttaggcaagtgctccctgattttggatgcttgggaggttttaaagtcgagcgactagtaatgactagtcgagaagtagatgcagaggtgatagtcaatatgagcgacttgactttctctactagtcgctcgactcgtcgactagtcacaactagtcgtagcatttgagttaggcgactagtcacaacacagaagaatctctgcagtaatccaagtttatcttactattttaacttagttgcattgcatttcttcgggtctacacatacaggtatcagtcttgcttgcttggatcttttcaaactgtggaactaattgaaacatttatgaactatcaggcaagttcacgctgggagaaaagacaagccaaagtcctggagaaggtaagaaggcggatgagccaagatgattccagaaagggtggctcatggagtgacatctggggagcaccaacaagatacgagaagaacggtacatcccattactaaaggagacatttatgttcccacaaagcttgggcattttaggtggaaaacctggtacatcaacacacattgctggggtacaggatgatagggctctctacctagatccccatgaagtttagatggtaatagaataaacatagaaggcgctttcagtttgccgtgttccgcaaggaagagagctagttatagatctttctgagtgtacagtttatttggaggggagaaggataaagatgagaatggcgatgaagcgccatcgaaagtattggcaaatattaagtggcctgaaacactcgagactgattttatctacagtgctttatcatttgggacttcaattaatccacagttcattgcaagctttgcttctgctgctgtggggttggtggatagcaaaccatgagctgaagaagccatcaattagtctgttgtttccaacaatcatcctcctcagtcgccgccatcaacagcagcagcagcgatgctaaatagtagtggtggatctggttctaactactctggtggcgagatcctacctccaccatttttttatctttattatctgtgattctgcaatccacatgtttgattttttacttagtttctctttgagaccggtcgccatgtttggttagcacatctagaatgcattacaattggaggcaatagctgttcactatccactataacctgaaagcttagctgttcaactgagctttctgattcttccatttttttccattcaagtatatgatattcttgtgtgctattcaatattacaaataacaaatttgcatatgagaataattaagtaaatttggccacctaatcagtaggattgtttggttggaggaatttttgtagcatgtgaaacttgagctaattagaaagcaaccactaccttctcttcagcatgaaaaaatagcttagccatttcttagagttaagcccttagccacttgctggccttatcgtctggaagaagaaatggtactcaactgctggtctctttggcaaatttttctttgcacttttcttgttcgaactggcaatccacaaccaagtaccttgcttgcaccaacaaaagtcccttctactgtagggcaatccatggatttattgcttgtcctgaaatttgatagaggcattcatgatatcagttgctcgttaattccatttgtttcttgttctcttgtgcattgttatgacatatttgcaccttttgcggggaacgatcgaccaacaatggagtggcccactagattaaagatcgctctgtgtgctgccaagggtttagctcatcttcatgaagactgtcatccaaagatcatccaccgcgacattaaggcatctaacattcttcttgacttcaaatttgaatataaggttgctgactttggacttgcaaagttcactactaataataacacccatgtttcaacaagagtaatgggcacctttgggtatttggcacctgagtatgcagcgtctggcaagctcacagaaaaatttgatgtattttctttcggagtcatgcttcttgagcttattactgggcggcgaccaattgacacaacccaattggcactgcttgctataagcacatatgtacttccatttgcatgttgtataatactaataccaattgcaaaattatagttattttttctacccttgttagttaataagcatatttctggtcaataggttgtattcttattcttgtaaccgtgttaattaatgttatggacttgtagtcttgtattaccttgtgaatatatctgtccctgcctgccatgtgaacgtgcttagcctggaatttgtgatatgtacatatatcaatgtgtttgaaatc

SEQ ID NO: 209159 - DNA, 3682 bp, Zea Mays
gtttatctttttttcgttaatttaccaatgatcctagtatccctactgaaaatttggtataacgtgggccaaacaaacatttcttttggtttcaagtcatgtattttgactaccttttctgatgttctgataagttctcgtttttgtaatgcacagagtagagagagtaaatgtatgattatgttgactgtaagattattttgactaccatgttacattcttctttgatcatttttgtttgaatgtaggcaaaggtgaaatgcttgtctggtttgctgtccaccagaattgtgctgaaccttagttcataatgatagtgccatttgtattgcatatgctttcacacactttcacttcatagcaatgccatttaacacaactgatgtcgtatagctgagccatcctacaaatttatttatctttatgcacattgggtatgctttcttcaacacagaagaatctgcctggcttaggcaagtgctccctgattttggatgcttgggaggttttaaagtcgagcgactagtaatgactagtcgagaagtagatgcagaggtgatagtcaatatgagcgacttgactttctctactagtcgctcgactcgtcgactagtcacaactagtcgtagcatttgagttaggcgactagtcacaacacagaagaatctctgcagtaatccaagtttatcttactattttaacttagttgcattgcatttcttcgggtctacacatacaggtatcagtcttgcttgcttggatcttttcaaactgtggaactaattgaaacatttatgaactatcaggtacggggcagatagataagcttggttttttatccatccttttcgctgatatcagatacttcccgagcctaaaaaaaactaccatccctttccattttacattttcctctactatgttatgtcatgactgcattagtggtttaatctgttacctaagtataaaaatagcaacctgccaaatagtcgaatggttcaggaaagaagactttatgttgagtccacgagtgatgcatttatatttgcaatgttgtttgttttatctgtctctaggtttcaattttttttgggtgggggttcaaattaattgtggtttcacacatttttctaatgccatgtttgaacagatctcatgtatattggatttgtgttccagctccaaatacttgtcaagaacagaaatcactgcaataagttgtgagtagtaaaaaaagggacaatgcttaagttgcatgaaaactagatgagtataggtgaagcaatgcatgtgttagatgctactagttgctatgctaacctcttgaaatagatttcaatggggtcacctttttgggagtttctttttctttgtttacctaaatacctagtagatataattctttatggttgactgtagcctcattgtttttgactagtagattaagatgtatgatccagcatgtttctgcatctaaacatttgtatcatttcaagtgattgaacaatcgtagctttattgcttatttcagtatgtggtgcttctctgatgatagcatcgaaatattgatgaggcaatcacttcctgaagttgatatgttatatcatcaacacttcttccaaagtcaaactagccacggctttctaacctcttgtaatatgttttctgccttctcaggcaagttcacgctgggagaaaagacaagccaaagtcctggagaaggtaagaaggcggatgagccaagatgattccagaaagggtggctcatggagtgacatctggggagcaccaacaagatacgagaagaacggtacatcccattactaaaggagacatttatgttcccacaaagcttgggcattttaggtggaaaacctggtacatcaacacacattgctggggtacaggatgatagggctctctacctagatccccatgaagtttagatggtaatagaataaacatagaaggcgctttcagtttgccgtgttccgcaaggaagagagctagttatagatctttctgagtgtacagtttatttggaggggagaaggataaagatgagaatggcgatgaagcgccatcgaaagtattggcaaatattaagtggcctgaaacactcgagactgattttatctacagtgctttatcatttgggacttcaattaatccacagttcattgcaagctttgcttctgctgctgtggggttggtggatagcaaaccatgagctgaagaagccatcaattagtctgttgtttccaacaatcatcctcctcagtcgccgccatcaacagcagcagcagcgatgctaaatagtagtggtggatctggttctaactactctggtggcgagatcctacctccaccatttttttatctttattatctgtgattctgcaatccacatgtttgattttttacttagtttctctttgagaccggtcgccatgtttggttagcacatctagaatgcattacaattggaggcaatagctgttcactatccactataacctgaaagcttagctgttcaactgagctttctgattcttccatttttttccattcaagtatatgatattcttgtgtgctattcaatattacaaataacaaatttgcatatgagaataattaagtaaatttggccacctaatcagtaggattgtttggttggaggaatttttgtagcatgtgaaacttgagctaattagaaagcaaccactaccttctcttcagcatgaaaaaatagcttagccatttcttagagttaagcccttagccacttgctggccttatcgtctggaagaagaaatggtactcaactgctggtctctttggcaaatttttctttgcacttttcttgttcgaactggcaatccacaaccaagtaccttgcttgcaccaacaaaagtcccttctactgtagggcaatccatggatttattgcttgtcctgaaatttgatagaggcattcatgatatcagttgctcgttaattccatttgtttcttgttctcttgtgcattgttatgacatatttgcaccttttgcggggaacgatcgaccaacaatggagtggcccactagattaaagatcgctctgtgtgctgccaagggtttagctcatcttcatgaagactgtcatccaaagatcatccaccgcgacattaaggcatctaacattcttcttgacttcaaatttgaatataaggttgctgactttggacttgcaaagttcactactaataataacacccatgtttcaacaagagtaatgggcacctttgggtatttggcacctgagtatgcagcgtctggcaagctcacagaaaaatttgatgtattttctttcggagtcatgcttcttgagcttattactgggcggcgaccaattgacacaacccaattggcactgcttgctataagcacatatgtacttccatttgcatgttgtataatactaataccaattgcaaaattatagttattttttctacccttgttagttaataagcatatttctggtcaataggttgtattcttattcttgtaaccgtgttaattaatgttatggacttgtagtcttgtattaccttgtgaatatatctgtccctgcctgccatgtgaacgtgcttagcctggaatttgtgatatgtacatatatcaatgtgtttgaaatc

SEQ ID NO: 209160 - DNA, 3759 bp, Zea Mays
gtttatctttttttcgttaatttaccaatgatcctagtatccctactgaaaatttggtataacgtgggccaaacaaacatttcttttggtttcaagtcatgtattttgactaccttttctgatgttctgataagttctcgtttttgtaatgcacagagtagagagagtaaatgtatgattatgttgactgtaagattattttgactaccatgttacattcttctttgatcatttttgtttgaatgtaggcaaaggtgaaatgcttgtctggtttgctgtccaccagaattgtgctgaaccttagttcataatgatagtgccatttgtattgcatatgctttcacacactttcacttcatagcaatgccatttaacacaactgatgtcgtatagctgagccatcctacaaatttatttatctttatgcacattgggtatgctttcttcaacacagaagaatctgcctggcttaggcaagtgctccctgattttggatgcttgggaggttttaaagtcgagcgactagtaatgactagtcgagaagtagatgcagaggtgatagtcaatatgagcgacttgactttctctactagtcgctcgactcgtcgactagtcacaactagtcgtagcatttgagttaggcgactagtcacaacacagaagaatctctgcagtaatccaagtttatcttactattttaacttagttgcattgcatttcttcgggtctacacatacaggtatcagtcttgcttgcttggatcttttcaaactgtggaactaattgaaacatttatgaactatcaggtacggggcagatagataagcttggttttttatccatccttttcgctgatatcagatacttcccgagcctaaaaaaaactaccatccctttccattttacattttcctctactatgttatgtcatgactgcattagtggtttaatctgttacctaagtataaaaatagcaacctgccaaatagtcgaatggttcaggaaagaagactttatgttgagtccacgagtgatgcatttatatttgcaatgttgtttgttttatctgtctctaggtttcaattttttttgggtgggggttcaaattaattgtggtttcacacatttttctaatgccatgtttgaacagatctcatgtatattggatttgtgttccagctccaaatacttgtcaagaacagaaatcactgcaataagttgtgagtagtaaaaaaagggacaatgcttaagttgcatgaaaactagatgagtataggtgaagcaatgcatgtgttagatgctactagttgctatgctaacctcttgaaatagatttcaatggggtcacctttttgggagtttctttttctttgtttacctaaatacctagtagatataattctttatggttgactgtagcctcattgtttttgactagtagattaagatgtatgatccagcatgtttctgcatctaaacatttgtatcatttcaagtgattgaacaatcgtagctttattgcttatttcagtatgtggtgcttctctgatgatagcatcgaaatattgatgaggcaatcacttcctgaagttgatatgttatatcatcaacacttcttccaaagtcaaactagccacggctttctaacctcttgtaatatgttttctgccttctcaggcaagttcacgctgggagaaaagacaagccaaagtcctggagaaggtaagaaggcggatgagccaagatgattccagaaagggtggctcatggagtgacatctggggagcaccaacaagatacgagaagaacggtacatcccattactaaaggagacatttatgttcccacaaagcttgggcattttaggtggaaaacctggtacatcaacacacattgctggggtacaggatgatagggctctctacctagatccccatgaagtttagatggtaatagaataaacatagaaggcgctttcagtttgccgtgttccgcaaggaagagagctagttatagatctttctgagtgtacagtttatttggaggggagaaggataaagatgagaatggcgatgaagcgccatcgaaagtattggcaaatattaagtggcctgaaacactcgagactgattttatctacagtgctttatcatttgggacttcaattaatccacagttcattgcaagctttgcttctgctgctggtaaacgtcctcatcaagatttcgactctcaagaatctgatccagaggcaattcttaactgtttgctgaagcttacttggggttggtggatagcaaaccatgagctgaagaagccatcaattagtctgttgtttccaacaatcatcctcctcagtcgccgccatcaacagcagcagcagcgatgctaaatagtagtggtggatctggttctaactactctggtggcgagatcctacctccaccatttttttatctttattatctgtgattctgcaatccacatgtttgattttttacttagtttctctttgagaccggtcgccatgtttggttagcacatctagaatgcattacaattggaggcaatagctgttcactatccactataacctgaaagcttagctgttcaactgagctttctgattcttccatttttttccattcaagtatatgatattcttgtgtgctattcaatattacaaataacaaatttgcatatgagaataattaagtaaatttggccacctaatcagtaggattgtttggttggaggaatttttgtagcatgtgaaacttgagctaattagaaagcaaccactaccttctcttcagcatgaaaaaatagcttagccatttcttagagttaagcccttagccacttgctggccttatcgtctggaagaagaaatggtactcaactgctggtctctttggcaaatttttctttgcacttttcttgttcgaactggcaatccacaaccaagtaccttgcttgcaccaacaaaagtcccttctactgtagggcaatccatggatttattgcttgtcctgaaatttgatagaggcattcatgatatcagttgctcgttaattccatttgtttcttgttctcttgtgcattgttatgacatatttgcaccttttgcggggaacgatcgaccaacaatggagtggcccactagattaaagatcgctctgtgtgctgccaagggtttagctcatcttcatgaagactgtcatccaaagatcatccaccgcgacattaaggcatctaacattcttcttgacttcaaatttgaatataaggttgctgactttggacttgcaaagttcactactaataataacacccatgtttcaacaagagtaatgggcacctttgggtatttggcacctgagtatgcagcgtctggcaagctcacagaaaaatttgatgtattttctttcggagtcatgcttcttgagcttattactgggcggcgaccaattgacacaacccaattggcactgcttgctataagcacatatgtacttccatttgcatgttgtataatactaataccaattgcaaaattatagttattttttctacccttgttagttaataagcatatttctggtcaataggttgtattcttattcttgtaaccgtgttaattaatgttatggacttgtagtcttgtattaccttgtgaatatatctgtccctgcctgccatgtgaacgtgcttagcctggaatttgtgatatgtacatatatcaatgtgtttgaaatc

SEQ ID NO: 209161 - DNA, 1780 bp, Zea Mays
attgtcggtgtcagaagtgggcccatgctcggttcggccacgccccaccagccagccagccagggacccgtcgctgccctctggcgatgagggatattacgggtctgccctgaccaccgcccacgcgcagccaggggtagaaacgaccgcgtcaccgtatttgacccctcaccgtcccacaccagtgtcggcgagtccctcctgtgcctcgtcctccccctttcccctccgagtccagcccggcgccacccactcagccgcggatccgaggcgcagctccgcaagatggaggccggtggcaacgaccgactcaacgccttcctcacagctcgcggcgttcctaaggagacgccccacgtcgccaagtacaactccaacgccgcagccgcctaccgcgaccgcatcgccgcgctcgctgagggaaagccgtggactgacccgcccgtggtcaaggagacgcccggatctggcgcccccgcccccgctaggaagccgcccgtgcacacatctgccgcctccggcggcggcgggtgggacgactgggacgacgattttcggccggacatgaggcggaatcagtcggttggatcgttcgccgccgcgggtgcgcagtcagggaggcagccgccgaggtccaaatcaacacaggacatgtacacgaggcagcaactggaggcgtcggcggcaaataaggaggactttttcgccaggaggatggcggagaacgagtccaagcctgacgggatcccgccatcccagggcggcaagtacgttgggttcggatccagcccaccgccgtcggctaacaggaacggcggtgctgcccagggcgatgtcatgcaggttgtctctcagggatttggacgcctttcattagttgcagcatctgctgcccagtctgctgccagtgctgtccaagttggcacaaaagaaatccaatcaaagatgagggatgggggctatgaccagaaggtgaatgaaactgtcagtgttgttgccaataaaactgcagagattggaagcaggacttgggggatcatgagaggagttatggcgctggcctcacaaaaggtagaggaatatgccaaggaaggaggagtgggtggctggggagaggattggcaacacagcgagcagaaaagtgagccttaccaaaggtttgagcatgagaccaacggcaacagttggaattcctcccaaaattcttcatcgaagaacaattccagttcttgggacgattgggacgacccaggcaagaaagatgagcctgcgaaaccgcaccagagcagtgactcctgggctggctgggatgatgggaaggatgatggttttgatagccctagttacaacaatcacagcacctccaacaaggggagcaaccaaaacgggacatccggtggcacattttggacagaaggcggcttccgctgaaaccagtctcttttccatagagctatactttcagagttgttacatgccaggaaacgtgagggtccagtggttggtattatttgggatacttaaacagtcgggtgaaagggtttgtgtgttttgtaccatgtctacaactgttattatatctagtgagatatatttctgtggtcagatgccattcaacactgcccaaatgactaagaaatgtcgatttgaaactgtaatttactcgactttgtcgcatactctttattggttttcgttggttttgtaccgggcagaggcttgccgatatttgccgtggtgggtgttctggcgactggtggcaagcttgtatcacagtagt

SEQ ID NO: 209162 - DNA, 598 bp, Zea Mays
ctgattcccaatctgccccctcctctcttcgacccatccacacacccccacgttcgcaggaaggtttggaggccaaccaggacaagaccaagtgccagcagcagttcgacgattacaaggaatgcaagaagaaagagagggaggctcggctggaacggaataaaaccagatcactctttgggtgaacaatggcgtcccacctgagcaatatgctggcggtgcaataagtctcctgctgatgtgagcgaaatcacggcttttttctttggtttcatgatgatcctctgcaacttgtgcaaggtagggaatagaaataccgatctcgagattgagggagatgtaagggcgtctgggaacagctcattaacacaatggctacggtgaatgaatcgaatgagcgaggatgtattttgagaacaaccaggcgtcatgaaacgacagtttgttcaataaatttgtattccacccctgtaacgattgtacttcaaaatatttccatgtgttcttagctgccttgcatccagctttttcgacctgccgtcctatgtggaagtggaagctcccctttcgaacttgtttggttaggcttggatctaga

SEQ ID NO: 209163 - DNA, 567 bp, Zea Mays
tcatgcagaagggttatttatctgctttacaggtttggaggccaaccaggacaagaccaagtgccagcagcagttcgacgattacaaggaatgcaagaagaaagagagggaggctcggctggaacggaataaaaccagatcactctttgggtgaacaatggcgtcccacctgagcaatatgctggcggtgcaataagtctcctgctgatgtgagcgaaatcacggcttttttctttggtttcatgatgatcctctgcaacttgtgcaaggtagggaatagaaataccgatctcgagattgagggagatgtaagggcgtctgggaacagctcattaacacaatggctacggtgaatgaatcgaatgagcgaggatgtattttgagaacaaccaggcgtcatgaaacgacagtttgttcaataaatttgtattccacccctgtaacgattgtacttcaaaatatttccatgtgttcttagctgccttgcatccagctttttcgacctgccgtcctatgtggaagtggaagctcccctttcgaacttgtttggttaggcttggatctaga

SEQ ID NO: 209164 - DNA, 1701 bp, Zea Mays
accctttttcgtctctcctctgcctttccccatcgtctctccgtctacacctcatcataatcacagattcacagagcgctagggaggagagagggctagggtttcgtgctccctcacgcaacgaatccgagccggatcggggggtgcgcggagtcaccggcggcccggcgttgcctgggctgtgatacagttgcaatggcatctgtaactgatgagacagctaagattgagggtttgacatctgctgcagcctttgtggagggtggcattcaggacgcatgtgatgatgcatgcagcatttgccttgaggctttctgtgagagtgacccttctgcattgactggctgcaaacatgagttccatctccaatgcattcttgaatggtgccagagaagttcacagtgcccaatgtgttggcagcctattactatgaaggatcctaccagtcaggagctgcttgaggcagtagagcgtgagaggaatataagaactaatcaaactcggaacacaactatatttcatcatcctgctcttggggattttgagctgcagcatctgcctgttggtaatgatgctgagcttgaagagcgtatactgcagcatctagctgctgctgctgcaatgggaagggcacaccatcttggaagaagggaggggcacaggggacgatctggctctcatggtcgtccacatttcctagttttctctacacaaccaaattcaccttctgctggcacaatctcttcatcttctgctcatatggagggagaaaatgattcaaatcctgccacacctagagctagcgagtcatctccacgagctattcgcattggagaagtgggaaaccaaagtcctgggatgcttacctacgatgctgaacaggatgctgtcgtttcttccggaaatagcactcctgtatcgagtcctaggttttttaacaggagacactccactggacagtcaactccagacagggctgggccatcggatattcagtctttctcagactccctgaagtcccgcttaaatgccgtctctatgaagtacaaagaatctattacaaagagtactcgagggtggaaggagagattgttttcacgtaattcatccgtggcggatcttggttctgaagtgagaagagaagttaatgctggaattgcgtccgtatcacggatgatggagcgtctggaaactagaggaaatagcagaacaagtgatagcccggcagcatccacttctgaagttccctctgctacagaatcaagcaatgaaagggttacagagagcaactctgctgctgctgctgctggtggtggtactaccactacgggtaccagcgctagcaacgcctccgccccttgtgttgcgacatccggttcaaattaggacatgtttgtgagcctggcggcagagcagaagtgcagtaacatgatgccgtcatttttttctcaaccactgcataaacggctgcaaggggaaaaaaaccaaacggtgatttgatgtattggctcgataaaatggtggtgcgtgtggcctaggagaagtcggatttcatcttctgttttcgtctctttgtaaaaaaaatcgtctgagggcagatgtttaccggtataaataacggatatgtcatcttcatagtacgtggatcagttataaatatgattggaacagcaaagcttgctgctgttataaaaaaaaaaa

SEQ ID NO: 209165 - DNA, 2276 bp, Zea Mays
cgacgcaaacgaacaaggccttagaattctcaatccaaacgagcccttggcaacgactcgactgtccccaatccagtatcgcgagaagcgctacgcggccggcgaggcgctccccccaatatggtgcgcgtcgtcgtctccaccctccccgccctccgtccgcttctccgccgtggctctctgctaaaccataaacccctgccccgctcacgccttcagccgtggccgttctgcacgctctcgtcctcgcccgccgccggcgcgcccagcgccgcggtgaagggggaggaggttgcgttggacaagcaccttacccggtgcgcggcggcaggcatagcaccgttgcgggtggcggtgctggtgagcggcggggtggatagcagcgtggcgcttcgcctcctccacgccgccggccatcgctgcaccgcgttctacctgaagatttggttccagatttcaggaatttctggtccgagtgcccatgggacgaggatttgaagtatgcacaagctgtttgtgacaagattgatgtgccattggaggtggtccacctatccgatgaatactggaaccatgtggtgagtaagcttcatttgagcctttcccccccatagatttgcacacaacactttttagagcctttgctttgagaagaaatactgtgaatttgatatctaggtatcacatatgatcaatgagtatcgctgtggtcgtacaccaaatcccgatgttctgtgcaacacgagaataaagttcgggtctttcttagaagccattgaaaatttaggatttgactacatagcttcaggacactatgcacacgtagtacatccttccgctgaaaataccgaagcgccatccgtactacaattatcaaaggacaagatcaaggatcaaacctatttcctctcacatctatctcaatctcagcttagaaggcttcttttcccactaggatgtattacaaaggatgaggttcgcagactggctactcaaatgggccttcctaaccaaggtaggaaagactcacaagggatatgctttcttggaaaggagaaaaggaaggaatcatactggaagctgagtccggagattacctagggatacaccgtgggttttggttttatacaattggtcagcggcaaggattacggcttcctggaggaccttggtacgttgtagagaaagatgttcaaaacaatgtggtttttgtatcaaggaattattattcattggataagcggaggcgcacatttcgtgttggatcactaaactggtttgataattgtggacctggaaacaatgagcaactcaaatgcaaggtgcgacatagccctgaatttcatgattgcactttggtaaaagagcgtagtgaagaaaatggggatgctttggtggtgcatctggctgaagatgaccagggcttggcagctggtcagtttgcagcgttctatagtgaaaatgtatgcctggggtcaggcataattttggattcatgggacaagatgagcttccctgtctgctcaagggcactcgaaatcgcaaagttggcggacaagtcgagcttagggaagccaataagaatcgtgaacctggaacatatcgtgaaacctgaacaacaggaggaaatcaaagttgcctgacagattggtgccgtaaccttctcctagctccgccagctgcccccttcaaatcaattcatcaatcaaccgtatcgcaggccctggaaatcgaaggatgaggggtcttctagaatctaccgatatatacccccagttggaaactccaggtccttcttggaaggatgatatagtggaatatggcatgacttggtgcgctcgtgttgcagaggaacgatgaagcttcgtgcgtggatagggttgatctgaattaactgttgacagtgattttacgatctcgcgggaaagcaacacaatagtttgggcacgtcctctcctgagtggaatgatctggattcagtagtagtcagtggcacttcattaaaactaatacagggaaatcgtgacgttgtatgatagtggtaagatattgtattgtgaattttgacgataatatcggtgcgtgattgtgccactggatttgttcatcagtacttaatccctttttgacgtttcgatcttcttgactgaagcggagcgagttgtcggaaacttggcgtcggtgcgacgtgtacttgtcagcacaggaccgcgcgacagatgtaccgtactacactacaccctagatctgaatctgattcaggtgtagcagcgcgt

SEQ ID NO: 209166 - DNA, 2112 bp, Zea Mays
aaacgaacaaggccttagaattctcaatccaaacgagcccttggcaacgactcgactgtccccaatccagtatcgcgagaagcgctacgcggccggcgaggcgctccccccaatatgccgtggccgttctgcacgctctcgtcctcgcccgccgccggcgcgcccagcgccgcggtgaagggggaggaggttgcgttggacaagcaccttacccggtgcgcggcggcaggcatagcaccgttgcgggtggcggtgctggtgagcggcggggtggatagcagcgtggcgcttcgcctcctccacgccgccggccatcgctgcaccgcgttctacctgaagatttggttccaggaagatttcaggaatttctggtccgagtgcccatgggacgaggatttgaagtatgcacaagctgtttgtgacaagattgatgtgccattggaggtggtccacctatccgatgaatactggaaccatgtggtatcacatatgatcaatgagtatcgctgtggtcgtacaccaaatcccgatgttctgtgcaacacgagaataaagttcgggtctttcttagaagccattgaaaatttaggatttgactacatagcttcaggacactatgcacacgtagtacatccttccgctgaaaataccgaagcgccatccgtactacaattatcaaaggacaagatcaaggatcaaacctatttcctctcacatctatctcaatctcagcttagaaggcttcttttcccactaggatgtattacaaaggatgaggttcgcagactggctactcaaatgggccttcctaaccaaggtaggaaagactcacaagggatatgctttcttggaaaggtcaagtttagtgagtttgttgaaagacatataggagaaaaggaaggaatcatactggaagctgagtccggagattacctagggatacaccgtgggttttggttttatacaattggtcagcggcaaggattacggcttcctggaggaccttggtacgttgtagagaaagatgttcaaaacaatgtggtttttgtatcaaggaattattattcattggataagcggaggcgcacatttcgtgttggatcactaaactggtttgataattgtggacctggaaacaatgagcaactcaaatgcaaggtgcgacatagccctgaatttcatgattgcactttggtaaaagagcgtagtgaagaaaatggggatgctttggtggtgcatctggctgaagatgaccagggcttggcagctggtcagtttgcagcgttctatagtgaaaatgtatgcctggggtcaggcataattttggattcatgggacaagatgagcttccctgtctgctcaagggcactcgaaatcgcaaagttggcggacaagtcgagcttagggaagccaataagaatcgtgaacctggaacatatcgtgaaacctgaacaacaggaggaaatcaaagttgcctgacagattggtgccgtaaccttctcctagctccgccagctgcccccttcaaatcaattcatcaatcaaccgtatcgcaggccctggaaatcgaaggatgaggggtcttctagaatctaccgatatatacccccagttggaaactccaggtccttcttggaaggatgatatagtggaatatggcatgacttggtgcgctcgtgttgcagaggaacgatgaagcttcgtgcgtggatagggttgatctgaattaactgttgacagtgattttacgatctcgcgggaaagcaacacaatagtttgggcacgtcctctcctgagtggaatgatctggattcagtagtagtcagtggcacttcattaaaactaatacagggaaatcgtgacgttgtatgatagtggtaagatattgtattgtgaattttgacgataatatcggtgcgtgattgtgccactggatttgttcatcagtacttaatccctttttgacgtttcgatcttcttgactgaagcggagcgagttgtcggaaacttggcgtcggtgcgacgtgtacttgtcagcacaggaccgcgcgacagatgtaccgtactacactacaccctagatctgaatctgattcaggtgtagcagcgcgt

SEQ ID NO: 209167 - DNA, 1804 bp, Zea Mays
ggcgaactgcgggtttctttggccgtacgtctcgggtggatcctggcgccggcagatccgaatgggccgatgtactacaacggcatgtaccatctcttctaccagtacaacccgcacggcgcgctctggggcgttggcaacctctcctggggccactccgtttccggcgacctcgtgaactgggccgccctggacacggcgctggacccgacgtcgcccttcgacgccaacggctgctggtcgggctccgccaccatcctccccggcggcaccccggccatcctctacacgggcatcgacgccaacggggagcaggtgcagaacgtggcgttccccagggacccggcggacccgctccttcgccggtgggacaagcccggctacaaccccgtcatcccgctccccgccgacgtcccgggcgacaagttccgggacccttcgacggcgtggctcggccgcgacgggctgtggcgcgtcgcggtgtccgccgaggtccgcggcgtggcgtccacgctcgtgtaccggagcgcggacttcctccgctgggagcgcgcccccgccgccgcgccgctgcacgcctcgcgcgccgcgggtatggtggagtgcccggacctgttcccggtgaaggaggagggtgacgacggcgacggccaagggctcgacgcgtcggcgagcggcgccgggctgcggcacgtgctgaagctcagcgtgatggacacgctccaggactactacatggtggggcggtacgacgacgcggcggacgcgttcgtgccggcggagcccgagcgcggggacgacgtgcgcggctggcggcggctggactacggccacgtgtacgcgtccaagaccttcttcgacgcgcgcgggagccggcgcgtgctgtgggcgtgggccaacgagtccgacagccaggccgacgacgtcgccaagtatagatgcccaaacggcccggcccgaccggcccgcacgttcccgcggaagctgtggctggacgaggacgggaagcagctgcggcagtggccggtggaggagatcgaaacgctgcggaggaagcgcgtcgtcctgcgccgcggcacggcgctggccaccggaggcatgaacgagatcgtcggcgtcgcgggctcgcaggcggacgtggaggtcgcgttcaaggtctcgagcctagcgggggccgaggcactggaccccaactggctgctggacccgcagaagctgtgcggggagaagggcgcctcggtgcccggcggcgtcgggccgttcgggctcatcgtgatggcctccagcgacctgcgcgagcacaccgctgtcttcttccgcgcgttcaggtaccatggcaggtacaagcttctcatgtgcactgacctgacaaggtcgtccacgagggcaggcgtgtacaagccgccatacggaggattcgtggacgtcgacgttgaggagcacgagaccatcaatttgagaaccctgattgatcactcggtggtggagagcttcggagctgacgggcggatgtgcatcacggctagagtgtaccctgagcacgcggagacgagcaacaaccacatgttcgtgttcaacaatggcacaggcacggtggaggtgtacaagctcgaggcatgggagctcgcggcggcgaccgtaaattccgttgggggcaacgacagcttggttatttctaaatctaatgaccaaagtgaatcctattaaaatcttcaggttaatgtgtcaaaaatggggtccgtttgatttgattgctatactttgttatagagagggggggaaaggtgtatttcaaataagaaat

SEQ ID NO: 209168 - DNA, 1110 bp, Zea Mays
gcggtaatttataccgtcagcttagtgttatactagtagctagtcttcttctatttagcctcggaccgcaccgttggccccgcgcgcgtacgtacgtgtgtatataaactagccgcgagagtagctagctacttcacgagcaagtcgatcggtcgagcagtgtggccagcccatcacatcatcaagtcgattgcaattgcaataatactactagcttgacgccggcgttgggggtgcgggcgacgtgatgtccaagcaaaagatcgtgatcaagctgggcgtacccaacgccaagaaccggtctaaggccatgcagctggcatccaaatttgggtgagcaaggtggggatcaccggcgacggcaaggaccggctggaggtggaaggagaaggcgtggacaccgtcctcctggtcaactacctgcgcaagaaggtctgccgcagcgctgacatcgttaaggtggaagtgaaggacaagaaggacgagaagaaaccggaagagccgccgtattattgctggcccaattactactactgtccgccgccgccgccgccgctgcccatggtcgagcgagccgacgacagttgccacgtcatgtgataaagctacttactattcgagatatatgtttcggtagacgtattacgtatactatatcatatgagcataataatgaagtactcatatcatcacttagcttgctatatatatatgcatgcatgtatcgtctacgcacgtaaagccatcgttgcatgacatatcatgcagttcatatttgccaatgtaatcacacacgtatatatatactcccactgttaagaggtaaaatttccattttttttaatctggtcatcagtgcaatctgcatggtctaatgtcatcctgtccactctcgctcaccaccacccgctccacgggcgccgactccccggtcttcccgcacactcgaatcagagggcaacgaaggcgacgcaggagctcccgagaggccggcgaggaaatctccgaacacgtcgtcaaggacggccagtcggaatcagaatcaaacccaaattaaagccaagaccccagctcggtcggacctgcaggaaagttcctctggtaggtttg

SEQ ID NO: 209169 - DNA, 1736 bp, Zea Mays
tcgtggaagacttcttcgctatgcatgaatgcatctgaaaaccttcaaagtcactggatgctccacaaaagaccaagaggaatgtgaatcctattctccctcacccgcaccgcacgtcgaataaagcaccaagcgaaatgctggcagaacctatctagccggagattttttttttttttcaaaagcaagcaaccatgggcgccgcagcacaaccggaatgcaactagctcttcgtcagaaacctgggcatgagaatgactgaatgagacctacggaacgccctactcctactctccactagctgtctcccacgtgtgcgttcgttgcgcgtgacacgccgagggatcgatcgatcgatcggggtcccagccgtagcatggcgagcgcgcggccgccgcaggcgcagcgcacggcgtggtgcggccgctgcggcgcgcgcctgtccgtggcccccggtgcgcgctccgtgcggtgcgcgctctgccacgccgtgacgcgcgtcgagcgccgcccgcacggcctgcaccgcgccgccgtgggcttcatcaggggcctcatcggcggcctgacgccgccgcagcggcccgcggcggcgctccaggagctgccgccgagctccttcccgcgcgtccgcggctgcaagaagcgcgccctcctggtggggatcagctacgccggcaccagaggaggacatggagcctggccgggtgccgacgcgggcgaacctgatgcgcgccctgcggtggctcgtggacggcgccagcgccggggactccctggtgttccacttctcgggccacggcgtgcagaagctggacagggacggcgacgaggcggacggctacgacgaggcgctgtgccccgtggacttcgaggacccccgcggcggcggcggcgtcatcctggacgacgagatcaacgccaccatcgtgcgcccgctcggcaagggcgtgaagctgcacgccatcgtcgacacctgccacagcggcaccatactcgacctcccctacctctgccgcctgtccaggaccgggtactggcagtgggagaaccaacagacggcccgcctcgccgcgtccggcgagaccaagtgcaccagcggcggcctcgccatctcgatcagcggctgcggcgacagccagacgtcgcaggacaccacggcgctctccgggtccgcctccaccggcgccatgacgtacagcttcatcaaggcggtggagtcggagccgggcaccacctacggccgcctgctgacggcgatgagagccaccatccgcgacaacggcggtgagttcggcataccgggccccatcggcaccttcttccgccgggtcatcacgttcagctgcgcgcaggagccccagctgtgcgcttcagagacgttcgacatctacaggaaaccttttctcttgtgaccagctcatttcatcatttgctttgtattttgtgagatgtgcgtgaaagagctagaatggcgtgcaggattttgatctcttttcagtagaaaactctacagatgcagtgaaagtggagctgagattgggaatcccagcatcttgcagtgacccgaacttagttatgctcacacagtgacgtagaggcggttcactgaacgagatgccgtaataggcgttcttttggctgaaattgtgccgatatatgctgattcgtaaggccttttttggattctcacggctaattgtttgtcagtgattaaaaattagccggtaaataat

SEQ ID NO: 209170 - DNA, 1469 bp, Zea Mays
agtgatacgatcgtttccctatataaagaggcggctgccgggaagaggtgatcgtagaagcaggcaggcagaggcaagaggcccctcaccctcaggtgatcaggtcgctagctcccggcttaactagtaggcagccatgaatttcggtgggaatggcaacgcgacgatccggtgcaagtactgcagggcgagcctgagcgtgatccccggcgagcgcgccatccagtgcgcgcaatgcaactgcgtgacccgcatccggcgggccgaccgcatcccgctggcgcggccggcgcacgtgccgccggcgttccagcgcgcccggggcaagaagcgcgccgtcctggtcggcatcacgtacgccggcgcgcgccggggctgcggcgacctgaggggccccgtcaacgacgtcaagtgcatgaggaacctcctctgccagcgcttcggcttccccgacgaccagagggacccgttcaggctgcccacgaaggagaacatccggatggcgatgcactggctggtgcagggctgcagctacggcgactccctggtgttccacttctcgggcatcggcgcgcaggtggcggacgacgacggcgacgaggcggacgggtacgacgaggccatctgcccgctggacgcgttccagagcgggcccatcctggacgacgagatcaacgaggtcatcgtgcgcccgctggtgcacggcgccaggctgcacgccgtggtggacgcctgctacagcgccacggtcctggacctcccctaccagtgccgcatgtccaggaacgggttctggcagtgggaggacgagagcccgccgtcgggcgcctggaagggcaccagcggaggccacgccgtgctcatcagcggatacagcgagggcaaaggcaacttcgccatgatgcccgacgcccacgcgtcggtcgtcggggccatgacgcacagcttcgtccggacgctggagtgccagccgcgcggggtcacctacggccacctgctcagctccatgagggccatcatgaagaaccgcggcgggggctgcgatctgcagggggccatcggcgcacccatccgcaccgtcgccaacttcagcggcgtgcaggagcctaacctgtcctcttcggagacgtttgacatttaccgcaagcagttcgtcctgtagacaccaccacaccagggtttgcccctgccggccggccgcttgtaatgaattgccgtcgtatcagaataagaaattatctatcgaccatgatatgatatgatatatcaggaaagaaggaactattacccctcaatgtaataactaagcatgttcaatgtcctctttttattagagagagagacagagagaaaacgcggaatttgagacgtgtgcatgcagtttacgtgatcaataaagttacatagaaattattttatccacgtgcgatgcaagtggagcttctactacctaaccccaaatcttcata

SEQ ID NO: 209171 - DNA, 1536 bp, Zea Mays
gcgcaaatttcccgaacccaaattccaacccccaaacggccaaaccctctgcagttcgtcgccatggttgtcggcgccttcggcgaggcgacaccgccaccggacctcccaccttcccgcgtgtccgtctcctcgccctcgccccacccccgccgacgctgcgccctcgcaagccgcttccaggagccggcggccccgcggcggcacgcatgggtttccctccagggtcgccttatcggtgccgacgaggcgtcgtgtgccgcttcagctgcaccgggcctcctcccggatgaagcggtagcgtgggagctcttcagcccgctccatcgcgtgcttctcgtcgccaccgtcgccgccgcatcctcccggtcccacgccgcccgccgcatcgaacagctacaacgctcgattcatcttagggatgaggtgctagaaagcatgcagcagaagctggatgatctgctcgtcgaaatgagctccctacaacagcagtacgtcaagtgcgatagttacatttccgaggaaagggaaattaatgagattgaaacaggtagcaaaacgataggatatggagaggaatctagatgttgtgtgtgcacgaagctagaggctgccactcctcagaaggcgaaggatctccgtgggacagatgatgctaggagtgatatggttgattgttctagtctagttttcatggatcatgaagagcgccgtttgtcagacctctcagacttctgccggagtgttgtgtcatcagttgataaccagataaattgggatagtcagatcaacaattgtacaatcttcagaaggaatgtgaagagaaagatgcaaccatcaaggaactagctgcagcagcacatgcatctagtacttctgatgcaaagagaattgcagagctgcaggaagttcttaaaaggaaaaacatggtgatctctaaattgaagaaagacatgtctgctctgaagcatatggttgttgaattgtcaagggctaaaagagtctcttctgccataagtccaatctgcactgatctgccagtgatgtcaaacaatgttctgtatgatatgagcagttctagctcatcagatccagaatccccagttgcactacgagaataccttgatgagcatcttgttgatagcactccaggagatggtgattctagacggagttgtgaagtatctgtagcaaaagcatctcttccatcaaaaacgtcatctgttcacaagctgcgctcaactagcccgttaaaagagatccatattaatccaaaagtagaaacaaaatcatttggcagacagaagcaacctacatcttctaatggagattttaaaaggattagacgacaaagtcagcaagatccaaggaataaagctacaagaagatggatgtagagtttagccatctagaagtcattacctgattgggcgtcaatcactcaacacgaaccagcggcggtgctctctgcacaggggtggacggcccgcggctaggggccggacggtccgcggtccgcggcctggcgcgaggcta

SEQ ID NO: 209172 - DNA, 1733 bp, Zea Mays
ggcgcgcgtgacccacgaagcaatttcaaacccagccagaatcaggagcaccgcgtacgcgacgtcgcggtcgcggcccagcttccagcgcccgacccggcgggcaaggcaaggcaacgaaccaacctggattactggattgtggcttggaagcttgccgcgagcccgcgacgacagaccttctttcgtcccgtcctttcccctgcgcgccgcgagtgaattccggaatccccaatctatccgacgccacacgaaacgaaacacaagagaagagaatagagagaaggtcggagggctagacccggtcccccaattccaattcgcccctctcgcggccggcctcgcgagacgccgattcggatcccatctcctgctcagagcctcgattcgaccggcgggggcgacgattcgaccgggtcggtagccaggccgtggcgtcgggcgtcttccagatcaacaccgcggttgccacgttccagcgcctcgtcaacacgctcggcacgcccaaggatacccccgacctccgcgacaggatacataaaacacggcaacacataacacaactagtgaaggatacatcagacaagcttaaacaagctagcgaggcggatcatcgcgttgaagtcagcgctaccaaaaagattgctgatgcaaagctagctaaagatttccaagcagtcctaaaagaattccagaaagctcaacgattagcagtagagagagaagctgcatatgcaccttttattactcaagcgggcctgccacagagctacaactcaagtgaagtgaacaatggtgctgataagttggcagagcagcgcacgcagcttctagaatctagaaggcaggagttggtcttcttggacaatgaaatagtgttcaatgaggccatcattgaggagagggatcagggaatacaagagattcaacaccaaatcactgaagtaaatgaaatcttcaaagatcttgctgtgctagtccatgatcaaggagcaatgatagatgacattgattcccatatagagaatgctgttgtagcgacttcgcaggctaaaggtcagctttcaaaagctgccaagactcagaagtcgaactcttcgctgatatgcttgttactggttatcttcggcgtggtcctgctcatagtgataatagtacttgcagcataaaagcttggaaggcagctgaggttccaatgatcgagcttattgcgatgaattccttattattattttttttgctgtgcagccaggaatggatcctggcatccgcctggatgtatccaggcggtgattggtgatgtgcttgtggtatggctgtgtatttggtgatgatgtatctggaatgcatgggtggtttcacataaaagtatactctttcctgccagtgtagttcctcttgtctcatatgcacgctttgtttatatattgtaatgtatgagtgcgtgctgtagaacaaggttggattatctgtggtatgaatttcctcgattccatgagaaacgcttttctatatgtgaacttcgcttcctcttttcttcttgggcaatgggcaccatgttgttaggtggagacggaggtccatcattgttttcttcttgcttattattatgtggtccatcatagttttctgcttaaggaaatggttggttcaggagaggataaaatagtgttattgtaatcttctgtatttataatgaccgaagatatcgtacatagtttcgaccagaagag

SEQ ID NO: 209173 - DNA, 1334 bp, Zea Mays
agacgacccagtcgatgcgacagccgccggcgcgcgtgacccacgaagcaatttcaaacccagccagaatcaggagcaccgcgtacgcgacgtcgcggtcgcggcccagcttccagcgcccgacccggcgggcaagacataaaacacggcaacacataacacaactagtgaaggatacatcagacaagcttaaacaagctagcgaggcggatcatcgcgttgaagtcagcgctaccaaaaagattgctgatgcaaagctagctaaagatttccaagcagtcctaaaagaattccagaaagctcaacgattagcagtagagagagaagctgcatatgcaccttttattactcaagcgggcctgccacagagctacaactcaagtgaagtgaacaatggtgctgataagttggcagagcagcgcacgcagcttctagaatctagaaggcaggagttggtcttcttggacaatgaaatagtgttcaatgaggccatcattgaggagagggatcagggaatacaagagattcaacaccaaatcactgaagtaaatgaaatcttcaaagatcttgctgtgctagtccatgatcaaggagcaatgatagatgacattgattcccatatagagaatgctgttgtagcgacttcgcaggctaaaggtcagctttcaaaagctgccaagactcagaagtcgaactcttcgctgatatgcttgttactggttatcttcggcgtggtcctgctcatagtgataatagtacttgcagcataaaagcttggaaggcagctgaggttccaatgatcgagcttattgcgatgaattccttattattattttttttgctgtgcagccaggaatggatcctggcatccgcctggatgtatccaggcggtgattggtgatgtgcttgtggtatggctgtgtatttggtgatgatgtatctggaatgcatgggtggtttcacataaaagtatactctttcctgccagtgtagttcctcttgtctcatatgcacgctttgtttatatattgtaatgtatgagtgcgtgctgtagaacaaggttggattatctgtggtatgaatttcctcgattccatgagaaacgcttttctatatgtgaacttcgcttcctcttttcttcttgggcaatgggcaccatgttgttaggtggagacggaggtccatcattgttttcttcttgcttattattatgtggtccatcatagttttctgcttaaggaaatggttggttcaggagaggataaaatagtgttattgtaatcttctgtatttataatgaccgaagatatcgtacatagtttcgaccagaagag

SEQ ID NO: 209174 - DNA, 2995 bp, Zea Mays
gtgcggtccacattttaagcatcgccgcccgccagaatataagcacctgacaaccattgccctggggcaaccaaagcccatacagcgcgcttgattagttgccaggaaatgacgcttgattagcaggtgaaaaaacaaaatcaccagaggctccagcacagctcacgagttgatgcatatataatgaatggcgcgcggcttgttctgaaacaactcgctttcatgattttttctcatgagctgacaaatgtgcagcagctagctgcacacgatccaactaaacatactactactactatctcatggcacttgggttacacccggaggtattcaatgcgaaggatgctactccgagacaagaaaagaaaaagataaattcaatgcgatgcaagggatgagctcatgagcatgagcatagcagccatcatccatcctgatgctgcgctgtccaagtgcagtgtatgcaaaggatgagagagagaaggataggccttgctgtcgtagtgctgctgctgcaactgcaaggctccaaaaccaaatgggtcaggcgcagggaggtcatgtgaaagacaacacgatacaggcctctaacctttggtccttcatgtgaggtcctttaaaatactggaacgaggaaccatcagagatgctaaggcaacagaccaattgatgttatctcgctaccctagtttggatcatcacaatgcaaggacagaggaattctgtggagcattttgctgatgtttttggattcgacattgcatctagttcaggcaaccctgtgatggatcagcagtcatattggaacaatgttcttggatcagtagaatcgcagaatcttcaaggttatcagatgaatcacagtgatgctgccatgccatatgggaatgagacacagcaagatggtacatttcttggtttctgggaatcaggcgaagcaagtgcaagtggcagctctaacaatgccaaaacagagcatcttagtattggcggtggtctgaggattggtgaaaggcgactggtagctgacaatggcatttctctggatgtggatatcaaccttaacgccaacgttaacgatctatgtggtcaaagttcaaatgttaactgtacatctcagggccctgagcactatggtggcggtgatcgtagtgttgtaaattctcagccaactgacctgagattacacccatacaggactttcctactagatgcagagcaagcagattcttttactttgaaccctagtgaaaaccctttgtgtgatttttcactgatgcaagaaagcattgaccaaagacccggtagttccctggatggacgccggctagcctgcaagagaaaaaatgttgaaggacccaatggccagagttcagcaggtgctagcactagtttttcccacaggaacgacaatgctttccataacattgcttcttcaagttacaatcctgcacctatcagaaatccgtcctcacccaattgcttgccggttccaagttctatcgatgatcaactcccacgatatggaactaatgcagggctctcagccggtacctatgaccttaatggaggggtcaacaatgctgggaattcgcagagaagtttccgggcaagaattactacgtctcaacagattgctccctgtagtgtatggccctcttcaaatgctatcagacttcctaattcatggaatcatcagccacctcattttcaaagtgcatttgatgatacccaggaggttattcctgtggtcagcagcctcaacttgcaataccagcatccagtgaatgtttctagtgtgccaccggctgcaaaccgtttcactggccatggagcttcatcatcgagagctggcagtttggagaacagaattcttggtagtcaagaggctcctacaaggaatgtggtgcctgccaactactctgatttagttcccccgtctgtagtagacccgagacgtttgctgccagaaccatctaattggagttctgatgtccgaggcactgcaatatcaggaagtattcctcctgtatcaagagctaataacagtgcaactgttaatccgccagcaggattcagtcaccaaaacctcacccggcgccatcctcgaaatttatcagaggagattggtcggctatctggagcacttcgcggccatcaacccccacgcttaaggccggggtttctgttggagcgccagggcgatggtgtttggggtgttcctttatcaacaaggggtagagaaggaagaaggttaatggagattcggaatgcacttgaaatgatccatagaggggagaatgtaaggcttgagtctatcttctatggcggtgttgacattcacgatagacacagggacatgcgccttgacattgacaatatgtcctatgaggagctattagcactcgaggaaagaataggaaatgtcggcactggcctcagcgaggaagctgtgataaggttgctcaaacaaaggaaattttcatcttggacactaaaagcatctttggaccctgaaccatgttgtatctgccaggaggagtacgctgatggagacgacctcgggaagctggactgcgggcacgacttccacgctggctgcatcaagcaatggctggtggtgaagaacgtgtgccccatctgcaagagcaccgcattgaagaagacctgaaacccgaacaaaggctcgtgtcagagacatcccccatgtttctatgttcactcgatggttcgcgagatcatttgccgattcgtattgctacgcttttttttttttggtcgggaaaattttgccagccaccttttggttaatgtctttcctgcttgatgtagtgaatttggactatgcctgatagttgtccttgacctgaatcaggttggtgtgtgggtgtttcatgtttggttgctgtgatagctggtacgaacaatgtatttctgttatgcaagtaatagaaatgaagtttctccggtcaaaaaaaaaaggtggaggaacgat

SEQ ID NO: 209175 - DNA, 3799 bp, Zea Mays
ggaaccgcatcggccatcggaccggacgcaatgcaacgcaggtcgccgcagcagacaggcggacacatacctaagacctaacaaaatcccaaagccgataccggtgacgcggcggcgcggcccaccacggcatcgggcccgcggggcggagggcgtcgctttcgcgagccaccggccgcgcgtacggctccggcaccagcgcagcgcagcgcacgccgggctgcctggcgtccaggcgtattttccctcaaggttccgtcgccgtctcgccctccgacgctccacgcacgccggcaatctccggagagcgacggccgttacgatcagaccagacgtcagaccagaccagaggtgtcgatccgttcccggctcggttcttcctactttcttggacttttgatcgcgtcgcgtcgattagaaactgcctgcgagttaccgcgcgacgacttgctgatgacggtgtgtcatcgcctttccaattggaaaaccagaaaggtgaaagcttcggaatgagacgatggcggaatggaattggctgcagaaagcagcttatctttggcagcgatagtcacagccggagatcccacccgcggcggcacaggtctaaaaggagcaaccgcagatcaactttgccagtgatacgtccgtagtccctgccgaatactcgtacctgctgatactacctcaccacccacacactcccccctcccacgaccaaggttctaaaacttttttccccaagaacatccttgtctgtctccacctgctgacccttgcaaccgcagctataaaaagtacctacgcaggtctcgcgattgtaaaagattgctgcagagaagtttgggaggaacagggttacagtagaagccagtttttgccttttttccaatccctgttcttgcttgtcctggccccgctccttggacttggatttcgatttcttcctgaccatgagtggcaattgccaagtaaaaagctgcgagggttgaagcgagcacggcaagatctgttggttgttgcaggaggcttgccacaggaaggaaaggaggtgccgcttgcggactgtcctgcttgtcctctcacaagacgactccaagccgagaaatcttcgcccaaattctcgctcccccgctctcaattagcgtgcatgggcgcaggaaaggcggcgccttgagctgctgctgcgtcagggggggcgaatggatgcagagagcggccgcggcgccgcgggtgcgcgcaagaagtcatggcggtcagagctggtgctagcctaccagagcctcggcgtcgtgtacggcgatttggcgacgtcgccgctctacgtgtacaagagcgccttcgccggcggcgacatcgagcactctgagggcaacgaagagatctacggcgtgctgtcgctcgtgttctggacgctcaccctcattacgctcctcaagtacgtgctcgtcgtcctgcgcgccgccgatgacggcgagggcggcaccttcgcgctctactccctcatatgccgccgggtccgcgcggggctcctccctggcgtcggcgacagcgctgtcgacgagctcaaggaccagcccgacggcgcgctgccgccgccagcgtcgagcgtgcgcgcggcgctgcagcagcgcagggagctgcagtggctgctgctgctgttcgctctgctcgggacgtccatggtcatcggcgacggcgtgctcacccctgctgtctccgtgttctcagcggtttcggggctcaagctgtcaatggtcaatgaacagcaccaatatgttttgcttccagtaacatgtgtgatcctggtaggcttgttcgccttgcaacacttcggcacgcacagggtcggattcctcttcgcgcctattgtttgcttgtggcttctctgcataagcaccataggggtctacaacatcttcatttggaatccccatatctataaagccctgtcaccatactacatgtaccgatttctccagaagacacaagttggaggctggatgtcactgggtgggatccttttatgtgtaaccggttctgaagctatgtatgcggaccttggacatttctctcagtcttcaatcaagattgctttcacagcggtagtttatccgtcactcgtacttgcctatatgggacaagctgcttatatttcacggcatcacaattttgagaggaaccaccatattggattttacatatcagtacctgaaaagatcagatggcctattctggggattgcaatccttgcagctgtagttgggagccaagcagttatcactggcacattctcagttatcaaacagtgttgctccttgaattgctttccaagggtgaagattgtgcatacatcctccacagtacatggccaaatatacataccagagatcaactggatcttaatgatactgtgcttggctgttactataggcttcagaaacacgaaacagatggcaaatgcacaagggttggcggttataacagttatgattgtcacaacttgctttatgtcactcgtcattgtcctttgttggaacaagaatgttgtatttgctcttgccttccttcttttcttcggtgcaatcgaagctgtctacttctcagcttccctgatgaagttccatgaaggagcttgggtgcctataattgtttccttcattttcttgactgtgatgtgcgtttggcactatggaacagcaaagaagtacgaattcgatgtggaaaacaaggtctcaataagttggcttctgaatttaggctcttcgttgggtattgttcgggtcagaggcattggcctgatacatacagagcttgtgtctgggattcctgccattttctcccactttgtcaccaacctccctgcatttcatcaggttctggtcttcctatgcatcaaatccgtttctgtaccacatgtccaacctgaggagcgatttttggtcggacgcattggcctgaaacaatacaggctataccgggtagttgtccgatacgggtaccgggatgttcaacaggacagcctgcagtttgagaaggccctagtgagcagcattgccgagttcatccgctcgggggactcggatcaaaacggttatccggatggctcagagagtccgtatgagaggttgtctattatcagcaaaggcctgccatttcaagaggctgacggtgacggatcaccatcacctgaatcatctgctcggaaggatacaaacccaatcttagtatcctccaagtcgaggagagtgaggtttgtgctcccagaaaatgcgcagatcaacagccaagtgcgcaacgagctgcaagagctgactgaggcaagagaggcaggcatgtccttcatcatggggcgctcgtatatgaaggcgaaaagtgggtctagcctgatgaagcggattgccataaacttcatctatgagttcctgacgaggaatagccgaggtcccgcctacgcggctaacgtgccacatgtttccacccttgaggtaggaatggtctgccaagtctgatagatatgatatcactgtggccatgtcacgttgtatagagtgatttaccagataacagatatgcagggtgggaactctggcaagctcagtgaagtggtctacagagatgacactgttacagtgatcatgagtcatgacagtaactgtaacagtgatgagagatgaatgatctattttgctgtagtataacaaattcatggttacagttgaacattgtattttgctgtacaaataacacgtttctattctttttcaagagaaaaaaactcgatctgcggtgtaagaccgcc

SEQ ID NO: 209176 - DNA, 1063 bp, Zea Mays
ctgatctacactggttgaaagcaatatgctcagaggtctcgtgtccggaagctgcagtatattgcagagcttgagagtagagtccaggcattacagtcagaaggggtagaagtgtctgctgaaatggagttccttagccagcagaatatcatgctagacctggaaaacaaagccttgaagcaaagagtggagagtctagcacaggaacaacttattaagcgttttcaacaggagatgtttgagcgggaaattggtcgtctcagaacaatatatcagcaacagcagcaacaacaggctcctgctcttgttcgtagtaacagcagggaccttgatgtgcagttcgccaacttgtctctgaaacacaaagaccccaacacgggccgggatgctctctctgggcctcttcgtacttagttctttccatccttccgttcttgtgggttctatcagtggccaccactgtgtctgtcatctccaccaagaaaggagaagtgcacttggattgtgtgaaaaacaccggaaaaaggctaatagctatggatctgatgtttattatttcgggatatgcacctggcggtcatcctcagctcgcgtccattggtgatgctcgaccagtcggcggtgtttagggtttttgtttttagctagatgcttttcaagcatcattgtaccatttttcatgctagggttctaatctgttactacccccgttttcctgaactgtgtgcttcaagcatcttagtcatgtttggattagttctgcgttatcagtgcctcagtggaatgtggagcactaggcagcatcaggtaagttgctttggagatgtgccacatccttgacaactgcatgttctgctattatttcttagtactcaataagctagtgcaaatgaggtattagcgatcttcagatttcaggttgttcttgatgtactcctatgaatatatctcaattgctcaacgtttcctttttatgttaaaatttggctccataattgtatattttgaatcaagcagtgctaaggtatggttgatttaatttattggcggcatgtaaatttag

SEQ ID NO: 209177 - DNA, 1661 bp, Zea Mays
atacaaacgtgatagcctcatgctcgcagctcgacaaacgacagcggcctagccccgcctccccgttatccgacctatccccagcgtcgttgggtcatctccggcagctcccccgctaacacctccatggcgtcgaagcaggcggcggctggcgaagcccttgcggcccaaatcaacggcatgtcccgccctgagatgtacgacatgatgtccaagatgaagaccatgatcgaccacgaccaggagacggtgcgccgcatgctcgtcgacaacccggacgtcacccgtgcgctctttcgggtttgaattttctatacaacttcctttttgcaggcacaagtggtccttggaatggtgaaaacacccaaaactacacaagctttggacatggtccaacccacagcagtgccaacagcaccttcctcagtcaaaactactgcaccagatcatgtcagcttgcccccgcccccattacctgctaaccagcagagtgttgctcaactttctgccccgttttcatctggcttgtctaatgtgggatcgaccatggaccctcctactatttcagcaaatccaccacaatcagcacaagcaaaaggataccttatccatcagatgccttcatcagctcctcagccatctcaacatccaaatatggccctacctcatgctcctccacagtattccaatgttccatcacatatacctatagttcatagtcagccacagcaacctttgcaaagtcctgcaatatataatcaacagttgcaaccacctttgccccaattgtcaaggccgccttttcctcatcagatgcattcacaagtaccaaattcatttgggttgactcatgcaaatgctccgcagcacatgttacaacaaccaatgtttcatccggttgcgaatcctcaaactaatttcctccctggccaaccaccattgcctagccagccaccaccacagcagctgtaccaggctagttcacactacaatacacaaaatacgactccaatgcaagttgataggggcgctccctgggggcgggcccctgatgctcccactcctggctctcatttccctggacaattacccgggttgcccggacaaatgacccaaggaattggtggtatccaggcaggccaagcaccactgacacctgagatggaaaagatgctagtccaacaagtcctgggcatgtccgctgagcagattaacatgttgcctccagaacaacggcaacaggttcttcaactacgagacatgctacggcaatgatagatcgtcagttgactgggtggagaagtttcagttcactgcagcagggatcccgagtgtgggtgcctgttcgttttagccttttgtatcacctgattgacatcccgactagtctgcagcctaccttggatatgcgattgtagaatggtagtcgttgtcgtcatttatagaaatgcttgggcaatatgttttccgaaggactcacaaatgaactgcatgttttggtccagttcagccgcttcaatttcaagtcgtgttaaacatttaccatagggcccctgtggctccgtaccaagtaccaaccactcctacggtgcattcatacgaaccttcataaaaagaatgaggatacaattctaggttctatttgaaccatcttaaatttg

SEQ ID NO: 209178 - DNA, 1446 bp, Zea Mays
gtgatagcctcatgctcgcagctcgacaaacgacagcggcctagccccgcctccccgttatccgacctatccccagcgtcgttgggtcatctccggcagctcccccgctaacacctccatggcgtcgaagcaggcggcggctggcgaagcccttgcggcccaaatcaacggcatgtcccgccctgagatgtacgacatgatgtccaagatgaagaccatgatcgaccacgaccaggagacggtgcgccgcatgctcgtcgacaacccggacgtcacccgtgcgctctttcgggcacaagtggtccttggaatggtgaaaacacccaaaactacacaagctttggacatggtccaacccacagcagtgccaacagcaccttcctcagtcaaaactactgcaccagatcatgtcagcttgcccccgcccccattacctgctaaccagcagagtgttgctcaactttctgccccgttttcatctggcttgtctaatgtgggatcgaccatggaccctcctactatttcagcaaatccaccacaatcagcacaagcaaaaggataccttatccatcagatgccttcatcagctcctcagccatctcaacatccaaatatggccctacctcatgctcctccacagtattccaatgttccatcacatatacctatagttcatagtcagccacagcaacctttgcaaagtcctgcaatatataatcaacagttgcaaccacctttgccccaattgtcaaggccgccttttcctcatcagatgcattcacaagtaccaaattcatttgggttgactcatgcaaatgctccgcagcacatgttacaacaaccaatgtttcatccggttgcgaatcctcaaactaatttcctccctggccaaccaccattgcctagccagccaccaccacagcagctgtaccagctgacacctgagatggaaaagatgctagtccaacaagtcctgggcatgtccgctgagcagattaacatgttgcctccagaacaacggcaacaggttcttcaactacgagacatgctacggcaatgatagatcgtcagttgactgggtggagaagtttcagttcactgcagcagggatcccgagtgtgggtgcctgttcgttttagccttttgtatcacctgattgacatcccgactagtctgcagcctaccttggatatgcgattgtagaatggtagtcgttgtcgtcatttatagaaatgcttgggcaatatgttttccgaaggactcacaaatgaactgcatgttttggtccagttcagccgcttcaatttcaagtcgtgttaaacatttaccatagggcccctgtggctccgtaccaagtaccaaccactcctacggtgcattcatacgaaccttcataaaaagaatgaggatacaattctaggttctatttgaaccatcttaaatttg

SEQ ID NO: 209179 - DNA, 1881 bp, Zea Mays
ctaatcagcgtgttttgttttgtttcgtctcgtcgaccgagccgtccgtcgtcctccctggcggtctggccgcctccgccttcctccccgtgcgtctcacccttttcctctacagcttcctctgcccaatcagctcgtcctctcccctcctctccctcccgtgaactgctaaaatccctcgccaagcatttccgtcgggttaggtggtagataagccgaaaatcgagtggaaaagcatcaatcgagtgctgcgctagttgcctggttcgtcccaacaaattccaccgggaatcagggtcgtccggcagcggctgaggcgtctgggttctggaggagcggccgtcggtgaggggggatggggggcggcggcggatcctccgggccggagctgtcgacggacaacatgaaggggatagtcctggcgctgctctccagcggcttcatcggcgccagcttcatcatcaagaagaagggtctccgccgggccgctgtcgcctccggcgtccgtgcaggtgtaggcgggtactcatacctcatggagcccctgtggtgggttggcatgatcattagtaagtgattgtaggtgagattgccaatttcgtggcatatgctttcgcccccgctgttctggttactccccttggagcactcagcataattgttagtgcagtgctggctcatttcattctgaacgagaggctgcatgccctcggggtgctcggctgcgtgatgtgcattgcagggtctgtggtcattgttatccacgctccacaggagcaggagattacttcagttaaggaaatatggaacatggcgacacaacctgctttcttgttatatgttgcgtcagttattgtgattgtttttgtcctggtgttctatttctcccctctctatgggcagtccaatgtgttgatctacactgccatttgctctttgatgggctctctttcggttatgagtgttaaagctcttggtacatcactaaagcttacttttgagggaacaaaccaattaatatatccagagacttggttctttatgcttgttgtggctacttgtgtgttgactcagatgaattatctgaacaaggcacttgacacgttcaacacggcaattgtatctccaatatattatgtaatgttcacaactcttacaatacttgccagcgtcataatgttcaaggattggtctggtcaaagccctggaagcgtcatttctgaaatttgtggcttggttgtggtgttgtctggtaccattttgttgcatgtgacgaaggattatgaaaggatcccacaatcaagaagtgtttatgcaccattatctccctctttgacaactagattaaatggagaattgttgaagcatgtcgtggatgagaggacttcggacgaagaaaaggccttgagaagacaggagatgtattagcgtgcgtcagaatatcaaaggaaatataggttactctgatggattctccggcaggggcttgtacatggcgtagtgataaccttcccatagcgattgttgattcctccattacagtttgttggtttgtgtatataactgcagcaatttgtggctaccgagtgattgcaaatctgccgaggtggtggaaggctgcagagttccaccaaaaagaatctaagtcgggtgcatagattcttatcgaattcccttcttcctttcgtaacttcctcagttttgtccacggcatttgttccatgtgagttttagagtgaatcacggaccctatgcaactgatgtacattattattgtcatagtgaagttcgtgcaactgtgaatgatgtacattattattgtcattgatgcttctgcgaaattctggtaccatggcatctctgccatttatctagtatggc

SEQ ID NO: 209180 - DNA, 457 bp, Zea Mays
ccgctgatcgatcactgaccacgcaccgcaccggcggcgggatcctgatccgcctctgctcgctgtgctcggccggctcaccgccgggagtgtcacctgcgcatttctttcagagtcggtcggcttgcaaagcaaagagacgatggcgccgacgacgacgctcatcgtcaccgtgaacctggaatgctgccgctgcagcagcaagatccagaagatcctctgcggcattcagcaagaaggagagttcaccatcgagaagatcgtgtacgagaaggacaaggtgttggtcacaggcccattcgacgccgacaagctgtcctgcaagctgtggtgcaaggcgggaaggatcatcaaggacatccaggtcgccaaaccaaaagacgaaaagcctaaaaacccttcatgcaagctggagtatggaacacaacaaggtcaactgcagggaacattggaggtg

SEQ ID NO: 209181 - DNA, 389 bp, Zea Mays
ctcccagcctcgccctcccaccgtcccacgttgttcctcccgaccctcgccgtccctcccgccgcgacccgccctcctcctcccgaccacgccgcccagcccgtgtaccactccctcccagcctcgccctcccacgccgtccctcccgccgtgacccttcctcctcctcccgacctcgccgcctagcccgtgtcgccgccgtcgcccgtgccactctgctgctgcgaccacgacaatggggatgtggaaggtggtgtgcgtcaccgacgcatcagcgtacatcgcgtcctggatcgtcaggctcctcctcgaccgtggctacaccgtccgcgccaccgtgcgagacacagcctatccttagctccatccaacgcagtcacttgcaatgt

SEQ ID NO: 209182 - DNA, 1297 bp, Zea Mays
taaattgcggcatttgaaggtgatatccatggacaatttgttgatctcttgaggctctttgatttgggtggttatcctccaacttcaacttatattttccttggagactatgtggatagaggcaaacaaagcttagaaaccatatgtctgcttctggcatacaagttgaagtaccctgataatatataccttttaaggggaaaccatgaagatgcaaaaattaacagagtttatggtttctatgatgaatgtaaaaggagattcaatgttcgactatggaagatattctgtgattgcttcaactgcttgcctatggcagcacttattgatgacaaaatattatgcatgcatggtggcctctcacctgaattgactagcttggatcaaataaaagatattgagaggcctaccgaaattccagactatggtcttctgtgcgatctcctttggtctgatcccagtcatgatacagaaggttggggggagagtgatagaggtgtttcttgcacttttggcgcagataagcttgttgaatttttggagaagaatgatcttgaccttgtgtgcagagctcatcaggtggtagaagatggctacgagttctttgcagagagaagactagtgaccatcttttcagctccaaactactgtggcgaatttgataatgcaggtgctctattgagcatagatgaaagcttgatgtgttcttttcagatcttgaaaccaaatgaaacaggtgcaccacattcaaggaaacctcttccaagcaaggcaccaaaaggagagaacgtctaatttgtatccagtgacctaatcacaatcgatgtcagctcgaagggggcgatctcgttgtctcggatccaccagggcatggcattagcgttctacacttgctgaatttgtgtggactcaatcggcagcgcttacattcttctgtacagcagcagtgtttctaacttggcatatcgtccgttctgatagtgacattgccacagctgcaatattttagtcgggtggacaaggcattttgttgggtacagtagctgttgttttgttagcctttttttggtaatgtttgtttggttgattgaacgctgtgagttttgtttgccgcgtatcttcgtcaggctcgggtatttacatcctgcaactgtgtaaatgattttgtctaacgaatgtctgttgacataaagattgctgcttacagtaacaaccacactaggtggcacaactgggcctgtatgtgtccgtcctccatggtcacgtgaatcctactcctttaaatcggcagtagttt

SEQ ID NO: 209183 - DNA, 1928 bp, Zea Mays
ctattcttgtctagtccacgtcctacaattttcccttttctctgaccaccattgctcccaaatatgatgtcttctatcgtctatacgcttgtttctcctccatattgtcgtatgaattatgcgatcacgaaagggaggggatactgggtagcaattggtgtggagaggaaaggttcaagttgattttaaccaaggcagcacgacggcagcgacgacgacatacaacaacacgacggtaggggtgatgatggcagcgccatcgggtggtggatgcagtggctgtcttgactgcctgcatgatattgtgcatgcactatcgatgggatcatgcctgacagtagagcagcggcctgccatggctacgggaggtgcgcacaaagggagagatgtaaaagagaggaaggaaaaggtggagggtaggataataggaaatggagtgggtaatttggcttgcatgttcacgcgacaggggaagaagggtaccaaccaggatgccatggttgtttgggagaattttaatggaaggtcagacacgattttttgtggagtttttgatggccacggtccgcatggccatattgtagcaaggaaagttagagatactctcccttcgaagctgcgtgctctgatatatgatgactttggggagagccccatttgcaattcagatggctcaattctagaagaaactttatctccgtacgctgatgaagaagacaagtctccagtgtctgtagaaaaaggagaacgtcaggaatcctttttgtcaatgaaagattcattccggaaggcttttagggtaacagacaaagaacttaaattgaaccggaatatcgatagcatttgcagcggaagtacagcagttactttaatcaagcagggccaggatcttattgttgcgaatttaggtgactctagggctgtattaggaaccagagatcaaaacggccgtttggtagctcatcagttgacagttgatttgaaacccgatcatccaagatgaaccagacgtatctcgcttgtggcttccaaattgtaactcccccggtctagcaatggcacgagcttttggcgatttctgtctcaaggattttgggttaatctgtgtgcctgaagtcacctatagacaaatcagtaagaaggatgaattcattatccttgctacagatggggtgtgggatgtcttgaccaatcaggaagtcatggacgtagttgcttcatgctctgagcgttcgtctgcagctcgttctatcgttgatctagcaaatcaggcatggaggtttaaatacccaacttccaaaactgatgactgtgcaacgatatgtctttttctcgacgtagaggacaaggctgctggcttgtcagtgtcgtcatctgttgctagcaagggaactggatcacaagctcagccaaggaagcccaggctccatactagtgtaccacctgaagatgtagatgatgggagtgaatcaaatatcagtggagatgaaaggtccttggacagcttcactaggttgaacacactactggcactaccaaagctcggagacacaagtctgaaaataaaatgaagcttattgccttcgcatgcagttagcagcatcagtggacgaaaacattgttggttttattagaacacttaatttgtgatgtctcgacataattgccggtcacttaaaggaggagtgggctgctgcatttctatgcaaactcatatgtgagcaaatgctactctcctagtgacatctttaatcattatggtctcagaaatattggacgtatgctatgaaagcatttttcttttgaagatatacaaaatcttcatttgatcagccgtatgtagatgtgggttgccacatttccacattatgtggtcacctataatcatttaaatcacatggatcaccatgaatgatggtaatcttgct

SEQ ID NO: 209184 - DNA, 2307 bp, Zea Mays
ccataaacgcctccctcttcgtcccctcctgatggagctctggccgtttcaaaaccccctaccccctgcccggtgccacgcggccgcgtccccgcagcctcagcccccggcccgcgtcgcctcgcgccggacgccgcgctgcttctgatttccgaccgttcctactcggtgtcggccggattccctagtccttgtcgtacgggagggtgcggtttcctggcgcggatgtaagtgaaggccgtggcaggggcagggaaggaatgcagaggtcgcggcgagcccttctgcggaggacggcggcagcccaggagcagagcgctgtggcggaggctgccgctaacggaaggaggaggcgtttgtacggcttctccgcctccctcgtcgtcgcctcgtgggtcgccgtgctcctcctccactccctcgtcggacacggcgacggtcaacgagatggaggaggctctactgtagatcttactgttgtagagcctactgtaaatgttggtcctattaatccggttgtacaggaagagcatggaggtgatttggagatgccaggtgatagctgtgttaattctgacgaaaacgctgtgctttcagaggatacactggtgcaagcagatcaattgtgttccagtgatgaggtgcagaatgagaacacagaagctgtaaccatagacagtcaggttgagctttcaggagatcagggtgggtatcttcctcagtcgggtgttgattctggagttcaaccaggggagaaggtagagagtaaagatttgcctagaccaccgagactatcacgggttgctcctcctgatctcgatgaattcaagacaagagcaattgctgaaaggggacctggtatttctagtcaacctggtaatatcatccaccgaagggagcctagtgggaagttgtataattatgctgcagcttctaaaggggccaaggttctggatttcaataaggaggctaagggtgcttccaacatcttagataaagacaaagacaagtacctccgcaatccttgctcagcagaggggaagtttgtcatcatagagctttctgaagaaaccttagtagatacaatcgcaattgcaaattttgagcattattcttctaatccaaaagaatttgaactgctgagcagtctgacatatcccacagaaaactgggaaactcttggaagattcactgccgcgaatgcaaaacttgctcaaaatttcacttttcttgaaccaaagtgggctagatatttgaaactgaacttggtaagccattatggttctgagttctactgtactctcagtgtgcttgaagtgtatggaatggatgctgtagaaaagatgcttgaaaacttgattccagttgagaataagaaaacggaacctgatgacaagactaaggaacccattgagaaaatttatttgaaagatcctgctggaggaaaagaattctcacaggaaacccttgatgaagatgaatttgaactagaagatgataaaccaaacggtgattcattgaagaatggtgctaatgatccagtttcagaggcaaggacacttcaggctggcaggattcctggagatacagttcttaaggtgctaatgcagaaagttcaatctcttgatgtgagcttctctgttttggagaggtacctagtggagttgaacagcagatatgggcaaatctttaaggatttcgatgccgatattgatagcaaagatgtcttgttagagaagatccaatcagagctgaagaatcttgagagcagcaaagataacattatgaatgaagttgatggattcctctcatggaagttagttgcttcctcgcaactaaaccagctggtcctggataatgctctactcagattggaatttgaaatatttcggcaaaaacagactgacatggagaacaggagtcttgctgttatatttctcagttttgttttcgcttgcttagctcttgctaagctgtctataggcatcatgtccagattttgtagattctataactttgaaaagttccataattccatgttcagctggctccctggcttgtgcacatggcctcaacactggactgctcttaaaggcaccattgcgctggttttcagctggaaaggtgtcgctgataacttcagtcagcagcactcagcggcaaagtcaatcccgaaaatactgcacaattgtgtgaagtgaaatctactcgtgctggagctctttgagttggttgatatttgagacttgagaccgtagttggtttgcagtaggttgctgtggttttgtctgttcgcttctagttttc

SEQ ID NO: 209185 - DNA, 1407 bp, Zea Mays
cgcaaagatgccgagctgtttatcggttctataatgagggggcagccgtccttgctgccaagcgtgcggaagcaatggcccgggaagccactgctgtatggaatcggcaccctgttggtcatgccactgaggacactgtatggagtgggtcgtgtttttggcgcaggacggtttctctgcaacatgaccaacgtctcttcgtcgctgcaaattgagcttgtaccatgccttcgagataactatgcgtatatcctgcatgatgttgatactggaacagttggagtagtggatccttctgaggctatgcctattataaatgcattggaaaagagaaaccagaacttgacttatatactgaacacccatcatcactatgatcatactggtggaaacttggaattgaaggcaaaatatggtgcaaaggtaattggttctgagaaggataaggacagaatacctggcattgacatcacgcttaaggagggtgacacatggatgttcgctggccatcaagttcttgtactggaaactcctgggcatacaacaggtcatgtgtgctattatttcgctggttctggagctatatttacaggtgacaccttgttcaatctatcatgcggaaagctttttgaagggactccacagcagatgtatgcctcactccagaaaattacagctctacccgatgatacaaaagtatactgtgggcatgaatataccttgagtaatgcaaagtttgccttgagtgtagaaccgggaaataaagcattgcaggaatatgctgcaaatgcagctgagctgcgtaataagaatatacccacggtgccaacaacaattggaagggagaaggaatgcaatcctttcttgcggacctccaatccagaaattaagagaacactgtccgttccagatcatttcgatgaagatcgggtgcttggagttgtccgtcgagcaaaagataacttctgactaacaaaaggaaatgctcgtgacgtatgacccatatcttgttaaagttcagacagagaacctaagtcacaataaacataggaggaaatgaaggtatatatgtttgagctagattttgaaatgcttcggcaaaattatgtcgagtgtatgtagcttgggcagtgcagtgcttgtctatagcaaccaatgattcttttgaccactacaaataagcgtgttctgctatcatctactctctgtaaaaaaaacgccacgtagccgtttcatagtcgatcttcagttcttattcaatacttcaacttggcggtttgcactgtggcagtggatattacttgaatgcattgcactgcgatctgtagggatccatgtttgttcgctgcatgaatatggtatcaacagtgcagtgcttggaaatgtacatataggctaatatgaaaa

SEQ ID NO: 209186 - DNA, 1437 bp, Zea Mays
catccctacttccctttactcgagctaaatgagggggcagccgtccttgctgccaagcgtgcggaagcaatggcccgggaagccactgctgtatggaatcggcaccctgttggtcatgccactgaggacactgtatggagtgggtcgtgtttttggcgcaggacggtttctctgcaacatgaccaacgtctcttcgtcgctgcaaattgagcttgtaccatgccttcgagataactatgcgtatatcctgcatgatgttgatactggaacagttggagtagtggatccttctgaggctatgcctattataaatgcattggaaaagagaaaccagaacttgacttatatactgaacacccatcatcactatgatcatactggtggaaacttggaattgaaggcaaaatatggtgcaaaggtaattggttctgagaaggataaggacagaatacctggcattgacatcacgcttaaggagggtgacacatggatgttcgctggccatcaagttcttgtactggaaactcctgggcatacaacaggtcatgtgtgctattatttcgctggttctggagctatatttacaggtgacaccttgttcaatctatcatgcggaaagctttttgaagggactccacagcaggtttttcacttgcttgcaaatatcttcatttacatatgtatgcctcactccagaaaattacagctctacccgatgatacaaaagtatactgtgggcatgaatataccttgagtaatgcaaagtttgccttgagtgtagaaccgggaaataaagcattgcaggaatatgctgcaaatgcagctgagctgcgtaataagaatatacccacggtgccaacaacaattggaagggagaaggaatgcaatcctttcttgcggacctccaatccagaaattaagagaacactgtccgttccagatcatttcgatgaagatcgggtgcttggagttgtccgtcgagcaaaagataacttctgactaacaaaaggaaatgctcgtgacgtatgacccatatcttgttaaagttcagacagagaacctaagtcacaataaacataggaggaaatgaaggtatatatgtttgagctagattttgaaatgcttcggcaaaattatgtcgagtgtatgtagcttgggcagtgcagtgcttgtctatagcaaccaatgattcttttgaccactacaaataagcgtgttctgctatcatctactctctgtaaaaaaaacgccacgtagccgtttcatagtcgatcttcagttcttattcaatacttcaacttggcggtttgcactgtggcagtggatattacttgaatgcattgcactgcgatctgtagggatccatgtttgttcgctgcatgaatatggtatcaacagtgcagtgcttggaaatgtacatataggctaatatgaaaa

SEQ ID NO: 209187 - DNA, 2468 bp, Zea Mays
aacccctccgccgcccccgaaaaaacatataaaacagaaccctcgcatcctgtaaatggcgacacgcctcgcctccatcttctctgccgtgcgcagccccacctcagccccgccccacactctccgccgcgctctcccaagcttcagctaccggcgagcgcatccatctcagccccgcatgtcctcctcttcagccgcctcctccgcgccgccggccgccgagaagcctacagtggcgccgttcgggtcctggaggtcgcccatcactgcggacgtcgtatctggcgcggataggcgcctcggcggtatcgctctcgctggagatggacgccttctctggatcgagggccgccccgaggagaaagggcgtatggttattgtaaaggaggaggataatcctgtggatgtcatacctcaggaatttgcagcacgcacactggctcaagaatatggaggtggtgcatttgcagtcgacaagagtgttgttgtgttctcaaattacaaggatcaacgtctatacaagcaaacaataggaactggtggtccacctgtgcctcttacacccgattatggtgcgccaaatgtcagttatgctgatggtgtatttgatcctcacttcgaccgttatgttactgtgatggaagatcgtcgaaaggatagcttgaatcccaccacaacaattgctgctataaacttgagtggcagtgatgttcatggtgctgatcagcggcaacgatttctatgcatttcctcgcattgatcaaaataaaaagcggatagcatggattgaatggagccatccaaacatgccctgggataaatcagaactctgggttggttacttcgccgaaagcggagacttgaccaaacgggtctgtattgccggtggcaatcggctgctgattgaatctcctagtgaacctaaatggtcaccgaaaggagaactgttttttgttactgacagagggagtggattttggaatatttataaatgggttgaacaaaccaatgaaattgttccagtgtattcactagatgctgaatttacgagaccattgtgggtttttggcatcagctcgtatgattttcttggaaacagcgaccacattgttttcagttatagacagcaaggaaagtcacatcttggtgtgcttgattgtgattcaggttctatttcattgcttgacatccctttctctgatttatctgatgtggttgctgcagatgattacttctatattgaaggtgcttccgcgagtattccacggtcgattgctaaggtgacattaaatgaaagcaaaaccaaagtagtcaatttctcaatagcctggtcgtcctcaccagacctcgtacaatatagacctttcttcagcacaccagaacttgttgagttccctacatccaagtctggccagaaagcttatgcctatttctacccaccatcaaatcccaattttcaaggtttgcctgatgaaaagcctcctttgcttgtcaaaacacatggaggaccaactgctgaaacacgtgcaattctggacctcagtgtccagtattggacaagtagagggtgggcatatgtcgatgtcaactatggaggaagcactggttatggaagagagtatcgggagagactattgaacaaatggggtattgttgatgttgatgattgctgcggctgtgcgagattcctggtggagagtgggaaagtagatgggcagcgcctttgtattactggtagatcagcaggtggatacactactttagcttcacttgcattcagagacacgttcaaggctggagcttctctctatggtgttggggacttgactctgttgagagcggagacgcacaaatttgagtctcattatatggacaatcttgtaggaaatgaaagagcttactacgagagatcaccaatcaactttgtcaaccagtttacttgtccagtcattttgtttcaagggttggaggataaggttgtgccaccagatcaggcacgcaaaatatacagtgccttgaaagagaaaggtttgcctgttgctttggttgaatatgaaggagagcagcatgggttccgtaaggcggagaacatcaagttcaccttggagcagcagatgttgttctttgcaagattagttgggaagtttgaggtggcagatgatataactccaatcaagattgagaacttcgattgatctcttggagagtggtgtccggttcgaagttttgttcacgtaacccgattatatgttcagtacattagccgttgcagtaccttttaggaatacgacttcatcttatttttgagggttgatggaaatctcttttttgcgctgtaacgatgaagtcaccttgttttctgttcggttctagaatgaaatagaacggaatgacactatcctttatttggttgatgagtgaaaatagataatttcataactataatacattcatacaaccatatatat

SEQ ID NO: 209188 - DNA, 2448 bp, Zea Mays
aacagcataggcagcccatcaaaattaggttaccctccccacgcctcccacacacacacactcccattcgctcccatccgccaggacactcttctccccggcgcagtcaggacactcttctccccggcgcagtcaggacactcttcttctcaccgccgcgagcactgctctgggcgcgcgccgcctaccctcccctcttccctccctcacctctcgtcctcgaagcaagggtttccctgccccaggctgcctctcgtccgttctccttctctaccgccgccacaactcgcccgccgccccgccctcaccgccggcaacgtgacacgacaagcccacccctttattcctgcagctatactccgatggccctcgtgaagtccgacgctgaggaggagtggtccgactctgacttcgatgatgcctccgactccgaggtcgccgaagctctggactggctcgacgccgtggagggccctgacggctcagctcgcccccacgtcgccttctcggcctccggaggcggggctgcggcgcggaggcctaacgcacacggcggcgtgctgtctcgcccgctccagccgctgtctaaccggacccagaagctggcctcgcacattagtgctactcccttggaggagtgggaaggtaggatgaacgttgcgatgtcaaattccgtcacaactgcaatcagggatagcataagggacacagctattgggaaaataaggaacactgagaaggctgatcgtgctacagtggaacaggctattgacccaagaacacgcatggttttattcaagatgttaaaccgtggtgtctttaataacataaatggctgcatttctacagggaaagaggcaaatgtctatcatgcaacaaagacggatggccaggagcttgcaattaaagtctacaaaacctctgtccttgtttttaaggatagagaccgatatgtccaaggagattatcgttttagacatggttactgcaagcataatcctcggaaaatggttaagacctgggctgaaaaggaaatgagaaatcttctacgagtgagggcagctggaatccgatgccctgcaccattactcctaaggcttcatgtactggtgatggaattcatagggaaaggaggctgggctgctcctcgtctcaaggacgctgctttgtcagatgacaagttgcatgaaagttactttgagataattacaacaatgcggactctttaccaaacgtgcaaactggtccatggtgatttgagtgaatacaatattctatattttgagggtcacttgtatattattgatgtttcacaatccgtcgatcttgatcacccttcagctttggattttctgaaggaagattgcttgcatgtttcttaacggatttgtttaattttgttattgatcaaagcatttctgatgaagatgttgatgattacctggaaaaggctcagcaaaagattttggaaaatggtggtgcggttccaaatgatgatgaaattactcctacagtcatggtgcagacgttggactacgtgaagcaatgtgaggcagatattgtcaacatgtcaataatgcaacgttcatcctctggctatgagccaaccgcagataagctttatgaccaaccattgttagggtttgtgcggactaaaaacacaaacactgaaaaggagcaaggacaaccggcacgaaacttagttgaggttgaagaagacgagagcgaatcttgcttgagttctgatgaagatgattcgtggcacgaggatgatcctaaggtgggacccgaggaaaggaaggctgctcggaaggaaaacaagaagaaagtgaaggaagagaagagggaggcccgcaagaccaagatcccaaaagctgagaagaagaagaggaagaaaatggcgaaggcaaaatgcaagcggtagcgaatatctatgaacaatccagtagttaactccgtcagtagagatggataacttcgtcgtgaatcaaacaagatgatggataacttcattgtgaatcaaacaagatagcctttatgagggagtgcaggttggaagtttggttcacagcgctactttacacatcacaagattattcacgatgttttcaacctttttgttcgtttcaattttgtagagaactactgtacgtaatgtgaccacatatatgtttatcttgagtggaaccgtatagtattttttagagaagagtacaaatggtactttgtgccgctggattctttgacctagtgcaacttaattagggtccacttcatggtgcgttactgttcttcaaccatgggtttgttcattcgtttctgtgagggttccgatttgttactctgcgcattgatcgagtgtggtgaattaagctagcgtgtggccgtgcaaagcagtgtgtaacacaattgtggtggcaggcatgcatgcatgcatgaatgaatggg

SEQ ID NO: 209189 - DNA, 2379 bp, Zea Mays
acacacacactcccattcgctcccatccgccaggacactcttctccccggcgcagtcaggacactcttctccccggcgcagtcaggacactcttcttctcaccgccgcgagcactgctctgggcgcgcgccgcctaccctcccctcttccctccctcacctctcgtcctcgaagcaagggtttccctgccccaggctgcctctcgtccgttctccttctctaccgccgccacaactcgcccgccgccccgccctcaccgccggcaacgtgacacgacaagcccacccctttattcctgcagctatactccgatggccctcgtgaagtccgacgctgaggaggagtggtccgactctgacttcgatgatgcctccgactccgaggtcgccgaagctctggactggctcgacgccgtggagggccctgacggctcagctcgcccccacgtcgccttctcggcctccggaggcggggctgcggcgcggaggcctaacgcacacggcggcgtgctgtctcgcccgctccagccgctgtctaaccggacccagaagctggcctcgcacattagtgctactcccttggaggagtgggaaggtaggatgaacgttgcgatgtcaaattccgtcacaactgcaatcagggatagcataagggacacagctattgggaaaataaggaacactgagaaggctgatcgtgctacagtggaacaggctattgacccaagaacacgcatggttttattcaagatgttaaaccgtggtgtctttaataacataaatggctgcatttctacagggaaagaggcaaatgtctatcatgcaacaaagacggatggccaggagcttgcaattaaagtctacaaaacctctgtccttgtttttaaggatagagaccgatatgtccaaggagattatcgttttagacatggttactgcaagcataatcctcggaaaatggttaagacctgggctgaaaaggaaatgagaaatcttctacgagtgagggcagctggaatccgatgccctgcaccattactcctaaggcttcatgtactggtgatggaattcatagggaaaggaggctgggctgctcctcgtctcaaggacgctgctttgtcagatgacaagttgcatgaaagttactttgagataattacaacaatgcggactctttaccaaacgtgcaaactggtccatggtgatttgagtgaatacaatattctatattttgagctttggattttctgaaggaagattgcttgcatgtttctgacttctttaaaaaacgtggtgttcctgtcatgacagtaacggatttgtttaattttgttattgatcaaagcatttctgatgaagatgttgatgattacctggaaaaggctcagcaaaagattttggaaaatggtggtgcggttccaaatgatgatgaaattactcctacagtcatggtgcagacgttggactacgtgaagcaatgtgaggcagatattgtcaacatgtcaataatgcaacgttcatcctctggctatgagccaaccgcagataagctttatgaccaaccattgttagggtttgtgcggactaaaaacacaaacactgaaaaggagcaaggacaaccggcacgaaacttagttgaggttgaagaagacgagagcgaatcttgcttgagttctgatgaagatgattcgtggcacgaggatgatcctaaggtgggacccgaggaaaggaaggctgctcggaaggaaaacaagaagaaagtgaaggaagagaagagggaggcccgcaagaccaagatcccaaaagctgagaagaagaagaggaagaaaatggcgaaggcaaaatgcaagcggtagcgaatatctatgaacaatccagtagttaactccgtcagtagagatggataacttcgtcgtgaatcaaacaagatgatggataacttcattgtgaatcaaacaagatagcctttatgagggagtgcaggttggaagtttggttcacagcgctactttacacatcacaagattattcacgatgttttcaacctttttgttcgtttcaattttgtagagaactactgtacgtaatgtgaccacatatatgtttatcttgagtggaaccgtatagtattttttagagaagagtacaaatggtactttgtgccgctggattctttgacctagtgcaacttaattagggtccacttcatggtgcgttactgttcttcaaccatgggtttgttcattcgtttctgtgagggttccgatttgttactctgcgcattgatcgagtgtggtgaattaagctagcgtgtggccgtgcaaagcagtgtgtaacacaattgtggtggcaggcatgcatgcatgcatgaatgaatggg

SEQ ID NO: 209190 - DNA, 1731 bp, Zea Mays
ttaaaaataggctattgacccaagaacacgcatggttttattcaagatgttaaaccgtggtgtctttaataacataaatggctgcatttctacagggaaagaggcaaatgtctatcatgcaacaaagacggatggccaggagcttgcaattaaagtctacaaaacctctgtccttgtttttaaggatagagaccgatatgtccaaggagattatcgttttagacatggttactgcaagcataatcctcggaaaatggttaagacctgggctgaaaaggaaatgagaaatcttctacgagtgagggcagctggaatccgatgccctgcaccattactcctaaggcttcatgtactggtgatggaattcatagggaaaggaggctgggctgctcctcgtctcaaggacgctgctttgtcagatgacaagttgcatgaaagttactttgagataattacaacaatgcggactctttaccaaacgtgcaaactggtccatggtgatttgagtgaatacaatattctatattttgagggtcacttgtatattattgatgtttcacaatccgtcgatcttgatcacccttcagctttggattttctgaaggaagattgcttgcatgtttctgacttctttaaaaaacgtggtgttcctgtcatgacagtaacggatttgtttaattttgttattgatcaaagcatttctgatgaagatgttgatgattacctggaaaaggctcagcaaaagattttggaaaatggtggtgcggttccaaatgatgatgaaattactcctacagtcatggtgcagacgttggactacgtgaagcaatgtgaggcagatattgtcaacatgtcaataatgcaacgttcatcctctggctatgagccaaccgcagataagctttatgaccaaccattgttagggtttgtgcggactaaaaacacaaacactgaaaaggagcaaggacaaccggcacgaaacttagttgaggttgaagaagacgagagcgaatcttgcttgagttctgatgaagatgattcgtggcacgaggatgatcctaaggtgggacccgaggaaaggaaggctgctcggaaggaaaacaagaagaaagtgaaggaagagaagagggaggcccgcaagaccaagatcccaaaagctgagaagaagaagaggaagaaaatggcgaaggcaaaatgcaagcggtagcgaatatctatgaacaatccagtagttaactccgtcagtagagatggataacttcgtcgtgaatcaaacaagatgatggataacttcattgtgaatcaaacaagatagcctttatgagggagtgcaggttggaagtttggttcacagcgctactttacacatcacaagattattcacgatgttttcaacctttttgttcgtttcaattttgtagagaactactgtacgtaatgtgaccacatatatgtttatcttgagtggaaccgtatagtattttttagagaagagtacaaatggtactttgtgccgctggattctttgacctagtgcaacttaattagggtccacttcatggtgcgttactgttcttcaaccatgggtttgttcattcgtttctgtgagggttccgatttgttactctgcgcattgatcgagtgtggtgaattaagctagcgtgtggccgtgcaaagcagtgtgtaacacaattgtggtggcaggcatgcatgcatgcatgaatgaatggg

SEQ ID NO: 209191 - DNA, 2419 bp, Zea Mays
tttggggtgggtggggtctgaatctttttctttgttcttataatctcatggtgtagaatttctgctggttgggcctgatgacatttggaatctgattacttctttacaccattgtgacattagttgactgtcatttgttgctttttatttgagttgcctggattgaattagtctcaggacagacataggataggacctaagatcgcattagcaaaagctaaaatggtctaggattagaagtgttataccaaatcttccatgaactccagatagcccagagtcttttataatgccacacacaaagctttcatgtgttggaaaaaaatcataggtcaaccgaactaagttatcacaacatttactcaaaccatatcagaaggcacatatgcttacataaatttcattttagttgataccaccggtcctgggtttcatgcttacaactagaaaagggttctattttttcagattatgaacataccatggaaacatgaagcagggttttacttttatatatgctagcaattgttatctgttgtgttgctttacatttctgttacttactcttttgcaggtaaaatatacagactgtggagttagtcctcaggatctacatcatgtattcacaaagtttgctcatcctcaaagtggaggaaaccgagggtttaatggtagtggtcttggccttgccatatgcaagagccatcccggtttctaggattccatgtcgtcccatgagaatataacgaaggaaacaagaagcacattatagaagtagcaagatcacagtacatatcagcatgacattcatgaagccatcccggtttctaggattcttgttttgctctgtccatggcacgccaccaacattcatccctaaaactgacatttttttgcaacataaatcaggtaaacgagagccctggaaataacaggaattaattcaggaaagtacacgagcaagcacccgaggtcaatgagcttacctccattgacaatggagataggaaggaatatcatgaagagaaatgaaaggaccatataattccaagaccctgatgatggccacaactgcttatattgatgattcctactcggagattattgatcctctaaagactgaggtgctgtatgttgttgaactccctggtgaccatacttagcacccaccaaaaccgaatgtggtggtgtctagcagtgtgtgcaaacttctagaatatccagtctgcttgaatgccatgtatcctattcatcagctgcacattcatactgatccatttggcatgtttatatctaaaaccctgttcaaatgtagtcgattggatgaaaattatggctttactggtttcagcgttcctttcaatatcatgtactgttatcaccattttattctgatccgtttcaatttctatggacgtttagtacataatgtttataaaccttaacttttttactcttttttcttttttgattagctacgatacagtgcagaataatatgttctgcttttttattcaactattcaaatcttattttttattcaactattcaaatcatattttttgattagctgattgcaggagagattaaaatcaaagggattgagctacaggagagttgcagtctgtcgttcttttccatgggtgtgattgagactgaaacgatgggtaccagagtgaaggagtcgaagacagttttagtagagaaagagctcgaactgatcgacgagcctcagattcaagagagccctccagttcgtgcattgttgcatgatgaggtggattttgctgaatcgtcacttgctattagagaatctgacattcccgtgaagaaggtgctgataatcgtgacaatcacttttgtttggccacaacagccatattacttgaagcccatgttttgaaagctgtattggcacttcttctatggagtcactacttatagaaaaagcttgttcctagaggtggtttctcccggcaatgcagaatcttgaagcacgtctaaagtggcttgatgatagttctaaatttcaactccctgtcattaccaggtgccagataggctgctggtcgattccatcctgaacaagttgcgccaaagattacatgaatattgcgtgccgagatctgtcttcagtaatgcgatgccatcctgaacaagttgcagcgacaattaggataggattttcccacgctttttagtcttgtgtattccttttatgctcttcatctttttttctcattatatccaccaattagatagtcatgtagactttcttttaggcgcttttgttttttatactttgtgttaccttgcttttgttttcatactttgtgttaccttacagatgtaaaaacgctcccctcccgtacattgcactatttatgaggaaaggtaaaatagcgtcatttagcttttt

SEQ ID NO: 209192 - DNA, 2211 bp, Zea Mays
cgtgcacagggtggacgttctgcccccgacatcctccccttagctccgctccctgaagccgtgatcgaagccgccatcaacgccctccaccccctccgcgcgcggcagcggcagccggcatttccagcccctaaaatcctatttccctctcccacaccaggcgccgcgcccgtctgattccgcccgccagccacgcccgcagatctcgcttcggcgccctgattccgtcgtatgcaaggtcacagccctgccttccatcgtcgcccccatgccacgctccccttccatcctcgctcacttccagccgcccccattcccagttgaaggagtcgtccaggaaccaggaaccccatcaccggatcaggagcagctgtgtcgcgagcatggtcgttgctgagctcccgatgaccgcccgatggtgtcggaccccgcaccgccgtcggcaccgcgctactcggcgtactcgctgccgtcgacccacctccccggagaggacatcctcttctgcatcgacgtcgacctcgaggtccacgccaagatgaagtccgctgccgtagcgtcctcggatccacgtccaccgcgtcgccgcagtccgtaggagctgatggtgccccgacggtggggagcatcgagccatggctcaagtgcaaggatcagcccccgcagcagggcaaggagatcccgcagaccaaggccgaccgggccaagctcgatggcatgtacaagtgcatcctctgcgcctgctgctccacctcctgcccgtcctactggtggaacccagaggagtacctcggcccagccacgctgttccacgccaacaggtgaacagggcttcagcagggacgctggtttagcaatggaggcgatccattccttgtctgcttcaaaatcaagttatccaatggtaaaatatacagactgtggagttagtcctcaggatctacatcatgtattcacaaagtttgctcatcctcaaagtggaggaaaccgagggtttaatggtagtggtcttggccttgccatatgcaagaggtaaacgagagccctggaaataacaggaattaattcaggaaagtacacgagcaagcacccgaggtcaatgagcttacctccattgacaatggagataggaaggaatatcatgaagagaaatgaaagctgattgcaggagagattaaaatcaaagggattgagctacaggagagttgcagtctgtcgttcttttccatgggtgtgattgagactgaaacgatgggtaccagagtgaaggagtcgaagacagttttagtagagaaagagctcgaactgatcgacgagcctcagattcaagagagccctccagttcgtgcattgttgcatgatgaggtggattttgctgaatcgtcacttgctattagagaatctgacattcccgtgaagaaggtgctgataatcgtgacaatcacttttgtttggccacaacagccatattacttgaagcccatgttttgaaagctgtattggcacttcttctatggttagtggtggaatagcccgaacagtcctatgaaacagcaaaaaatctgttacagtccacttaggtggaagaggtagtttgtagatgattttgttttaatatatgaactgtaatagtaaggttacaataaattttcacataggtgatcaaacttctgtttgtgtaaagccaacagatggtctgacctgacatgtgtttttccaggagtcactacttatagaaaaagcttgttcctagaggtggtttctcccggcaatgcagaatcttgaagcacgtctaaagtggcttgatgatagttctaaatttcaactccctgtcattaccaggtgccagataggctgctggtcgattccatcctgaacaagttgcgccaaagattacatgaatattgcgtgccgagatctgtcttcagtaatgcgatgccatcctgaacaagttgcagcgacaattaggataggattttcccacgctttttagtcttgtgtattccttttatgctcttcatctttttttctcattatatccaccaattagatagtcatgtagactttcttttaggcgcttttgttttttatactttgtgttaccttgcttttgttttcatactttgtgttaccttacagatgtaaaaacgctcccctcccgtacattgcactatttatgaggaaaggtaaaatagcgtcatttagcttttt

SEQ ID NO: 209193 - DNA, 1287 bp, Zea Mays
gcaaagcagataacgcaggaggccaactaccgaggaaagcccagataattacacactagcttcacggtgaaggcagtcggggtcacaattcacaactcccaacccaatccagcccagcaatcaacaattcccccggtcgttttcacttgacatcccccgtcccatagatcgccggcgatggctccggccgttgccgcggcggcgtcggcggcgatgaggcaggcactgcgggaccggcagatcctcgatgccgtgggcactggcgctgcggcgctctcgctggcaggctcctccttcatcgtgatctgctacctcctcttccgcgagctccgcaagttctccttcaagctcgtcttctacctagccgtctcggatatgttttgcagcttattcactatattgggggggccatcgaatgcattttactgctttgcacatgactacagtgctcatttcttctgtgtggcttcttttctatggacaaccaccatatcattcactctgcatcgcacagttgtaaaacacaaaactgatgttgaagaatttggatctattttccacttatatgtgtggggaacttcactatctaccactgtattacgttcgataggaagtgactacggaagaccaggcacctggtgctggattcagcagggaagcatggcaaaggtcctacatttaataaccttttatcttccactttggggtgccattttgtacaatgggtttacatactatgaagtaaaccgcatgctgaataatgcaacgcagatggctgctggcataagtgatcaatcaaatcagtctgacattagggcaggcaggaaggcatttaaccgatggggttattaccctctaattctaatcggttcatgggcgtttgcaactatcaatcgtctttatgactttgccaatccagggcacaggatagtctggctctcgtttcttgatgttgggttcgctggacttatgggcctattcaattccattgcttatgggctaaactcttctgtgcgccgagctattgcagagagaatcgacacgttcctacctgagagaataaaaaggagcctccctgctttgtcaaggctgaggagtcaacaggaaaatgaactcacttctcttatcgttgagggtaactgatatgtaatggaatttccatgcacacgaagccttttttttgtttatctgttcgttcttcaatctccaacaagggaatgcaacatcactgtaagagcagtgggttagtaacacgtcgaattggtccgacgaatctctagaaacgtc

SEQ ID NO: 209194 - DNA, 2868 bp, Zea Mays
cctgccgcaacccccatgccccatccccctccacctgccaaaataaatccatgcgctctccagctcggtgctgcaatcccatcaaaagctagggtttcacgcctctcccgacttcacagttcacattcctctcctccccttcccacctccccaactcggccgccgtagacgcggtggcgcacgaactgccctagatttgagcgagccaccctgcgaatcttcacctgacgcacaaagtctgtcagagacagtgaagaattcgaacacgatcttaaacatcgttgattaagaccacacacaaacacatctacctggcttcccccctatcagttgtttttgtgtgtttttttttgctgtttcggacgattcataagaaccgacctgcaaggcttgcagatctaccttgagaaccagggcccttgttttggacgtccagaacgaacccttgaccctgcggatctgcttgatccgttttggatctgcttgtttttttgctggatctggagagaatgttcaagtcgatggtttattacgtgaacacctcaatcggagaggtggaggtgtggcccaagggcgaggcgagcgcgggcctgaccatggcggcgtgggcgcgagaaatccgcgttgaacgcatttccccgcccagcgagcggtgccctccgctggccgtcatgcacaccgtggccgtcggcgcccgatgcctcgtcatggagtccaggccgcccgttgtcgccgacgttgtgccgcctctcgtcgtcatgcacaccgcttgcctcagggagaacaagactgcggttgttccacttggagatgaagagttgcatttagttgcgatgacatccagaagaaacttgacaaatcatgcatgtttctggggctataaattgccatttggtttgtataattcttgcttgaccatgttaaatcttcggtgcctgggtattgtatttgaccttgatgagacattgattgtcgccaatacatcacggtcttttgaggacagaattgacgcacttcaaagaaagctgagtaatgagactgatccacaacgtaggaatggtatgctatcagagatcaagaggtaccaggatgataagtccatcctaaagcaatatatagaaggtgatcaggtctatgatgatggaaaagtgtataaagcacaacctgagattgttccaccattgtctgataaccagcaaccaatgacacgtccagttataagattacaagataaaaacattatcctgacaagaataaatcctctgattagggataccagtgtgcttgtatgtttaaggccagcctgggaggatcttcgcagctacttaattgccagaggtcgcaagcgttttgaggtctatgtgtgtacgatggctgaaagagactatgctttagaaatgtggagattgcttgatccagattcaagattgattaattctgttcaactccatgatcggatggtgtgtgtaaaatctggtttaaaaaagtccttgctaaatgtcttccatgatggttcttgccatcctggtatggcattagtaattgatgatcgcctgaaagtttgggatgagaaggatcaattacgagttcatgtggttcctgcatttactccatattatgctcctcaggcggaggcaaattgttctatcccagttctgtgtgtagccagaaacgttgcatgcaatgttaggggtggtttcttcaaagactttgatgaaggcctcttaccaaggattagcaatgttcactatgaggatgaagtaaatgagatatctgcgccagatgttggcaattatttgataacagatgatgaaaatgtcgcattagtgaatgggaatagagattcattgccttttgatggtatggcagatgcagaggttgagcggagaatgaaggaagccaatgctcaatcattccatcaaacagcgggagactttgtcatgccagtagcccctgcccagaatttcgtttcgacttcagttgcatcattagccccacctcttggcatgatgccatctccatttagccagccagttgctccaccaggtttttcagattcactgcaaggttctccagctagagaagagggtgaagttccagagtctgagttggatccggacacaaggagaaggcttcttatattacagcatggccaagacacaagagatcctacatctccactaccagcaataccacccgtccaagttccagttcctccagtgcaaccccatgggaattggtttcccacagaggatgggataaaccaaagtaacctgaatagaggctcagcaggattcactgtagaatctgattctattgtctatgagaaaaagcaaccacctcatccttcattctttcatggtggggatagtcctatgccgtctgatagatttggctatcagaaccagaggtttccctctcagctaccacacgaggatcaccccatgatgcagaaccatgcacctccaaaatacagatccttttctggtgaggaactagcatcttggcatgttccctcaagccagagaaacaaccagatagaatcaggaagacactttgcacaatatgctgggacctctgctggcatattagaggggattgctctgaaatgtggttctaaggtggagtacaagtcagcattatgtgatactgcagaactacaattctctattgaggtttggattgttggggaaaaggtcggtgaaggaattggtaggacaaggagagaagcacaacgccaagctgcagaaatgtctttaagaaacttggccagatctttccaccaggaacatgatcgtcaggtcgaagtcgaatagcaccggtcctctgtacacgttgcggctgcctggatctctcacccgctgtcgt

SEQ ID NO: 209195 - DNA, 4058 bp, Zea Mays
cctgccgcaacccccatgccccatccccctccacctgccaaaataaatccatgcgctctccagctcggtgctgcaatcccatcaaaagctagggtttcacgcctctcccgacttcacagttcacattcctctcctccccttcccacctccccaactcggccgccgtagacgcggtggcgcacgaactgccctagatttgagcgagccaccctgcgaatcttcacctgacgcacaaagtctgtcagagacagtgaagaattcgaacacgatcttaaacatcgttgattaagaccacacacaaacacatctacctggcttcccccctatcagttgtttttgtgtgtttttttttgctgtttcggacgattcataagaaccgacctgcaaggcttgcagatctaccttgagaaccagggcccttgttttggacgtccagaacgaacccttgaccctgcggatctgcttgatccgttttggatctgcttgtttttttgctggatctggagagaatgttcaagtcgatggtttattacgtgaacacctcaatcggagaggtggaggtgtggcccaagggcgaggcgagcgcgggcctgaccatggcggcgtgggcgcgagaaatccgcgttgaacgcatttccccgcccagcgagcggtgccctccgctggccgtcatgcacaccgtggccgtcggcgcccgatgcctcgtcatggagtccaggccgcccgttgtcgccgacgttgtgccgcctctcgtcgtcatgcacaccgcttgcctcagggagaacaagactgcggttgttccacttggagatgaagagttgcatttagttgcgatgacatccagaagaaacttgacaaatcatgcatgtttctggggctataaattgccatttggtttgtataattcttgcttgaccatgttaaatcttcggtgcctgggtattgtatttgaccttgatgagacattgattgtcgccaatacatcacggtcttttgaggacagaattgacgcacttcaaagaaagctgagtaatgagactgatccacaacgtaggaatggtatgctatcagagatcaagaggtaccaggatgataagtccatcctaaagcaatatatagaaggtgatcaggtctatgatgatggaaaagtgtataaagcacaacctgagattgttccaccattgtctgataaccagcaaccaatgacacgtccagttataagattacaagataaaaacattatcctgacaagaataaatcctctgattagggataccagtgtgcttgtatgtttaaggccagcctgggaggatcttcgcagctacttaattgccagaggtcgcaagcgttttgaggtctatgtgtgtacgatggctgaaagagactatgctttagaaatgtggagattgcttgatccagattcaagattgattaattctgttcaactccatgatcggatggtgtgtgtaaaatctggtttaaaaaagtccttgctaaatgtcttccatgatggttcttgccatcctggtatggcattagtaattgatgatcgcctgaaagtttgggatgagaaggatcaattacgagttcatgtggttcctgcatttactccatattatgctcctcaggcggaggcaaattgttctatcccagttctgtgtgtagccagaaacgttgcatgcaatgttaggggtggtttcttcaaagactttgatgaaggcctcttaccaaggattagcaatgttcactatgaggatgaagtaaatgagatatctgcgccagatgttggcaattatttgataacagatgatgaaaatgtcgcattagtgaatgggaatagagattcattgccttttgatggtatggcagatgcagaggttgagcggagaatgaaggaagccaatgctcaatcattccatcaaacagcgggagactttgtcatgccagtagcccctgcccagaatttcgtttcgacttcagttgcatcattagccccacctcttggcatgatgccatctccatttagccagccagttgctccaccaggtttttcagattcactgcaaggttctccagctagagaagagggtgaagttccagagtctgagttggatccggacacaaggagaaggcttcttatattacagcatggccaagacacaagagatcctacatctccactaccagcaataccacccgtccaagttccagttcctccagtgcaaccccatgggaattggtttcccacagaggatgggataaaccaaagtaacctgaatagaggctcagcaggattcactgtagaatctgattctattgtctatgagaaaaagcaaccacctcatccttcattctttcatggtggggatagtcctatgccgtctgatagatttggctatcagaaccagaggtttccctctcagctaccacacgaggatcaccccatgatgcagaaccatgcacctccaaaatacagatccttttctggtgaggaactagcatcttggcatgttccctcaagccagagaaacaaccagatagaatcaggaagacactttgcacaatatgctgggacctctgctggcatattagaggggattgctctgaaatgtggttctaaggtggagtacaagtcagcattatgtgatactgcagaactacaattctctattgaggtttggattgttggggaaaaggtcggtgaaggaattggtaggacaaggagagaagcacaacgccaagctgcagaaatgtctttaagaaacttggccaataaatacttgtcatctgatccaaataagttgtctgatatgaaagaaaatgatttcagtagcaacagaaatgtctttggttactctggaaatacgagggatgatatgttgccactttcaagtacttccgaggaatctcgctttatgaaaatggagaacaataattcccggaaaacaggaagttctgttgctgctctcaaagaactttgcactgttgagggatataacttagtttttcaagcctgtccatcttcagcagatggtttagttgggaaagaatcttatgctcaggtacaagttggtggacaaattctaggcaaaggagttgggttaacatgggaagaggccaagctccaggtcattggcaccaaattttaacaagcggttcaagccagattttccaaggaccgtacaaagagttccttacggaacatattctaggatcgaaggtcatgttccttaagaggtctgcataaatgatgtgcctgggcgctaaacttcaaaactggatgaagctttgaactgtcaggtcttcacacattgaatgcaagccgtagattcctggcttatagttggcttccaaggctctcacaagctgccactggctgagagtaccgacgaatataaaatacgtacttcatttaagtaagcgccaagagattgaaggattaatggtggccataactttatgcagaatttcattgccatgatcttaccagtcacaagtgttaccccatgttgtcaacttggcataatcgttgacctggaagtttaacggttgaaccagggaccggcatgcagctccatttcttttttggtgtgtgtccatggatcaaagagcagcgccgtggttgggcatttttacccttcctttggtttaggtgaaagttggacctctgtagctcggagtcttagcaggtagccagtttttatttctgataagtttttaggcaagttgtaagttgtagcacaaaatcgatcacttgatagtattaacattgcattgatgtagacatgtagtcatctttgtagctgtactctaggcaagcaacacgaatccagtggcttacatcattcatttgtatgctgtagtcatcttgtaatatatggcccatttctttgcaaggctggaaatttgcctctctaagggccagtttaagagtccaaaaaccggagggaactggaggggttaaaacccactttttttattcaagggtattagcttctccaatctcctccgatttttggacttctaaactgtggctagtttggaaactctattcttcc

SEQ ID NO: 209196 - DNA, 4144 bp, Zea Mays
cctgccgcaacccccatgccccatccccctccacctgccaaaataaatccatgcgctctccagctcggtgctgcaatcccatcaaaagctagggtttcacgcctctcccgacttcacagttcacattcctctcctccccttcccacctccccaactcggccgccgtagacgcggtggcgcacgaactgccctagatttgagcgagccaccctgcgaatcttcacctgacgcacaaagtctgtcagagacagtgaagaattcgaacacgatcttaaacatcgttgattaagaccacacacaaacacatctacctggcttcccccctatcagttgtttttgtgtgtttttttttgctgtttcggacgattcataagaaccgacctgcaaggcttgcagatctaccttgagaaccagggcccttgttttggacgtccagaacgaacccttgaccctgcggatctgcttgatccgttttggatctgcttgtttttttgctggatctggagagaatgttcaagtcgatggtttattacgtgaacacctcaatcggagaggtggaggtgtggcccaagggcgaggcgagcgcgggcctgaccatggcggcgtgggcgcgagaaatccgcgttgaacgcatttccccgcccagcgagcggtgccctccgctggccgtcatgcacaccgtggccgtcggcgcccgatgcctcgtcatggagtccaggccgcccgttgtcgccgacgttgtgccgcctctcgtcgtcatgcacaccgcttgcctcagggagaacaagactgcggttgttccacttggagatgaagagttgcatttagttgcgatgacatccagaagaaacttgacaaatcatgcatgtttctggggctataaattgccatttggtttgtataattcttgcttgaccatgttaaatcttcggtgcctgggtattgtatttgaccttgatgagacattgattgtcgccaatacatcacggtcttttgaggacagaattgacgcacttcaaagaaagctgagtaatgagactgatccacaacgtaggaatggtatgctatcagagatcaagaggtaccaggatgataagtccatcctaaagcaatatatagaaggtgatcaggtctatgatgatggaaaagtgtataaagcacaacctgagattgttccaccattgtctgataaccagcaaccaatgacacgtccagttataagattacaagataaaaacattatcctgacaagaataaatcctctgattagggataccagtgtgcttgtatgtttaaggccagcctgggaggatcttcgcagctacttaattgccagaggtcgcaagcgttttgaggtctatgtgtgtacgatggctgaaagagactatgctttagaaatgtggagattgcttgatccagattcaagattgattaattctgttcaactccatgatcggatggtgtgtgtaaaatctggtttaaaaaagtccttgctaaatgtcttccatgatggttcttgccatcctggtatggcattagtaattgatgatcgcctgaaagtttgggatgagaaggatcaattacgagttcatgtggttcctgcatttactccatattatgctcctcaggcggaggcaaattgttctatcccagttctgtgtgtagccagaaacgttgcatgcaatgttaggggtggtttcttcaaagactttgatgaaggcctcttaccaaggattagcaatgttcactatgaggatgaagtaaatgagatatctgcgccagatgttggcaattatttgataacagatgatgaaaatgtcgcattagtgaatgggaatagagattcattgccttttgatggtatggcagatgcagaggttgagcggagaatgaaggaagccaatgctcaatcattccatcaaacagcgggagactttgtcatgccagtagcccctgcccagaatttcgtttcgacttcagttgcatcattagccccacctcttggcatgatgccatctccatttagccagccagttgctccaccaggtttttcagattcactgcaaggttctccagctagagaagagggtgaagttccagagtctgagttggatccggacacaaggagaaggcttcttatattacagcatggccaagacacaagagatcctacatctccactaccagcaataccacccgtccaagttccagttcctccagtgcaaccccatgggaattggtttcccacagaggatgggataaaccaaagtaacctgaatagaggctcagcaggattcactgtagaatctgattctattgtctatgagaaaaagcaaccacctcatccttcattctttcatggtggggatagtcctatgccgtctgatagatttggctatcagaaccagaggtttccctctcagctaccacacgaggatcaccccatgatgcagaaccatgcacctccaaaatacagatccttttctggtgaggaactagcatcttggcatgttccctcaagccagagaaacaaccagatagaatcaggaagacactttgcacaatatgctgggacctctgctggcatattagaggggattgctctgaaatgtggttctaaggtggagtacaagtcagcattatgtgatactgcagaactacaattctctattgaggtttggattgttggggaaaaggtcggtgaaggaattggtaggacaaggagagaagcacaacgccaagctgcagaaatgtctttaagaaacttggccaatttacttgcagataaatacttgtcatctgatccaaataagttgtctgatatgaaagaaaatgatttcagtagcaacagaaatgtctttggttactctggaaatacgagggatgatatgttgccactttcaagtacttccgaggaatctcgctttatgaaaatggagaacaataattcccggaaaacaggaagttctgttgctgctctcaaagaactttgcactgttgagggatataacttagtttttcaagcctgtccatcttcagcagatggtttagttgggaaagaatcttatgctcaggtacaagttggtggacaaattctaggcaaaggagttgggttaacatgggaagaggccaagctccaggctgctgctgaggctcttggaactttaagatccatgctaggtcaacttggtcataaacgatctggctctccaaggtcattggcaccaaattttaacaagcggttcaagccagattttccaaggaccgtacaaagagttccttacggaacatattctaggatcgaaggtcatgttccttaagaggtctgcataaatgatgtgcctgggcgctaaacttcaaaactggatgaagctttgaactgtcaggtcttcacacattgaatgcaagccgtagattcctggcttatagttggcttccaaggctctcacaagctgccactggctgagagtaccgacgaatataaaatacgtacttcatttaagtaagcgccaagagattgaaggattaatggtggccataactttatgcagaatttcattgccatgatcttaccagtcacaagtgttaccccatgttgtcaacttggcataatcgttgacctggaagtttaacggttgaaccagggaccggcatgcagctccatttcttttttggtgtgtgtccatggatcaaagagcagcgccgtggttgggcatttttacccttcctttggtttaggtgaaagttggacctctgtagctcggagtcttagcaggtagccagtttttatttctgataagtttttaggcaagttgtaagttgtagcacaaaatcgatcacttgatagtattaacattgcattgatgtagacatgtagtcatctttgtagctgtactctaggcaagcaacacgaatccagtggcttacatcattcatttgtatgctgtagtcatcttgtaatatatggcccatttctttgcaaggctggaaatttgcctctctaagggccagtttaagagtccaaaaaccggagggaactggaggggttaaaacccactttttttattcaagggtattagcttctccaatctcctccgatttttggacttctaaactgtggctagtttggaaactctattcttcc

SEQ ID NO: 209197 - DNA, 4137 bp, Zea Mays
cctgccgcaacccccatgccccatccccctccacctgccaaaataaatccatgcgctctccagctcggtgctgcaatcccatcaaaagctagggtttcacgcctctcccgacttcacagttcacattcctctcctccccttcccacctccccaactcggccgccgtagacgcggtggcgcacgaactgccctagatttgagcgagccaccctgcgaatcttcacctgacgcacaaagtctgtcagagacagtgaagaattcgaacacgatcttaaacatcgttgattaagaccacacacaaacacatctacctggcttcccccctatcagttgtttttgtgtgtttttttttgctgtttcggacgattcataagaaccgacctgcaaggcttgcagatctaccttgagaaccagggcccttgttttggacgtccagaacgaacccttgaccctgcggatctgcttgatccgttttggatctgcttgtttttttgctggatctggagagaatgttcaagtcgatggtttattacgtgaacacctcaatcggagaggtggaggtgtggcccaagggcgaggcgagcgcgggcctgaccatggcggcgtgggcgcgagaaatccgcgttgaacgcatttccccgcccagcgagcggtgccctccgctggccgtcatgcacaccgtggccgtcggcgcccgatgcctcgtcatggagtccaggccgcccgttgtcgccgacgttgtgccgcctctcgtcgtcatgcacaccgcttgcctcagggagaacaagactgcggttgttccacttggagatgaagagttgcatttagttgcgatgacatccagaagaaacttgacaaatcatgcatgtttctggggctataaattgccatttggtttgtataattcttgcttgaccatgttaaatcttcggtgcctgggtattgtatttgaccttgatgagacattgattgtcgccaatacatcacggtcttttgaggacagaattgacgcacttcaaagaaagctgagtaatgagactgatccacaacgtaggaatggtatgctatcagagatcaagaggtaccaggatgataagtccatcctaaagcaatatatagaaggtgatcaggtctatgatgatggaaaagtgtataaagcacaacctgagattgttccaccattgtctgataaccagcaaccaatgacacgtccagttataagattacaagataaaaacattatcctgacaagaataaatcctctgattagggataccagtgtgcttgtatgtttaaggccagcctgggaggatcttcgcagctacttaattgccagaggtcgcaagcgttttgaggtctatgtgtgtacgatggctgaaagagactatgctttagaaatgtggagattgcttgatccagattcaagattgattaattctgttcaactccatgatcggatggtgtgtgtaaaatctggtttaaaaaagtccttgctaaatgtcttccatgatggttcttgccatcctggtatggcattagtaattgatgatcgcctgaaagtttgggatgagaaggatcaattacgagttcatgtggttcctgcatttactccatattatgctcctcaggcggaggcaaattgttctatcccagttctgtgtgtagccagaaacgttgcatgcaatgttaggggtggtttcttcaaagactttgatgaaggcctcttaccaaggattagcaatgttcactatgaggatgaagtaaatgagatatctgcgccagatgttggcaattatttgataacagatgatgaaaatgtcgcattagtgaatgggaatagagattcattgccttttgatggtatggcagatgcagaggttgagcggagaatgaaggaagccaatgctcaatcattccatcaaacagcgggagactttgtcatgccagtagcccctgcccagaatttcgtttcgacttcagttgcatcattagccccacctcttggcatgatgccatctccatttagccagccagttgctccaccaggtttttcagattcactgcaaggttctccagctagagaagagggtgaagttccagagtctgagttggatccggacacaaggagaaggcttcttatattacagcatggccaagacacaagagatcctacatctccactaccagcaataccacccgtccaagttccagttcctccagtgcaaccccatgggaattggtttcccacagaggatgggataaaccaaagtaacctgaatagaggctcagcaggattcactgtagaatctgattctattgtctatgagaaaaagcaaccacctcatccttcattctttcatggtggggatagtcctatgccgtctgatagatttggctatcagaaccagaggtttccctctcagctaccacacgaggatcaccccatgatgcagaaccatgcacctccaaaatacagatccttttctggtgaggaactagcatcttggcatgttccctcaagccagagaaacaaccagatagaatcaggaagacactttgcacaatatgctgggacctctgctggcatattagaggggattgctctgaaatgtggttctaaggtggagtacaagtcagcattatgtgatactgcagaactacaattctctattgaggtttggattgttggggaaaaggtcggtgaaggaattggtaggacaaggagagaagcacaacgccaagctgcagaaatgtctttaagaaacttggccaataaatacttgtcatctgatccaaataagttgtctgatatgaaagaaaatgatttcagtagcaacagaaatgtctttggttactctggaaatacgagggatgatatgttgccactttcaagtacttccgaggaatctcgctttatgaaaatggagaacaataattcccggaaaacaggaaaccttatgatacatgtaaaaacacaccgcagtgcactgttgagggatataacttagtttttcaagcctgtccatcttcagcagatggtttagttgggaaagaatcttatgctcaggtacaagttggtggacaaattctaggcaaaggagttgggttaacatgggaagaggccaagctccaggctgctgctgaggctcttggaactttaagatccatgctaggtcaacttggtcataaacgatctggctctccaaggtcattggcaccaaattttaacaagcggttcaagccagattttccaaggaccgtacaaagagttccttacggaacatattctaggatcgaaggtcatgttccttaagaggtctgcataaatgatgtgcctgggcgctaaacttcaaaactggatgaagctttgaactgtcaggtcttcacacattgaatgcaagccgtagattcctggcttatagttggcttccaaggctctcacaagctgccactggctgagagtaccgacgaatataaaatacgtacttcatttaagtaagcgccaagagattgaaggattaatggtggccataactttatgcagaatttcattgccatgatcttaccagtcacaagtgttaccccatgttgtcaacttggcataatcgttgacctggaagtttaacggttgaaccagggaccggcatgcagctccatttcttttttggtgtgtgtccatggatcaaagagcagcgccgtggttgggcatttttacccttcctttggtttaggtgaaagttggacctctgtagctcggagtcttagcaggtagccagtttttatttctgataagtttttaggcaagttgtaagttgtagcacaaaatcgatcacttgatagtattaacattgcattgatgtagacatgtagtcatctttgtagctgtactctaggcaagcaacacgaatccagtggcttacatcattcatttgtatgctgtagtcatcttgtaatatatggcccatttctttgcaaggctggaaatttgcctctctaagggccagtttaagagtccaaaaaccggagggaactggaggggttaaaacccactttttttattcaagggtattagcttctccaatctcctccgatttttggacttctaaactgtggctagtttggaaactctattcttcc

SEQ ID NO: 209198 - DNA, 3990 bp, Zea Mays
cctgccgcaacccccatgccccatccccctccacctgccaaaataaatccatgcgctctccagctcggtgctgcaatcccatcaaaagctagggtttcacgcctctcccgacttcacagttcacattcctctcctccccttcccacctccccaactcggccgccgtagacgcggtggcgcacgaactgccctagatttgagcgagccaccctgcgaatcttcacctgacgcacaaagtctgtcagagacagtgaagaattcgaacacgatcttaaacatcgttgattaagaccacacacaaacacatctacctggcttcccccctatcagttgtttttgtgtgtttttttttgctgtttcggacgattcataagaaccgacctgcaaggcttgcagatctaccttgagaaccagggcccttgttttggacgtccagaacgaacccttgaccctgcggatctgcttgatccgttttggatctgcttgtttttttgctggatctggagagaatgttcaagtcgatggtttattacgtgaacacctcaatcggagaggtggaggtgtggcccaagggcgaggcgagcgcgggcctgaccatggcggcgtgggcgcgagaaatccgcgttgaacgcatttccccgcccagcgagcggtgccctccgctggccgtcatgcacaccgtggccgtcggcgcccgatgcctcgtcatggagtccaggccgcccgttgtcgccgacgttgtgccgcctctcgtcgtcatgcacaccgcttgcctcagggagaacaagactgcggttgttccacttggagatgaagagttgcatttagttgcgatgacatccagaagaaacttgacaaatcatgcatgtttctggggctataaattgccatttggtttgtataattcttgcttgaccatgttaaatcttcggtgcctgggtattgtatttgaccttgatgagacattgattgtcgccaatacatcacggtcttttgaggacagaattgacgcacttcaaagaaagctgagtaatgagactgatccacaacgtaggaatggtatgctatcagagatcaagaggtaccaggatgataagtccatcctaaagcaatatatagaaggtgatcaggtctatgatgatggaaaagtgtataaagcacaacctgagattgttccaccattgtctgataaccagcaaccaatgacacgtccagttataagattacaagataaaaacattatcctgacaagaataaatcctctgattagggataccagtgtgcttgtatgtttaaggccagcctgggaggatcttcgcagctacttaattgccagaggtcgcaagcgttttgaggtctatgtgtgtacgatggctgaaagagactatgctttagaaatgtggagattgcttgatccagattcaagattgattaattctgttcaactccatgatcggatggtgtgtgtaaaatctggtttaaaaaagtccttgctaaatgtcttccatgatggttcttgccatcctggtatggcattagtaattgatgatcgcctgaaagtttgggatgagaaggatcaattacgagttcatgtggttcctgcatttactccatattatgctcctcaggcggaggcaaattgttctatcccagttctgtgtgtagccagaaacgttgcatgcaatgttaggggtggtttcttcaaagactttgatgaaggcctcttaccaaggattagcaatgttcactatgaggatgaagtaaatgagatatctgcgccagatgttggcaattatttgataacagatgatgaaaatgtcgcattagtgaatgggaatagagattcattgccttttgatggtatggcagatgcagaggttgagcggagaatgaaggaagccaatgctcaatcattccatcaaacagcgggagactttgtcatgccagtagcccctgcccagaatttcgtttcgacttcagttgcatcattagccccacctcttggcatgatgccatctccatttagccagccagttgctccaccaggtttttcagattcactgcaaggttctccagctagagaagagggtgaagttccagagtctgagttggatccggacacaaggagaaggcttcttatattacagcatggccaagacacaagagatcctacatctccactaccagcaataccacccgtccaagttccagttcctccagtgcaaccccatgggaattggtttcccacagaggatgggataaaccaaagtaacctgaatagaggctcagcaggattcactgtagaatctgattctattgtctatgagaaaaagcaaccacctcatccttcattctttcatggtggggatagtcctatgccgtctgatagatttggctatcagaaccagaggtttccctctcagctaccacacgaggatcaccccatgatgcagaaccatgcacctccaaaatacagatccttttctggtgaggaactagcatcttggcatgttccctcaagccagagaaacaaccagatagaatcaggaagacactttgcacaatatgctgggacctctgctggcatattagaggggattgctctgaaatgtggttctaaggtggagtacaagtcagcattatgtgatactgcagaactacaattctctattgaggtttggattgttggggaaaaggtcggtgaaggaattggtaggacaaggagagaagcacaacgccaagctgcagaaatgtctttaagaaacttggccatagcaacagaaatgtctttggttactctggaaatacgagggatgatatgttgccactttcaagtacttccgaggaatctcgctttatgaaaatggagaacaataattcccggaaaacaggaagttctgttgctgctctcaaagaacttgtacaagttggtggacaaattctaggcaaaggagttgggttaacatgggaagaggccaagctccaggctgctgctgaggctcttggaactttaagatccatgctaggtcaacttggtcataaacgatctggctctccaaggtcattggcaccaaattttaacaagcggttcaagccagattttccaaggaccgtacaaagagttccttacggaacatattctaggatcgaaggtcatgttccttaagaggtctgcataaatgatgtgcctgggcgctaaacttcaaaactggatgaagctttgaactgtcaggtcttcacacattgaatgcaagccgtagattcctggcttatagttggcttccaaggctctcacaagctgccactggctgagagtaccgacgaatataaaatacgtacttcatttaagtaagcgccaagagattgaaggattaatggtggccataactttatgcagaatttcattgccatgatcttaccagtcacaagtgttaccccatgttgtcaacttggcataatcgttgacctggaagtttaacggttgaaccagggaccggcatgcagctccatttcttttttggtgtgtgtccatggatcaaagagcagcgccgtggttgggcatttttacccttcctttggtttaggtgaaagttggacctctgtagctcggagtcttagcaggtagccagtttttatttctgataagtttttaggcaagttgtaagttgtagcacaaaatcgatcacttgatagtattaacattgcattgatgtagacatgtagtcatctttgtagctgtactctaggcaagcaacacgaatccagtggcttacatcattcatttgtatgctgtagtcatcttgtaatatatggcccatttctttgcaaggctggaaatttgcctctctaagggccagtttaagagtccaaaaaccggagggaactggaggggttaaaacccactttttttattcaagggtattagcttctccaatctcctccgatttttggacttctaaactgtggctagtttggaaactctattcttcc

SEQ ID NO: 209199 - DNA, 4087 bp, Zea Mays
cctgccgcaacccccatgccccatccccctccacctgccaaaataaatccatgcgctctccagctcggtgctgcaatcccatcaaaagctagggtttcacgcctctcccgacttcacagttcacattcctctcctccccttcccacctccccaactcggccgccgtagacgcggtggcgcacgaactgccctagatttgagcgagccaccctgcgaatcttcacctgacgcacaaagtctgtcagagacagtgaagaattcgaacacgatcttaaacatcgttgattaagaccacacacaaacacatctacctggcttcccccctatcagttgtttttgtgtgtttttttttgctgtttcggacgattcataagaaccgacctgcaaggcttgcagatctaccttgagaaccagggcccttgttttggacgtccagaacgaacccttgaccctgcggatctgcttgatccgttttggatctgcttgtttttttgctggatctggagagaatgttcaagtcgatggtttattacgtgaacacctcaatcggagaggtggaggtgtggcccaagggcgaggcgagcgcgggcctgaccatggcggcgtgggcgcgagaaatccgcgttgaacgcatttccccgcccagcgagcggtgccctccgctggccgtcatgcacaccgtggccgtcggcgcccgatgcctcgtcatggagtccaggccgcccgttgtcgccgacgttgtgccgcctctcgtcgtcatgcacaccgcttgcctcagggagaacaagactgcggttgttccacttggagatgaagagttgcatttagttgcgatgacatccagaagaaacttgacaaatcatgcatgtttctggggctataaattgccatttggtttgtataattcttgcttgaccatgttaaatcttcggtgcctgggtattgtatttgaccttgatgagacattgattgtcgccaatacatcacggtcttttgaggacagaattgacgcacttcaaagaaagctgagtaatgagactgatccacaacgtaggaatggtatgctatcagagatcaagaggtaccaggatgataagtccatcctaaagcaatatatagaaggtgatcaggtctatgatgatggaaaagtgtataaagcacaacctgagattgttccaccattgtctgataaccagcaaccaatgacacgtccagttataagattacaagataaaaacattatcctgacaagaataaatcctctgattagggataccagtgtgcttgtatgtttaaggccagcctgggaggatcttcgcagctacttaattgccagaggtcgcaagcgttttgaggtctatgtgtgtacgatggctgaaagagactatgctttagaaatgtggagattgcttgatccagattcaagattgattaattctgttcaactccatgatcggatggtgtgtgtaaaatctggtttaaaaaagtccttgctaaatgtcttccatgatggttcttgccatcctggtatggcattagtaattgatgatcgcctgaaagtttgggatgagaaggatcaattacgagttcatgtggttcctgcatttactccatattatgctcctcaggcggaggcaaattgttctatcccagttctgtgtgtagccagaaacgttgcatgcaatgttaggggtggtttcttcaaagactttgatgaaggcctcttaccaaggattagcaatgttcactatgaggatgaagtaaatgagatatctgcgccagatgttggcaattatttgataacagatgatgaaaatgtcgcattagtgaatgggaatagagattcattgccttttgatggtatggcagatgcagaggttgagcggagaatgaaggaagccaatgctcaatcattccatcaaacagcgggagactttgtcatgccagtagcccctgcccagaatttcgtttcgacttcagttgcatcattagccccacctcttggcatgatgccatctccatttagccagccagttgctccaccaggtttttcagattcactgcaaggttctccagctagagaagagggtgaagttccagagtctgagttggatccggacacaaggagaaggcttcttatattacagcatggccaagacacaagagatcctacatctccactaccagcaataccacccgtccaagttccagttcctccagtgcaaccccatgggaattggtttcccacagaggatgggataaaccaaagtaacctgaatagaggctcagcaggattcactgtagaatctgattctattgtctatgagaaaaagcaaccacctcatccttcattctttcatggtggggatagtcctatgccgtctgatagatttggctatcagaaccagaggtttccctctcagctaccacacgaggatcaccccatgatgcagaaccatgcacctccaaaatacagatccttttctggtgaggaactagcatcttggcatgttccctcaagccagagaaacaaccagatagaatcaggaagacactttgcacaatatgctgggacctctgctggcatattagaggggattgctctgaaatgtggttctaaggtggagtacaagtcagcattatgtgatactgcagaactacaattctctattgaggtttggattgttggggaaaaggtcggtgaaggaattggtaggacaaggagagaagcacaacgccaagctgcagaaatgtctttaagaaacttggccaaaaatgatttcagtagcaacagaaatgtctttggttactctggaaatacgagggatgatatgttgccactttcaagtacttccgaggaatctcgctttatgaaaatggagaacaataattcccggaaaacaggaagttctgttgctgctctcaaagaactttgcactgttgagggatataacttagtttttcaagcctgtccatcttcagcagatggtttagttgggaaagaatcttatgctcaggtacaagttggtggacaaattctaggcaaaggagttgggttaacatgggaagaggccaagctccaggctgctgctgaggctcttggaactttaagatccatgctaggtcaacttggtcataaacgatctggctctccaaggtcattggcaccaaattttaacaagcggttcaagccagattttccaaggaccgtacaaagagttccttacggaacatattctaggatcgaaggtcatgttccttaagaggtctgcataaatgatgtgcctgggcgctaaacttcaaaactggatgaagctttgaactgtcaggtcttcacacattgaatgcaagccgtagattcctggcttatagttggcttccaaggctctcacaagctgccactggctgagagtaccgacgaatataaaatacgtacttcatttaagtaagcgccaagagattgaaggattaatggtggccataactttatgcagaatttcattgccatgatcttaccagtcacaagtgttaccccatgttgtcaacttggcataatcgttgacctggaagtttaacggttgaaccagggaccggcatgcagctccatttcttttttggtgtgtgtccatggatcaaagagcagcgccgtggttgggcatttttacccttcctttggtttaggtgaaagttggacctctgtagctcggagtcttagcaggtagccagtttttatttctgataagtttttaggcaagttgtaagttgtagcacaaaatcgatcacttgatagtattaacattgcattgatgtagacatgtagtcatctttgtagctgtactctaggcaagcaacacgaatccagtggcttacatcattcatttgtatgctgtagtcatcttgtaatatatggcccatttctttgcaaggctggaaatttgcctctctaagggccagtttaagagtccaaaaaccggagggaactggaggggttaaaacccactttttttattcaagggtattagcttctccaatctcctccgatttttggacttctaaactgtggctagtttggaaactctattcttcc

SEQ ID NO: 209200 - DNA, 1731 bp, Zea Mays
gtttttgcaacacacgattcagcttactggtccttctggcttcgtagaatatttttgcacaaacctgtgcgttattggtgaataaggtgaggaactagcatcttggcatgttccctcaagccagagaaacaaccagatagaatcaggaagacactttgcacaatatgctgggacctctgctggcatattagaggggattgctctgaaatgtggttctaaggtggagtacaagtcagcattatgtgatactgcagaactacaattctctattgaggtttggattgttggggaaaaggtcggtgaaggaattggtaggacaaggagagaagcacaacgccaagctgcagaaatgtctttaagaaacttggccaataaatacttgtcatctgatccaaataagttgtctgatatgaaagaaaatgatttcagtagcaacagaaatgtctttggttactctggaaatacgagggatgatatgttgccactttcaagtacttccgaggaatctcgctttatgaaaatggagaacaataattcccggaaaacaggaagttctgttgctgctctcaaagaactttgcactgttgagggatataacttagtttttcaagcctgtccatcttcagcagatggtttagttgggaaagaatcttatgctcaggtacaagttggtggacaaattctaggcaaaggagttgggttaacatgggaagaggccaagctccaggctgctgctgaggctcttggaactttaagatccatgctaggtcaacttggtcataaacgatctggctctccaaggtcattggcaccaaattttaacaagcggttcaagccagattttccaaggaccgtacaaagagttccttacggaacatattctaggatcgaaggtcatgttccttaagaggtctgcataaatgatgtgcctgggcgctaaacttcaaaactggatgaagctttgaactgtcaggtcttcacacattgaatgcaagccgtagattcctggcttatagttggcttccaaggctctcacaagctgccactggctgagagtaccgacgaatataaaatacgtacttcatttaagtaagcgccaagagattgaaggattaatggtggccataactttatgcagaatttcattgccatgatcttaccagtcacaagtgttaccccatgttgtcaacttggcataatcgttgacctggaagtttaacggttgaaccagggaccggcatgcagctccatttcttttttggtgtgtgtccatggatcaaagagcagcgccgtggttgggcatttttacccttcctttggtttaggtgaaagttggacctctgtagctcggagtcttagcaggtagccagtttttatttctgataagtttttaggcaagttgtaagttgtagcacaaaatcgatcacttgatagtattaacattgcattgatgtagacatgtagtcatctttgtagctgtactctaggcaagcaacacgaatccagtggcttacatcattcatttgtatgctgtagtcatcttgtaatatatggcccatttctttgcaaggctggaaatttgcctctctaagggccagtttaagagtccaaaaaccggagggaactggaggggttaaaacccactttttttattcaagggtattagcttctccaatctcctccgatttttggacttctaaactgtggctagtttggaaactctattcttcc

SEQ ID NO: 209201 - DNA, 1269 bp, Zea Mays
tttggcctagcccatattacatagcaaagaacaaattctaacaccataaacccacgcctaacgaacctaatttcacactgttggctgccccttatagcattgatggcttcctaagctgtgcctcgaggccccttccaagtctcatagactgtagcaccactgacggctagcccttccaagctctagtgctcctaactgaggctcgcatgtccataataattttttattaagttttaattgtgtatgatggtgaattgagaagaaatttaattaattatgctattaaattattgaataaatgattgtgtctgtcatatccgacggatatccgaaacccgtccgaaatccgatgggcacgggcatggatataaatttctacccgcgggtacggtcgcgagcggatataggtagcaaccgcggatatggttgcggacggatatttgcaatatccgatccgaatccgatccgttgccatccctattctcgtgtcgacgcgtgcccactacgagccgtgaggattagtgtggatatcttcgtcccttgcatttcgctggctcctccatggattcttttggccgtggactccgaccccgacgcctacattggtgaatctgttggcatggaatctggtggcacgactgcagctttcatggattcttcttttggcaccgagactctcatgttgactgccatggactctcatgtggggcgaaatgatgcgagacaatgagatggtacaagcaacatctaggttagattgggattctatggttctccgtgatgtttgggaggaggaatggggacatgatgtttgagatgcagatgtattctcaacttggacttgctgaagaggacaatgctgaggaaagtagaagagaggaagcctttagaggtgttacaagggattttgaacaatctgagcatgttatgtttttggaagagagccttatagaccaagcatgcgaagactacctaccagatgagaagagtgttatgtatgataaaacaaatccatcaatgcaacctggtattttgtttcctaacatgaaggaacttcgaattgctatgaaagaggtcctaacatgaagctatttagtggccaagttctatggaggctggtttgaaccctcttgatatcctgaagggcttgaataatttggaaacatcaaaatgggtgtcttgaataatggagtatcgtcgtttgcaaattagtgtggttcagattgttaagcatgaggtccaactttggatcatggccgttgccaaagt

SEQ ID NO: 209202 - DNA, 552 bp, Zea Mays
cacgggggttgccgctttggggctcggcacctacggcgcgcacatgttccgccccaagaaccccgcgtacaaagaggtttggcacacggcgtccctgtaccatctcgtccacaccgcggcgctgctcggggcgcccatcaccaaagcgcccccaacgttttcggagggctcctcactgctggaattgtgctcttctctggaacgtgctacaccgtggcttatcttgaagacaggaagttttcttcaccggcaccattggggggctttgcgtttattgctgcttgggccagcctcctcttctgattaaattgtgcttttccaagaaaacaaaaaaagtcataaacctctctatatggtgttttatcaggttgtgaaaaatatacttgtaaagtgtatacagtggacagtatgcgcctctgtttaataattcaatctgtgattcctatgtttctattctatgatatgcttgctgctcatgatatgttttcagttggacatgccagtgaaattgcgcctctggttaataattcaagctgtatgatgtttatgtaa

SEQ ID NO: 209203 - DNA, 918 bp, Zea Mays
atcttcacgctagtagtgtatcataatacggtcagcgctgactagcaaggagccaagcaggacataatactgaagcaggctgcggctgcggctgcagcaacaagtcaaggaggttgaaggcgaattagagagaagaggaagatgttggcggcgacggatccgatgctgtggcacaaggtggccgccgtctccggggttgccgctttggggctcggcacctacggcgcgcacatgttccgccccaagaaccccgcgtacaaagaggtttggcacacggcgtccctgtaccatctcgtccacaccgcggcgctgctcggggcgcccatcaccaaagcgcccccaacgttttcggagggctcctcactgctggaattgtgctcttctctggaacgtgctacaccgtggcttatcttgaagacaggaagttttcttcaccggcaccattggggggctttgcgtttattgctgcttgggccagcctcctcttctgattaaattgtgcttttccaagaaaacaaaaaaagtcataaacctctctatatggtgttttatcaggttgtgaaaaatatacttgtaaagtgtatacagtggacagtatgcgcctctgtttaataattcaatctgtgattcctatgtttctattctatgatatgcttgctgctcatgatatgttttcagttggacatgccagtgaaattgcgcctctggttaataattcaagctgtatgatgtttatgtaacggccgaggttcaaggcagaccctttgcttgcctaaaagttaatggccacatgttcgctacttgatgcacaaatatgagaatctctctttgctttgaatgaacaatgcgatggtggaacaacacaatataaaactacactcgataagtattgcaacatgtggcatctgacttcataaa

SEQ ID NO: 209204 - DNA, 6312 bp, Zea Mays
aacaaagaaaaagacattgccatccgtcctaaaattagtaaaaccggaggctttttttttttttgcgctggctggttgcaattgcaaagcagcggcgattaatgcagaccaccaaatgaatggcaagcagggatccctatttattaggccgatggaagcagaagctccagtcagtgagggacgaaagaagtcgcctaattctttcgatcgaattaggcgccttcttcgtcccacgctccgtctttatttgtaatctgaagcttacaggaacatttgagtggatcatggacggattggtaggcctcttgaaagtccgggtggtgaggggcatcaaccttgcctaccgcgacgcaagaggcagcgatccgtatgtcgtcctacgacttggcaagaagaaacttaagacgagcgtgaagaagagatctgtgaaccccatctggcacgaggagctaactctgaccgtcacagatcccagcctagctctgaagctggaggtgttcgacaaggacacgttcagcagggacgacccgatgggggacgcggagatcgacgtggcgccgctggtggaggcggcgaacgcgagcccggaggcgagcctgaggaacggcgccatcatcctgtcggtgcggccgagcgccacgaactgcctcgccgacgagagccacgtgtgctggaggaacggcaagttcgcgcaggacatgatcctccgcctcaggaacgtggagagcggggagattcagctgcagctgcagtgggtcagcatccctcctgctgcagccagcaggtgaaggaaggaagaacaggcgacacgaagcaatcgcattttcacctcttgtgaatgtcggattgtaaacttaatggggtctgggtcagtcagggtagttcatgtgttgcctattaatgtacagttggggacagcatgaaatccaagccaagtcactcaagtgttgtaggatccttcctgttcctgtttgtgtctggtctacaacaaaaatggtgcagtgcagtgcagccgtgcaggggataaaaaggccctccagatccagacaaaaggctggaggagtggtaggataccataccatgtggcacaatggaatgcatgcaatgcaagctgagctgagtatagaacaagcttcgttctcgtcagtgccagtgcacgctgatggggcgggcagttcaggttcagtgctgaatgaattgcaaaagctgcatgatctggcacgggtcgtcgtcgtctcgtcgccggccgccgggggcttctccaccgcaggcgcggcgatatcccaaaccagtggccgttgatccgcgtctcctcttatcctctcccacccaaaattctccacggtcgcaacgcgacaagttcacattatttattccaaacctttctgcctccagccagcagtcagcacagcagcggtagagtacaaatcctcgcctgcccccctgcttcctgcttttcgtcctcatccacccacaggccacagtccactcacaactcccccggaacggcggcggcggcgacggcggagaaacctctcgactacgaggagctgaacgagaacgtcaagagggtgcagtacgcggtgcgcggggagctgtacctccgcgcctccgagctgcagaaggagggcaagaagatcatcttcaccaacgtcggcaacccgcacgccctcggccagaaaccgctcaccttcccgcgccaggtggtggcgctgtgccaggctccgttcctcctcgacgatccccacgtcggcctcatgttcccggcggacgccatcgctagggccaagcactatctcgccatggcgcccggcggtctaggtgcgtacagtgactcccgcggcatcccgggaatcaggaaggaagttgccgacttcatccacaagcgtgatggatatcccagtgatccggaactcatctacctcacagacggtgccagcaaaggtgtgatgcagatcctgaacaccatcattagaaacgagatggacgggatcttggtccctgttcctcagtacccactttattccgccaccatttccctctatggtggttctctggtcccgtactacttggaagaagaggctaactggagcctcgactttgtgaatatccggcaaacagtggcggaggcacggtccaagggaatctctgttcgagcgatggtgatgataaatccaggaaatcccactggccaatgccttagtgaagcgaatataaaggaacttctgcaattttgctaccatgaaaacttagttctgcttgcagatgaagtgtatcaacagaacatttatcaagatgagcggccatttataagcgcaagaaaggttatgttcgacatgggtccgccaataagcagtgagcttcaggttgtttctttccacactgtgtcgaaagggtactggggagagtgcggacaacgtggtggatacttcgaaatgacaaatcttcctcccaagacagtagatgagatctacaaggttgcatcaatagcactgagtccaaacgttcctgggcaaatttttatgggagtaatggttaaccctcctaaacctggagatatctcgtacctgaagttcgctgctgaaagcaagtccatccatgaatctttgaggaggagagcacgcatgatgacagatggtttcaacagttgccgaaacgtcgtgtgcaatttcactgaaggagctatgtactctttcccccaaatacgtctgccaccgagagctattgaggcggcaagaagagccggcaaatcagcggacgtcttctactgcctcaagctcctggaggcgacaggaatctccactgtcccgggctctggttttgggcaaaaggaaggggtgttccaccttcggaccactatccttccagcggaggaagacttccctgccatcatgtcgagcttcaagaagttcaacgactcgttcatggaacagtacgagggctactccaggctgtgagcaggaagagaaacaagagattacagatctgaagaagagattattgattggaagcttattagttattgcggaggtgaaggggcagctggccttcgcggcgcccatggtggccaccagcatggcctactacgccatcccgctcgtctccgtcatgttcgccggccgcctcggcgacctgcagctcgccgccgccacgctcggcaactcctggggcaccgtcaccggcatcgcgctcatgaccgggctgagcggttcgctggagacgctgtgcgggcaagggtacggggccaaggcgtaccggacgatgggcgtgcacctgcaggcgtcgctgctcacctccgcgctggcctccgccgtcgtctccctcctctggatctactcggagccgctgctggtcttcctccgccaggacccggagacgtcgcgcctggccgcggacttcctccgccactccgtcccggcgctgttcgcctacggcttcatccagtgcgcgctccgcttcctgcaggcgcagtccgtggtggcgccgctcgtcgccttctcgctgctcccgctggcggcgcacgtcggcgtcgcgcacgcgctcgtcaacgtgctcggcatgggcttcgccggcgccgccgtggccacgtccgcctcgctctggctgtctttcctcatgctcgcggcgtacgtcatgctgtccgccaggttcagggagacgtggccggggttcacgaccgaggcgttccggcacgtcctgcccggaatgaagctcgccattccgtcagcggtcatggtctgcttcgagtactggtcgttcgagatccttgtgctgtttgcagggctgatgcctgactctcagctcagcacttccatcattgccatgtgccaaaacaccgaagccatatcatacatgatcacctatggcttcgccgctgtcatcagcacaagggtatccaacgagctgggagcccggaacatcgccaacgccaagaaggcgctcaccgtgtcgctgacgctgtccctgatgctgggggtggcgttcctgctgctcctgggcctcggccatgacctctgggtgcgcctcttcaccaccagcgaggtcgtggtcagcgccttcgcctccatgacaccgctgctcatcggctccgtcgtgctggactccacgcagggggtgctctgcggcgtcgccaggggctgtgggtggcagcacctggcggcgtggaccaacctggtggccttctatgtcatcggcttgccgctcgccatcctcttcggattcacgctcggcttccaaaccaaggggctgtggatggggcagatatgcggcctcctctgccagaactgcgtcctctttttcatcaccctgcgaaccaactgggaggagttagacctgaccatgttcaacaaggacaacgattttgtctgctaggaatccagaaagagtttttcttttcttttttgccatgtgctgttgctgaaatgttgaaccatcagcaacaggcttcgacagagctgcctggtatgtttgctcatcagccatcatcaattcatcatcagtgtgtaacattacagattgtacctgtagtaatacaatacacaggaattgaagatgcatgcgtccatcaatccctcaagactctcttcctagctagacagtatccaccactaagagaaacatgtctaattcctaccaaggactggacaccctagctctaggtgatgtgtaacttccaaagacgacgtccttcattcactccagagctcagtggtctcatgtttcttgagaatacagccaccttttttttgctctagactccaaggctccaatttagtaacgtaagtagtagtgcagaataactcaagtaccatgcatatagaacaacccagcacgtgaccccaaccaagctccccagctgtggtttacatcaaacagccaaggactgcacaagccatggctgctttcgggccaacaagatgacgtgaagggactgtctcccatgctccgcgcaaagattagctcgcctgttttgatgctccatatgcgaacagtgcagtcctccccacctgtcaacgaatgaacatgttttctgaaatgaggatttcatgccctcccttgaattaatcttgctaacttcacatatatgaaccaactagcacacagacgattctgtaaatcaaaactcaacctatacaatatgtaattcaacgataatctatactccttggtgcggcatttaggctatcaagtaagaacacaaacaaactattgtgtaagtttttactggtcaataaccacttcaaagagcatcccctagcgctaaatggcaaaagaaaagaacatttatttatttgcatatagccaaatacacagctaaaatgaacaaacctgacataagtaaggtctcagatggatcaacagcaagtggtaaaagtgtgtgtgagttcacatgcccctcgtacgactgtatacctcccttctgaatgaggcgaagatcgaagagtttgatctgtacaacaaaataaaaggtctttgctcttgcatgtcgacttcaaattcttaatcataaagaggtgcaaaagtacatgcggactttgtagacaatgacttcagataagataactaataactggttcacagcaattggttgttgtttgccctctaaataattgatatatccatgccgaatttgttattcgattcgatccatgacattttagttcagtatgtgtctgccattgtaataaagatgaaataaaaacctgtgaaattaaatttatgcatgacattcaagtgtcaactttcgaatctggcacattacatgattacaacagataagtgggaaaagactaaacacaactctaattgaaaatattgttaccacgtcgacgtgtggtgtcagcaaacaattctagttttgaaatccatcaatcctagcagatcctgagcaaagtgtgtgtttgagggtttgccacctaatctagctagagctattttgctcgctagtgatgatttatcattggagtttaacccgggctagaggcatttcaatcttccttgccgctgttgattagagttttctaggtcaggtcgtcgtcaccttgggtaaaggtgttattgttgtatgtgtgtgggtcggtgttgagtctgtgcagatttgtaagggctcttgcccatttttttgtattctaaatataatgataagatgtttgagaaaaaaatcttgctcataacactaaaaaatggtctaagtataacttacagatccatccatggagcttcctaagaagtagttctcatctgatgagagtgaaaccaagctgtgcaacaatgtcactttcagtactagggaacataaacattgtccaaaaa

SEQ ID NO: 209205 - DNA, 645 bp, Zea Mays
ttgtcatcaatccaaaggatttgatctcatccagcaaaagcttacttgtggtggaaacagcggatcgtccagggttactggttgaccttgttaagatcatctcggacatcagcattaatgtccaatctggagagtttgacactgaggggctcctggctaaagcaaaattccatgtcagctacaggggcagaacactgaccgaggctttacaacaggttctttgtaatagcttgcgctatttcttgaggcggccgacaacagaggacgccagcttctagccagatagatgatcatgaagcctcccaactttcttatgtggtggtattcacatgaattgaataccatcgtcaaagcatttgaaacacgcacaataatttgttaagatggggggaattgtacttgatgttatggcaccacaccaattcgaagtattttttgttccaaggcacgggaatctgttgtatccaagtgcagaagattgctattcttaatcatgtaataacacattattattttgctacttgggatacaccgtttggtggtaaataagatggaatattgtgggggcccatcatcccgtgtatcatgcaaataccgtctattgtcagattaatgatggagttaccaacaacagtcttgagggta

SEQ ID NO: 209206 - DNA, 810 bp, Zea Mays
agaggttcactggccgtaaaattgatgatccagagttgttagaagcagttcgactgacgatcattaacaacatgatacagtatcatccagagtccagcagtcaattggctatgggggcaacttttgggccagaagcccctacggaagaggttgatgtggatatagcaacccacatagatatctatgatgatggccctgaaagaagcttacttgtggtggaaacagcggatcgtccagggttactggttgaccttgttaagatcatctcggacatcagcattaatgtccaatctggagagtttgacactgaggggctcctggctaaagcaaaattccatgtcagctacaggggcagaacactgaccgaggctttacaacaggttctttgtaatagcttgcgctatttcttgaggcggccgacaacagaggacgccagcttctagccagatagatgatcatgaagcctcccaactttcttatgtggtggtattcacatgaattgaataccatcgtcaaagcatttgaaacacgcacaataatttgttaagatggggggaattgtacttgatgttatggcaccacaccaattcgaagtattttttgttccaaggcacgggaatctgttgtatccaagtgcagaagattgctattcttaatcatgtaataacacattattattttgctacttgggatacaccgtttggtggtaaataagatggaatattgtgggggcccatcatcccgtgtatcatgcaaataccgtctattgtcagattaatgatggagttaccaacaacagtcttgagggta

SEQ ID NO: 209207 - DNA, 1921 bp, Zea Mays
atcctacccatcccattcccactccgccactcggccactcgacaccaccctccgcgctccgcatccgctcctccctctgctgccgtgccggtgccgctagccatccccacttctcacccgccccctctcctctactgccgccagccgcaacaaagatatggatagagcggccgcgacagccgcagacattatcgtcatgatcccatcgctctcgccttcgcctttgtagcactacctcctcgtccatccgcccccctatttcgtcccactcgggttgctagatcggactggatctctctgcccgtttcttggagcagagatggccgaaatgaccgtgactgtcgcggccgccaaaagcaccctccggacgtgccccggcgcccgccgtgctgcggttcttggtcggtggatgcctcttgcaccagcggcgcccgccaacttgaaattgttctctccagctgtgagggttccaagggctacttcccctgcggcggttgaggatgggagcaacactgatatagtccctatcccgaaagttataatagaccaagactcagatccggatgcaaccattgtagaaataaccttgggtgatcgtcttggcgatctccttgatacgatgagtgcgctaaagaacttggggctaaatgttgttaaagctagtgtctgtctcgattctactggcaagcatatcaagtttgctataactagagcgttcactggccgtaaaattgatgatccagagttgttagaagcagttcgactgacgatcattaacaacatgatacagtatcatccagagtccagcagtcaattggctatgggggcaacttttgggccagaagcccctacggaagaggtattacctaaactatgtcagagacatcttctaaatgcttaacatatggactgaaaacttctcagttctctaaagagatttatgaaaccatcttatttgtctatatctatcgtgagaaagaattagtacacaacggtgtacaaagcacacatatctttaggatctccaagtttgatgtttatttcctttgtctctgcttcattgcaaaacttaatgtatcaaaattcttatctggtattgccttattgctggatcttcttatcatagaacagactttattggtcttcccatggtacaatagtgatcaaattgctgccaagtacatctttagaattatgtatggttctggagacttgaaaaccttcactggatataaacattgttcacttgtacattcgtaggttgatgtggatatagcaacccacatagatatctatgatgatggccctgaaagaagcttacttgtggtggaaacagcggatcgtccagggttactggttgaccttgttaagatcatctcggacatcagcattaatgtccaatctggagagtttgacactgaggggctcctggctaaagcaaaattccatgtcagctacaggggcagaacactgaccgaggctttacaacaggttctttgtaatagcttgcgctatttcttgaggcggccgacaacagaggacgccagcttctagccagatagatgatcatgaagcctcccaactttcttatgtggtggtattcacatgaattgaataccatcgtcaaagcatttgaaacacgcacaataatttgttaagatggggggaattgtacttgatgttatggcaccacaccaattcgaagtattttttgttccaaggcacgggaatctgttgtatccaagtgcagaagattgctattcttaatcatgtaataacacattattattttgctacttgggatacaccgtttggtggtaaataagatggaatattgtgggggcccatcatcccgtgtatcatgcaaataccgtctattgtcagattaatgatggagttaccaacaacagtcttgagggta

SEQ ID NO: 209208 - DNA, 1556 bp, Zea Mays
atcctacccatcccattcccactccgccactcggccactcgacaccaccctccgcgctccgcatccgctcctccctctgctgccgtgccggtgccgctagccatccccacttctcacccgccccctctcctctactgccgccagccgcaacaaagatatggatagagcggccgcgacagccgcagacattatcgtcatgatcccatcgctctcgccttcgcctttgtagcactacctcctcgtccatccgcccccctatttcgtcccactcgggttgctagatcggactggatctctctgcccgtttcttggagcagagatggccgaaatgaccgtgactgtcgcggccgccaaaagcaccctccggacgtgccccggcgcccgccgtgctgcggttcttggtcggtggatgcctcttgcaccagcggcgcccgccaacttgaaattgttctctccagctgtgagggttccaagggctacttcccctgcggcggttgaggatgggagcaacactgatatagtccctatcccgaaagttataatagaccaagactcagatccggatgcaaccattgtagaaataaccttgggtgatcgtcttggcgatctccttgatacgatgagtgcgctaaagaacttggggctaaatgttgttaaagctagtgtctgtctcgattctactggcaagcatatcaagtttgctataactagagcttcttccctagaatgagtgacaggaatgctctacaggttcactggccgtaaaattgatgatccagagttgttagaagcagttcgactgacgatcattaacaacatgatacagtatcatccagagtccagcagtcaattggctatgggggcaacttttgggccagaagcccctacggaagaggttgatgtggatatagcaacccacatagatatctatgatgatggccctgaaagaagcttacttgtggtggaaacagcggatcgtccagggttactggttgaccttgttaagatcatctcggacatcagcattaatgtccaatctggagagtttgacactgaggggctcctggctaaagcaaaattccatgtcagctacaggggcagaacactgaccgaggctttacaacaggttctttgtaatagcttgcgctatttcttgaggcggccgacaacagaggacgccagcttctagccagatagatgatcatgaagcctcccaactttcttatgtggtggtattcacatgaattgaataccatcgtcaaagcatttgaaacacgcacaataatttgttaagatggggggaattgtacttgatgttatggcaccacaccaattcgaagtattttttgttccaaggcacgggaatctgttgtatccaagtgcagaagattgctattcttaatcatgtaataacacattattattttgctacttgggatacaccgtttggtggtaaataagatggaatattgtgggggcccatcatcccgtgtatcatgcaaataccgtctattgtcagattaatgatggagttaccaacaacagtcttgagggta

SEQ ID NO: 209209 - DNA, 1920 bp, Zea Mays
cagcgacacccacaagaccacgcccccggtcgtgcatcatcatcatcgctcgcgtcttcgagttcgaggacatggagaggccgcgttgctactctccgcttgccctgcacctcctcctctgcctcttctcgctccgcgcctgttccgccgcgtccatcacagccggcacccccgacgagtcggagctgtgggggtacgtcgaggtccggccaaaggcgcacctgttctggtggtactacaagagcccgcagaagacgtcgacgccgtccaagccatggcccacggtcctctggctgcagggcggcccgggcgcgtccggggtcgggctcggcaacttcctggagatggggccgctggacgtggacctgaagccgcgcaactcgacgtggctccacaaggccgacctcatctttgtggacaacccggtcggcacagggtacagctacgtggaggacgacagcctgttcgtgaccagcgactggcagcaggccgcggacatgacgacggtggtcagggcgctggcgaaggaggtgcccaccctggcgagcagcccgctgttcctggtcgccgagtcctacggcggcaagtacgccgccacgctcggcgcgtccattgccagggccgtccgcgctggcgagctcaacgtcacgctcggaggtgtggcggttggagatagctggatctcgccggaggatttcacgtgttctcttggataaatcacaaatgatgaatacgcatgtgataattaaagtgaggcctgagtgctgctgcagctttcctacacaccgctgcttctgagcgtgtcgaggctggacgacaacgccggcgacgaagcaaacaagaaggcggagacggtgaaggagcaaatcgtggcggggcagtgggccgcctcgcagaagtcatggggcagcctgctagatttcatcgacacaaagagcggcaacgtcgacgtttacaatttcatgctcgactccggcatggacccggtggcactgcccgtgggttcttcatcactgatgagcagcttgcaggcgatgaagtactcgacgtacggccaggactcccagcctggctccaacaccattgacggcatcatgaatggggtcatcaagcaaaagctcaagataatccccaagaacttcacgtggggggagcaatccgactcggtctacaacgcgctggtcaacgatttcatgaaaccgaagatcgatgagattgatgagctgctgtcttatggcattaatgtgacggtgtacaatggccagctcgacgtaatctgctcgaccaacggagcagaagcatgggttcagaagctcaaatgggatggtctgaggaccttcctgagcctgccaaggcagcccctctactgtggcgccagcaagggtaccaaggcctttgtcaggtcccacaagaacctgcatttctactggatacttggagcagggcactatgtgcctgcagaccagccctgcatcgcgctaagcatgatcagcagcataacccagtcgccagcaagctagttcactgactctatgtggtgtatgccaagaacaaaggaggcgttgaagcaggtagcgcaaggtcccggaggaccattcggcgttcttgaagtgcggtataggttggatacctgaaagacgatgcagttgacaaggacattttttttacagaaaaagatccgataaaaacatatatgatctacgtattacaaaatattgtaaagaggccggaacttgtttttttaataatagaaatgtatctggcttcatcctggtccaaataacgtgccaaataacgtgaaaaatacattgccgcattctctagcttgcggaatgcctgcaacatcggctcctgctcctcagacattgtatttgggcccaagatccaagccaatgcattcgactgaaaatgacatacaag

SEQ ID NO: 209210 - DNA, 1221 bp, Zea Mays
gcgcctcacagcgacacccacaagaccacgcccccggtcgtgcatcatcatcatcgctcgcgtcttcgagttcgaggacatggagaggccgcgttgctactctccgcttgccctgcacctcctcctctgcctcttctcgctccgcgcctgttccgccgcgtccatcacagccggcacccccgacgagtcggagctgtgggggtacgtcgaggtccggccaaaggcgcacctgttctggtggtactacaagagcccgcagaagacgtcgacgccgtccaagccatggcccacggtcctctggctgcagggcggcccgggcgcgtccggggtcgggctcggcaacttcctggagatggggccgctggacgtggacctgaagccgcgcaactcgacgtggctccacaaggccgacctcatctttgtggacaacccggtcggcacagggtacagctacgtggaggacgacagcctgttcgtgaccagcgactggcagcaggccgcggacatgacgacggtggtcagggcgctggcgaaggaggtgcccaccctggcgagcagcccgctgttcctggtcgccgagtcctacggcggcaagtacgccgccacgctcggcgcgtccattgccagggccgtccgcgctggcgagctcaacgtcacgctcggaggtgtggcggttggagatagctggatctcgccggaggatttcacgctttcctacacaccgctgcttctgagcgtgtcgaggctggacgacaacgccggcgacgaagcaaacaagaaggcggagacggtgaaggagcaaatcgtggcggggcagtgggccgcctcgcagaagtcatggggcagcctgctagatttcatcgacacaaagagcggcaacgtcgacgtttacaatttcatgctcgactccggcatggacccggtggcactgcccgtgggttcttcatcactgatgagcagcttgcaggcgatgaagtactcgacgtacggccaggactcccagcctggctccaacaccattgacggcatcatgaatggggtcatcaagcaaaagctcaagataatccccaagaacttcacgtggggggagcaatccgactcggtctacaacgcgctggtcaacgatttcatgaaaccgaagatcgatgagattgatgagctgctgtcttatggcattaatgtgacggtgtacaatggccaggatttcaacgatgcatctgg

SEQ ID NO: 209211 - DNA, 2166 bp, Zea Mays
ctcctgctgtctgctgccgaagtcgccaactaacatagatcgcaccatttcccgttcacctccccttccgttacatcccaccatttgctgttcaccttccctcccgtttgcctcctctcgctgtctcgtagcttctttcctccggcgacggctgggcgagcggccgccagtcggtcccttcgtcggcgacgagcatccacctgcgccggcgctccatcttccgctccctcccttactcgcgctcggcacacaggcgacggcggcggcgctcaggatcgggctatcaccgacgggctctgtaggttttttgtactatactttttagtggttctggccttcttgacacaatggtgaagctgacaatgatagctcgtgtcactgatggccttccactggcagaagggttggatgatgggcgagatctgaaggattctgatttctataagcagcaagctaaacttcttttcaagaacttgtcaaaagggcatcatgaagcttcacggatgtcaattgagacagggccctactatttccactacattattgagggcagagtatgttatctgactatgtgtgaccgctcttatccgaagaaacttgcattccagtacctagaagatctgaaaaatgaatttgagagggtcaatggcaaccaaattgaaactgctgcaaggccatatgcttttatcaagtttgatacattcatccagaagactaggaaactgtatttggatacaagaactcaaagaaacctcgcaaaactgaatgatgaactctatgaggtgcatcaaattatgactcgcaatgttcaagaagttcttggtgttggtgaaaagctagaccaggtcagtgaaatgtcaagcaggttgacttctgatacaagaatatacgcagataaggctaaggacctcaaccggcaggcgttgattcggaagtatgctcctgtcgccattgtcattggggtagtattgatgctgttttggctcaagaacaagatatggtgattgtacagtacgaaggatactgggccctgttacaacaccggagaagaacagatggagataaaaaccaggtctattctggaacaagaagatgctttggtgacttgtatcccgtatctgcccattcaagcgattacttaagctgcccttttgctcctccctataagctagtatcaaagtgaattcgttggagtgcagacctgataagagcatctccggaagtctttcaaaatttcactctaaattctcattttgagagtcatttgcttaataattgttattatgtttttttcactctccaacagcctttaatatcctgtttgcactagggagccattctctttctatattggactaccgatgaatttggaggagatggatatattcggatagctgtttttaaaaaaagctgttgggggaatcttagcaattaggaagggtatagtctctagagaaactcatattttgtgcatccgttgaactcaatgtaatataatataagagctctagagttctacatcggggttgtggaactcaatgtaatacaagagctgtggagttgactttacatcggggttgtaatttttagggtggaactcaatataaagattcagggtggtctgatgagttgacgaaactcgagcatgctttttatagctgcctaatatgtattgatttaaggtcagagagagtcgtgtatactacagctacgagcagaaccctccgtggcaactggcacccaagtcctgtcctgtccagcaaaaaggttgggtgcgccgtgcgcgtctccacggggtcggagtcggaggtggatgggcagtgggcaaagcctctcgcgctggcgaccgtgcagatacaggctcagtgctcaactgtctcacaggcaaggatggcaatcgggccttattattcgcggataccttattatatccataaccatacccacggataccaaattccaccatacccgcatccaatggataattatccgcggttatttacccatacccatacccatacctattgctatccctactcacaggctcacagccgcgcacaggaccgtgtcggtgtcacggtggagagacgtctcggcgagtcggtggtgccacaatcgcggacacctggcgacgttgctgacagtcttttactacaccctttctaa

SEQ ID NO: 209212 - DNA, 2159 bp, Zea Mays
tccatctagccagcccaatccacatcaccagcccacctcgtcgaactcgtcgtcttccgtccatccatcgtcgtcggcggcggcggagagagagcagatgacgtcctcggggacggtcgcgcagcagctgccgcggacggaggcgcggtcgctgtcgggtcacgagggagcggtgttggccgtgcggttcaaccgggacggcaattactgcctgagttgcggcaaggaccgcactctccgcctctggaatcctcacacaggcgcccaggtcaagacctacaagtcccacgcccgcgagggataacgccaaactggtgtcctgcggtgccgacagacaaatcttctattgggacgttgcctcgggccgcgtcatccgcaagttccgcggccacaacagcgaggtcaattcagtgaagtttaatgagtacaatgctgttgtagtctcagctggttatgaccgtacggtgcgtgcatttgactgcaggtctcaaaacaacgaccctattcagacaattgatacttttcaagatagtgtaatgtcagttaacctaacaaagacagaaataattgctggcagtgttgatggtactgtccgggcatttgacattcgcatgggtagggagactgttgataatctagggcatcctgtgaactgtgtatcattatcaaatgacaacaattgccttttagctaactgtttagattctactgtgcggcttctagacaaccggctggctgctgatccattgttcctgggctcctggcgacttctcagttctcctcctccctgagaaaacatccagctgctgctgctgctgctcctccttgaccaacaagatgatgcagcttctcgggaagatgaagaacagccactgcaatctgatggaggatcaacggaaatggaagaatctgtcccaggtggtggtggagggcaagctactgctgatgcattccatttggatgaggatttgctactttaggtcttgagtttgattagctaagtacctaccgctgtttgagtttgaatgtttgattacttacttctgttcagactttaccctttagaggtgctactcaaggtgattgttgctgtaatgctgtttgagactttgagtactgctaaatagctactactgtttgagtttgagttaaatactgctgtagttttgattacctactgctgtttgaagtatattatatagtatataactatacactatagtgtatataactatatatatttatatatgtcctgattagtacaggatgtttaggactactaggtggacgacctgtcaccgattaatcggcctggtcgacgtcctaatcatgattactcgcctaatcggttaccatcaacgacatggataccaggcgacttgaaaaccatgtatgaatgtcaagtcatctggagaactgttacaggagtataagggacatacgtgcaagtccttcaagatggattcctgtctgacgaatgatgatgcatttgttgttggcgggtctgaggatggttatattttcttctgggagttggtggatgcacctgttgttgcaagattcagggcacatagttctgtggtaactagcatcagttaccacccaacaaaggcctgcatgttgacgtcttctgtggatggctctattcgtgtttggacctgaagactcttgaatggttgatgtgctattcgtactgttcctccaaatcatccagttatctagcagcaaggattcgacagtatgaaagatgaacgcatgtctaacctaatgggattcatacacgccttgctgcagagagaagaaaatgcgctgctgttgggctgtgtagcacacagctctgaggccaaaaccttttgaagccggtattctgtcatctatgaagtttgtgagccttttagatgattttggattgtacctgaagacaacttgtgagttgcatgaaaagtaacatttgttacgaagtttcttactgcaagtgtcttgtctccatgttactgaagacaacttatgggggttgagaaatgtatcttctagttcctttttttttgttttgatttggaatggaatgactaatgagttcatcgaccatcacatcatcctcacaagctaatactccatctgttctaaaatagttgttttaggtaattagtgggttcata

SEQ ID NO: 209213 - DNA, 1854 bp, Zea Mays
ccgcgcccctgcctcccctccgcatacgccatgcttgtggtttcgtatatatattttatactatttttacttacgtagcaacgcacggacacatatctagtgctttatgaagtgatgtattataagtttattctataaattttggtgaaatcaaatgcattatacaaactaaatagaaaagtgaggagtgaaaagaagaccagacatacccaaaacttgctcaagatgaaaagggaagaaaagacgagcacaggctgtcggatacgcgcatcacgaggcaaaatccaaccgttagcggcgtcctccccgtaccgaggcgaaaccctgctaaaaccccgacttgttgaccctcgccgccggcgctgggaaatcacacagacacactcacacacaacctacccagacggccagaccccgcgccgccccgccgccacccccacccccaccccaaatcagtcaaacgcgccgccgccgccatgggctcctccgtcagccaggccggggcccctcctccccatccccccacatacgcgtcgactccaccctttgcgcccgctgccgctgacgctgctgacgccgccgccgccccgccgccgaaacctcatgaggaggaggcgactgaggagaaggtggactacctcaacctcccgtgccccgtcccatatgaggagatccagcgcgaggccttcatggcgctgaagccggaccttttcgagggtatgcgcttcgatttgaccaagatgatcaccccgtacttcgctttgactcacagcgttgccatgggatccattgagatcccggcacaggggagcgaggtgatcaaggttcccacctccaattatgaacgatgctcatggggagggtctcacatgaagggagggagaacatccgtgtcaagcatgatattacggacaacctttctttaaagataaatgctcagttgacaagtgagccccactactcccaagggatgctgaattttgattataagggcaaagattttagatctcaggttcaattcggaaacaatggtttctatggagcaaactacatccagagtgtcagcaagaacctttccttgggaactgaagccttttggcttgggcagcaaaggaagtctggagtcggtgttgttgctcgctatgacacaaagaaaatggttgcgactgcacaaattgcaaccactggaatggtcgcgcttagttatgtacagaaagtttctgaaaaggtttcccttgcatctgatttcatgtacaatcaaatgacaaaggatgtaacagcaagctttggttatgattatatgctgagacagtgtcgattgagagggaaactggataccaatggcgtaatttcttctcttttggaggagcgattgactccaggtgtcactttccagttgtctgcagagctggaccactggaagaaagattacaaatttgggtttggtatggctctcggagagtaagacgatttgagcaaattctagacacatgtacaattagtggttggcattagtcgacagggattaaaacgattctactttatctttgcatttatttgtctcccagttattcgtttagctgctatggctgtgggccgtggagacatttcgaagttttgattttactgggctcatcacttgagtagtattaaactgaaacgggaatgcgtgaatagattgcgctccaccagattaggatttctgcatgccaaactcttgatttctagtctggaaataagttacgattttattccataagataaagatacattcctctgctaagttaggtgctgtttggtctggcatttttggaattgtaatccattcttgctgcgggtgtttgatttgatgaa

SEQ ID NO: 209214 - DNA, 2801 bp, Zea Mays
aaagtcaaaccaaacacaccctaagaatccctgtgttcgtgatatcttggttccaataacctcgcgtctgcgacacaccaacccgaaccttaggtagcgtcccggtccgcggtgccagccaccgcgtgccgccgcctgggtcttccctcctcagctccttcctgagctcggcggtggaatcacgggaggaggcggaatagtaagctgaggcggggccatcgggctccgtggttgaggatgcctgtgctgcgtagcgcggcgcgaagggcccgagaggcgcaggggcatccggcggcagctgatgaaaaagctccggaggcggcggcagcagcattagcagcagccccggcaccaccgccggtggagaagaggcggagagtgacgagggcggaggagagggagcgggaggagatcaggcctagggaggtcgtcgcgggagaaggcggcgacgacgagggggagcgtgggatggacgaaccggacagcgcggcacgcagcgccgacaagctgacattcgatgatgaggacggccccactgtccctgaagcggtccaggtgggtagttcaccgaagtatagagtcgacaggaagcttgggaaaggtggttttggccaagtatatgttggccaccgcatgtcagctactggtccaggtgccgtcgaggtggcactgaagtttgagcataggaccagtaaaggatgtcactatggccctccttatgaatggacagcttacaacgccattggtggcattcatgggtttccccgagtccactacaaaggacgccaaggggattactttgttatggttatggatatgctcggacccagtctgtgggatgtctggaataataaatctcacataatgtcagttgagatggtttcttgtattgctattgaagcaatctgcatacttgagaaattacattcaaaagggtatgttcatggcgatgtcaaaccagagaatttcttgctagggactcctgggacacctgaagaaaagaaactcttccttgttgatcttggcttagctacgaagtggaaggatattgcaacagggcggcacgttaaatatgatcagcgttcagatgttttcaggggaacatttcgctatgctagtgttcatgcacatcttgggagaacaggtagcaggagggatgatttagaatctctagcatatacactagtctttcttctacgaggatgtctaccttggcaaggttatcagggtgacaacaaaagcttccttgtctgcaagaagaaaatggccacctttccagtatctctctgttgcttttgcccacatcctttcagaaagtttgtagagtatgttgtcaacttgaagtttgatgaagaacccgactatgcaaaatgtgcatcactttttcatagtgtactaagtgtagtaggttcaaatccagatgtcagaccaattaacactgatggtgctcagaagcttatacatcaatttggtcaaaagagaggccgattttttatagaggaagaagcagatgaacaaccaaagaagaagatcagggtgggaatgcctgcaacacagtggataagtgtctataatggcagagtacctatgaaacaaaggtaccactacaatgtttcagattcaagagttggacagcacatcgaaaaagggaatgccgatggactgtttatcagttgcataacatcttgttccgatctatgggctctaatcatggatgctggaactggtttcacatcccaaatttatgagctcattccacatttccttcacaaagaatgggtaatggaccaatgggagagggactactatataactgcggttgctggggcaaacaatggcagctcgttggtagtgatgtctaaaggcacaaagtacacacaacaatcctacaaagttagcaatagtttcccctacaaatggataaacaagaaatggcaagatggtttctatgtaacttccatggcaactgctggaagtaggtgggctgttgtcatgtctcataatgctgggttttctaatcaggtggttgaactggatttcttgtatcccagcgagggaattcataaaaggtgggacaggggttactggataaccgcagctcctgctacttgtgatcaggctgctttcgttttaagtgtaccaaggaggcgacttacagatgaaacccaagagacactgaggacaattaatttccctagtaaacatgtgaaggacaaatggtctaagaatctctacctagcatcggtatgctatggtcgtactatatcctagggatcttttcgagcggaatcctgccagcaccatcttttgacgtaggagatatccagagccacctgccagaagaaagcagaggaagaaaaaaacaaaacaaattattagtcggtgtatggatatacagtgatatacggccagaaaaagtggaagaagagcacccctacaagcatctacggatgaccaaattggcatggccacaagcacggaagtttattaggattattattcatttagattaaattagttcctattttctagagtaagtcagttttatgtttggtcagggataaactagaaagtgaagttgtttagatatttatggagtcggttcctattttctagggtgagtcggttgtagatggattataaagccttattgtaataatgcagagagggcaagacctacagttatcatttcatttaatctagtatctattatcttcattcctctttggtgctttgccgagaaaagcattcgagtttctctgcgaaagtgagatcaacgcctgctgctcaaccaatttctg

SEQ ID NO: 209215 - DNA, 2392 bp, Zea Mays
aaagtcaaaccaaacacaccctaagaatccctgtgttcgtgatatcttggttccaataacctcgcgtctgcgacacaccaacccgaaccttaggtagcgtcccggtccgcggtgccagccaccgcgtgccgccgcctgggtcttccctcctcagctccttcctgagctcggcggtggaatcacgggaggaggcggaatagtaagctgaggcggggccatcgggctccgtggttgaggatgcctgtgctgcgtagcgcggcgcgaagggcccgagaggcgcaggggcatccggcggcagctgatgaaaaagctccggaggcggcggcagcagcattagcagcagccccggcaccaccgccggtggagaagaggcggagagtgacgagggcggaggagagggagcgggaggagatcaggcctagggaggtcgtcgcgggagaaggcggcgacgacgagggggagcgtgggatggacgaaccggacagcgcggcacgcagcgccgacaagctgacattcgatgatgaggacggccccactgtccctgaagcggtccaggtgggtagttcaccgaagtatagagtcgacaggaagcttgggaaaggtggttttggccaagtatatgttggccaccgcatgtcagctactggtccaggtgccgtcgaggtggcactgaagtttgagcataggaccagtaaaggatgtcactatggccctccttatgaatggacagcttacaacgccattggtggcattcatgggtttccccgagtccactacaaaggacgccaaggggattactttgttatggttatggatatgctcggacccagtctgtgggatgtctggaataataaatctcacataatgtcagttgagatggtttcttgtattgctattgaagcaatctgcatacttgagaaattacattcaaaagggtatgttcatggcgatgtcaaaccagagaatttcttgctagggactcctgggacacctgaagaaaagaaactcttccttgttgatcttggcttagctacgaagtggaaggatattgcaacagggcggcacgttaaatatgatcagcgttcagatgttttcaggggaacatttcgctatgctagtgttcatgcacatcttgggagaacaggtagcaggagggatgatttagaatctctagcatatacactagtctttcttctacgaggatgtctaccttggcaaggttatcagggtgacaacaaaagcttccttgtctgcaagaagaaaatggccacctttccagtatctctctgttgcttttgcccacatcctttcagaaagtttgtagagtatgttgtcaacttgaagtttgatgaagaacccgactatgcaaaatgtgcatcactttttcatagtgtactaagtgtagtaggttcaaatccagatgtcagaccaattaacactgatggtgctcagaagcttatacatcaatttggtcaaaagagaggccgattttttatagaggaagaagcagatgaacaaccaaagaagaagatcagggtgggaatgcctgcaacacagtggataagtgtctataatggcagagtacctatgaaacaaaggtaccactacaatgtttcagattcaagagttggacagcacatcgaaaaagggaatgccgatggactgtttatcagttgcataacatcttgttccgatctatgggctctaatcatggatgctggaactggtttcacatcccaaatttatgagctcattccacatttccttcacaaagaatgggtaatggaccaatgggagagggactactatataactgcggttgctggggcaaacaatggcagctcgttggtagtgatgtctaaaggcacaaagtacacacaacaatcctacaaagttagcaatagtttcccctacaaatggataaacaagaaatggcaagatggtttctatgtaacttccatggcaactgctggaagtaggtgggctgttgtcatgtctcataatgctgggttttctaatcaggtggttgaactggatttcttgtatcccagcgagggaattcataaaaggtgggacaggggttactggataaccgcagctcctgctacttgtgatcaggctgctttcgttttaagtgtaccaaggaggcgacttacagatgaaacccaagagacactgaggacaattaatttccctagtaaacatgtgaaggacaaatggtctaagaatctctacctagcatcggtatgctatggtcgtactatatcctagggatcttttcgagcggaatcctgccagcaccatcttttgacgtaggagatatccagagccacctgccagaagaaagcagaggaagaaaaaaacaaaacaaattattagtcggtgtatggat

SEQ ID NO: 209216 - DNA, 1929 bp, Zea Mays
actggtagacaggacaagcatcagaattactagtcaccagcagagggacgacgggagaaggaaacccttcgccctcgctgccgccttctccttccccggtcgcgtcttgttggggctctctcgtggtctcgacccgccggccgagttctcgcgtccaagcgtggcaatccacatatctctgtctccctctctcgctcacccctgtatccccgtctaaccgaagagcccaatcaatcgaatcggatcgaaacagaccgtgtattcaatctgctactagggaagggggaagcgcgagcgtgcttgcgtgcgtgcgttccttcgttcgtgacaaggcggcccggccggccggccgatcgatcggcgatggcgccgccgtcgagggactactggctgggcttcttccgcggcgcaggggacaacgtgttcgacgccatcgacgcggccatcacggtcgccgcgtccgaccacccggccgccctccgggagcgccgcgacggcatcgccgagcgcctcttcaccgcgctcctggtgaccggcgccgcgggggcgggggcggcggcgggccagggagggtccgcggggagaacccccgtgcccagcctctgcagctccgaccgcgccgaggccgtcaccgacgacggcgcgccgcgcggagacgatcccgtcctcgccgagacggagcgcatcaaggccgtcctcctcggcggccatgacaagtcggagtccgagttgctggagctactccggcggctgcaggagctggacctcgcgttcgacaccttggatgtcactgcgatcggcaaagcggtgtccaacttccggaagcacagctcgaagcagatccggacactcgtgagatcgctcatcgaaggctggaaacgcacggttgacatgtggatcgctcggcgcagagaggccgtcgtagatcaaacgccccagtccatgggtccgtccagcctggaggatcaggaggatcgaggggcagctttcacccacatggatgaaggcgacctcttcgcaacgccaagcactacgattcggctgtccgaggttccaagttctccgacgcaacggagggggatggaggcatggtgaacaacaccagcagggattgcggcgagcggtacccatcgaaccaaggggggccagctagaaggcctccgccgatgggccagcagcggtacgatccagggccgtgctggaggcaagaaccgagcagcgggcagacgaaggagcagttcgtcgcggagatgctcgctaggccctcgagtgcggcggggtcgggccccgggagaccgcagcaggcgaggcccaggcagcagcgtcaggaggacgcctcctccccagctcaaggcagcaggccgcagtctgtcggctgcttctgataaaccggtggcgcaggagcaacctgacgcgaactctgtgcgagcgaagctcgagctcgccaagaacgccaagctcgaggcggccaagaggaagctccaggaaggctaccaagagtttgataacgcaaagaagcagagaagcatacagatggttgatccccagaacctgcccaagcaagcaaacggcacccggaatttccaacctagcggcaagccaaggaatggcagcagcaggaattggtagcagttccaattccttttgagcgccaccagggatcatagacttcaaatcccctcctccctctttcttcctttggttcttgatcggctactaaagattttttttagaccatgcgagtacagaaaacagcaataaggctagtttcgaaagtctattgaaagttctggtcaattttgacgaacttgtttgagagctcgtcaatctgcttgtgctgtgtgcctgtgtcctctgtggctttgcagcttccaggcaacaggattctttcgtgtgaacaccattttgacttgcagtgcggcgctggcg

SEQ ID NO: 209217 - DNA, 2779 bp, Zea Mays
gctcaaactccaccgggttttaataaaaggggactacaagattgattttgatggattatgacaagtctagaagaagtaactccaaaaagaggagacattccaattctgatgacggaaagaggaaacggttgagctctaggcatgatgacacatctatgtcctctgagccaattgaaaccatctacaggatattgtgcccggcaaaaaagataggcagtgtcttgggaagaggtggtgacattgttaaggcccttagagaggaaactaaagccaagataagggttgccgattccattcctggtgcagatgagagagtaattatcatcttcaattaccaaaatcaacctgaacttactgatgaagcagctgaaaaacaaattagtgatggcttagggaacatgaaaccccattgctttgcccaagatgccttattgaagatacatgataagattgtggctgatgaaatttatgatgaagtcgctcatgatgaaagttctgatgatgtcactgctcgaattttggttcaaggcaatcaagttggctgccttctaggaaaaggtggctccattatacaacaactacgaagtgatactggtgctgggatccgtgtcttgtcatctgaaaaccttccccagtgtgcacttcaaagtgatgaactggtgcagatatctggagcaccatctcttgtaagaaaagctctatatgaaatatctactcgtctccatcagcatcctcgtaaggaaaatagacctcttgaacaaataatagatgcaagcacacaaaggaaacacgagtctccaacactgcaacatgaaaatccaatgttgccgcacctgcatagtcatcatccacctccaatacccctgcttgacccatacagaagtggacctcagtatcctgttagtgaaactgaagagttttctatcagaatcctatgtgcttctgagctcattggttcagttattgggaaaagtggggctaatgttaggcgggtagagcagcagactggtgctcgcattaaagttcaagagattgacaaagatgcttctggagaaaggctgatcattgtttcatctaacgagataccaactgaaccaatatccccaacaattgaggcactcattttgctccacgataaagtgggcaggtgattactgaaatgagaagacgaactggggctgaaattcgagtttactcgaaggcagataaaccaaaatacttgtcttttggtgatgaacttgtgcaggttgcagggcctccagctattgcaagaggagccctcacagagattgcttcgaggcttagaactaggactttgagagatacaagtactgccaataatcctccaccttttgccccttccgatgatcctactgtcgatatgcctagcagaaaattaacactatatggagggcctaccaatgatacaccgtatggaaggcctgccaatgatccactgtatggaaggcctgccattgatccaccatttggaagacctaccaacgatcgaccatacggaaggcctgccatcgttccaccatttggaagacctaccaatgatccaccatatggaaggcctgccaatgatccaccatatgaaaggcctaccaatgatccaccatatggacgaccttccagtactatagcatatggaagaccaaacagaagtgcacctcgtgatccttcagatgcatatcctgtagactacttctctaaaagagaacatcctagtggaggccctatgtttactagtaatgccccatcagctgcttatgagagatatgcagcacccacacactttcctactagagaacctccctcaactttcagtcatcgttcctatcgtgaccacatgcctactgatagctactctagtaggggtacacagaaattagacatcacgagagatggaaattcagatgcttatgattatacagaggctgctggacaaattcatggactggaggactatagaggactgccaagtgcttctggaaggttctcgagcactattgaactaaggattccaaatagttctttggagtctattgttggtgttggcggggtcaatttagcagagatacgtcagatttctggtgcaagactgaggctacatgaggctcatgctggttcttctgagtctgtggtggagatccagggcacactggaccaagcaaaagctgcgcagagcctcctggagggctttatcagcgcgaacagcaggcagcagcaatcccattcttctcgcatgccactttacccaagatggggatagcttctggttgtggcaggggaaaaccgagtcagcagggttggctggagttatctcagactgcagattagatgcatcgatgatgttaatggtagctgtttaaattgaccgtgcaagcatgataacttatattatgccataggacaagtaatgctgattctctcatgaaatactaagtgacaagctgtctctgtagttgtatttgtttctgaatgtttgaaccctactgttacaacggctgctattttaggtcagatttcagaggccggataattatgttatctgcagagttgggccaaaaaaaaaagctcaatctggttgagactggcttcacccatgccgtttcatttttagaagttacagcatctctgcaaaatatatgggtaaggcctcttggaacgcatgaatttcatagaaatcagtttattttctcagaaaaaacatgggaaacaggggaaaaaaatcccacgttccaagaggcctaaagtttgtgtctgtttagatcct

SEQ ID NO: 209218 - DNA, 3312 bp, Zea Mays
cagccacggactctgagtctctgacgctgccttttgctctccccttccaccccgtctgcccgcgcgcgctgtctcgtggcgacaactgggcgaccgccgccgccgtcgctgccgccgctacgccaagaagctaggtcttcatcggtcccttcgtcgagattttctccggagacaagcacccagcaggggactacaagattgattttgatggattatgacaagtctagaagaagtaactccaaaaagaggagacattccaattctgatgacggaaagaggaaacggttgagctctaggcatgatgacacatctatgtcctctgagccaattgaaaccatctacaggatattgtgcccggcaaaaaagataggcagtgtcttgggaagaggtggtgacattgttaaggcccttagagaggaaactaaagccaagataagggttgccgattccattcctggtgcagatgagagagtaattatcatcttcaattaccaaaatcaacctgaacttactgatgaagcagctgaaaaacaaattagtgatggcttagggaacatgaaaccccattgctttgcccaagatgccttattgaagatacatgataagattgtggctgatgaaatttatgatgaagtcgctcatgatgaaagttctgatgatgtcactgctcgaattttggttcaaggcaatcaagttggctgccttctaggaaaaggtggctccattatacaacaactacgaagtgatactggtgctgggatccgtgtcttgtcatctgaaaaccttccccagtgtgcacttcaaagtgatgaactggtgcagatatctggagcaccatctcttgtaagaaaagctctatatgaaatatctactcgtctccatcagcatcctcgtaaggaaaatagacctcttgaacaaataatagatgcaagcacacaaaggaaacacgagtctccaacactgcaacatgaaaatccaatgttgccgcacctgcatagtcatcatccacctccaatacccctgcttgacccatacagaagtggacctcagtatcctgttagtgaaactgaagagttttctatcagaatcctatgtgcttctgagctcattggttcagttattgggaaaagtggggctaatgttaggcgggtagagcagcagactggtgctcgcattaaagttcaagagattgacaaagatgcttctggagaaaggctgatcattgtttcatctaacgagataccaactgaaccaatatccccaacaattgaggcactcattttgctccacgataaagtgggcaggtgattactgaaatgagaagacgaactggggctgaaattcgagtttactcgaaggcagataaaccaaaatacttgtcttttggtgatgaacttgtgcaggttgcagggcctccagctattgcaagaggagccctcacagagattgcttcgaggcttagaactaggactttgagagatacaagtactgccaataatcctccaccttttgccccttccgatgatcctactgtcgatatgcctagcagaaaattaacactatatggagggcctaccaatgatacaccgtatggaaggcctgccaatgatccactgtatggaaggcctgccattgatccaccatttggaagacctaccaacgatcgaccatacggaaggcctgccatcgttccaccatttggaagacctaccaatgatccaccatatggaaggcctgccaatgatccaccatatgaaaggcctaccaatgatccaccatatggacgaccttccagtactatagcatatggaagaccaaacagaagtgcacctcgtgatccttcagatgcatatcctgtagactacttctctaaaagagaacatcctagtggaggccctatgtttactagtaatgccccatcagctgcttatgagagatatgcagcacccacacactttcctactagagaacctccctcaactttcagtcatcgttcctatcgtgaccacatgcctactgatagctactctagtaggggtacacagaaattagacatcacgagagatggaaattcagatgcttatgattatacagaggtacatctttgccgtgagcttccctcttttgcaaatggccatcacctaaaattttcattagaagcttgagactttacacatgactgttccactgtccctattctgttccataatttgctggcactactgaacattggggaaacgttatatgttggtgtcttagcttctgtggcagtaatgttcaccctataatgtggtcacactgtcacagtggtgcaactcttttcatttgttgtcacttgcatcttggttcaatatatatctggctgttggatgtactctgctgcttttagtttcaatcggtttttcttgatattatctatgcctaccagaacatctcatattctgtatatatttaaattttatcattgcacaggctgctggacaaattcatggactggaggactatagaggactgccaagtgcttctggaaggttctcgagcactattgaactaaggattccaaatagttctttggagtctattgttggtgttggcggggtcaatttagcagagatacgtcagatttctggtgcaagactgaggctacatgaggctcatgctggttcttctgagtctgtggtggagatccagggcacactggaccaagcaaaagctgcgcagagcctcctggagggctttatcagcgcgaacagcaggcagcagcaatcccattcttctcgcatgccactttacccaagatggggatagcttctggttgtggcaggggaaaaccgagtcagcagggttggctggagttatctcagactgcagattagatgcatcgatgatgttaatggtagctgtttaaattgaccgtgcaagcatgataacttatattatgccataggacaagtaatgctgattctctcatgaaatactaagtgacaagctgtctctgtagttgtatttgtttctgaatgtttgaaccctactgttacaacggctgctattttaggtcagatttcagaggccggataattatgttatctgcagagttgggccaaaaaaaaaagctcaatctggttgagactggcttcacccatgccgtttcatttttagaagttacagcatctctgcaaaatatatgggtaaggcctcttggaacgcatgaatttcatagaaatcagtttattttctcagaaaaaacatgggaaacaggggaaaaaaatcccacgttccaagaggcctaaagtttgtgtctgtttagatcct

SEQ ID NO: 209219 - DNA, 3304 bp, Zea Mays
cagccacggactctgagtctctgacgctgccttttgctctccccttccaccccgtctgcccgcgcgcgctgtctcgtggcgacaactgggcgaccgccgccgccgtcgctgccgccgctacgccaagaagctaggtcttcatcggtcccttcgtcgagattttctccggagacaagcacccagcaggggactacaagattgattttgatggattatgacaagtctagaagaagtaactccaaaaagaggagacattccaattctgatgacggaaagaggaaacggttgagctctaggcatgatgacacatctatgtcctctgagccaattgaaaccatctacaggatattgtgcccggcaaaaaagataggcagtgtcttgggaagaggtggtgacattgttaaggcccttagagaggaaactaaagccaagataagggttgccgattccattcctggtgcagatgagagagtaattatcatcttcaattaccaaaatcaacctgaacttactgatgaagcagctgaaaaacaaattagtgatggcttagggaacatgaaaccccattgctttgcccaagatgccttattgaagatacatgataagattgtggctgatgaaatttatgatgaagtcgctcatgatgaaagttctgatgatgtcactgctcgaattttggttcaaggcaatcaagttggctgccttctaggaaaaggtggctccattatacaacaactacgaagtgatactggtgctgggatccgtgtcttgtcatctgaaaaccttccccagtgtgcacttcaaagtgatgaactggtgcagatatctggagcaccatctcttgtaagaaaagctctatatgaaatatctactcgtctccatcagcatcctcgtaaggaaaatagacctcttgaacaaataatagatgcaagcacacaaaggaaacacgagtctccaacactgcaacatgaaaatccaatgttgccgcacctgcatagtcatcatccacctccaatacccctgcttgacccatacagaagtggacctcagtatcctgttagtgaaactgaagagttttctatcagaatcctatgtgcttctgagctcattggttcagttattgggaaaagtggggctaatgttaggcgggtagagcagcagactggtgctcgcattaaagttcaagagattgacaaagatgcttctggagaaaggctgatcattgtttcatctaacgagataccaactgaaccaatatccccaacaattgaggcactcattttgctccacgataaagtgattactgaaatgagaagacgaactggggctgaaattcgagtttactcgaaggcagataaaccaaaatacttgtcttttggtgatgaacttgtgcaggttgcagggcctccagctattgcaagaggagccctcacagagattgcttcgaggcttagaactaggactttgagagatacaagtactgccaataatcctccaccttttgccccttccgatgatcctactgtcgatatgcctagcagaaaattaacactatatggagggcctaccaatgatacaccgtatggaaggcctgccaatgatccactgtatggaaggcctgccattgatccaccatttggaagacctaccaacgatcgaccatacggaaggcctgccatcgttccaccatttggaagacctaccaatgatccaccatatggaaggcctgccaatgatccaccatatgaaaggcctaccaatgatccaccatatggacgaccttccagtactatagcatatggaagaccaaacagaagtgcacctcgtgatccttcagatgcatatcctgtagactacttctctaaaagagaacatcctagtggaggccctatgtttactagtaatgccccatcagctgcttatgagagatatgcagcacccacacactttcctactagagaacctccctcaactttcagtcatcgttcctatcgtgaccacatgcctactgatagctactctagtaggggtacacagaaattagacatcacgagagatggaaattcagatgcttatgattatacagaggtacatctttgccgtgagcttccctcttttgcaaatggccatcacctaaaattttcattagaagcttgagactttacacatgactgttccactgtccctattctgttccataatttgctggcactactgaacattggggaaacgttatatgttggtgtcttagcttctgtggcagtaatgttcaccctataatgtggtcacactgtcacagtggtgcaactcttttcatttgttgtcacttgcatcttggttcaatatatatctggctgttggatgtactctgctgcttttagtttcaatcggtttttcttgatattatctatgcctaccagaacatctcatattctgtatatatttaaattttatcattgcacaggctgctggacaaattcatggactggaggactatagaggactgccaagtgcttctggaaggttctcgagcactattgaactaaggattccaaatagttctttggagtctattgttggtgttggcggggtcaatttagcagagatacgtcagatttctggtgcaagactgaggctacatgaggctcatgctggttcttctgagtctgtggtggagatccagggcacactggaccaagcaaaagctgcgcagagcctcctggagggctttatcagcgcgaacagcaggcagcagcaatcccattcttctcgcatgccactttacccaagatggggatagcttctggttgtggcaggggaaaaccgagtcagcagggttggctggagttatctcagactgcagattagatgcatcgatgatgttaatggtagctgtttaaattgaccgtgcaagcatgataacttatattatgccataggacaagtaatgctgattctctcatgaaatactaagtgacaagctgtctctgtagttgtatttgtttctgaatgtttgaaccctactgttacaacggctgctattttaggtcagatttcagaggccggataattatgttatctgcagagttgggccaaaaaaaaaagctcaatctggttgagactggcttcacccatgccgtttcatttttagaagttacagcatctctgcaaaatatatgggtaaggcctcttggaacgcatgaatttcatagaaatcagtttattttctcagaaaaaacatgggaaacaggggaaaaaaatcccacgttccaagaggcctaaagtttgtgtctgtttagatcct

SEQ ID NO: 209220 - DNA, 3309 bp, Zea Mays
cagccacggactctgagtctctgacgctgccttttgctctccccttccaccccgtctgcccgcgcgcgctgtctcgtggcgacaactgggcgaccgccgccgccgtcgctgccgccgctacgccaagaagctaggtcttcatcggtcccttcgtcgagattttctccggagacaagcacccagcaggggactacaagattgattttgatggattatgacaagtctagaagaagtaactccaaaaagaggagacattccaattctgatgacggaaagaggaaacggttgagctctaggcatgatgacacatctatgtcctctgagccaattgaaaccatctacaggatattgtgcccggcaaaaaagataggcagtgtcttgggaagaggtggtgacattgttaaggcccttagagaggaaactaaagccaagataagggttgccgattccattcctggtgcagatgagagagtaattatcatcttcaattaccaaaatcaacctgaacttactgatgaagcagctgaaaaacaaattagtgatggcttagggaacatgaaaccccattgctttgcccaagatgccttattgaagatacatgataagattgtggctgatgaaatttatgatgaagtcgctcatgatgaaagttctgatgatgtcactgctcgaattttggttcaaggcaatcaagttggctgccttctaggaaaaggtggctccattatacaacaactacgaagtgatactggtgctgggatccgtgtcttgtcatctgaaaaccttccccagtgtgcacttcaaagtgatgaactggtgcagatatctggagcaccatctcttgtaagaaaagctctatatgaaatatctactcgtctccatcagcatcctcgtaaggaaaatagacctcttgaacaaataatagatgcaagcacacaaaggaaacacgagtctccaacactgcaacatgaaaatccaatgttgccgcacctgcatagtcatcatccacctccaatacccctgcttgacccatacagaagtggacctcagtatcctgttagtgaaactgaagagttttctatcagaatcctatgtgcttctgagctcattggttcagttattgggaaaagtggggctaatgttaggcgggtagagcagcagactggtgctcgcattaaagttcaagagattgacaaagatgcttctggagaaaggctgatcattgtttcatctaacgagataccaactgaaccaatatccccaacaattgaggcactcattttgctccacgataaagtgggcaggtgattactgaaatgagaagacgaactggggctgaaattcgagtttactcgaaggcagataaaccaaaatacttgtcttttggtgatgaacttgtgcaggttgcagggcctccagctattgcaagaggagccctcacagagattgcttcgaggcttagaactaggactttgagagatacaagtactgccaataatcctccaccttttgccccttccgatgatcctactgtcgatatgcctagcagaaaattaacactatatggagggcctaccaatgatacaccgtatggaaggcctgccaatgatccactgtatggaaggcctgccattgatccaccatttggaagacctaccaacgatcgaccatacggaaggcctgccatcgttccaccatttggaagacctaccaatgatccaccatatggaaggcctgccaatgatccaccatatgaaaggcctaccaatgatccaccatatggacgaccttccagtactatagcatatggaagaccaaacagaagtgcacctcgtgatccttcagatgcatatcctgtagactacttctctaaaagagaacatcctagtggaggccctatgtttactagtaatgccccatcagctgcttatgagagatatgcagcacccacacactttcctactagagaacctccctcaactttcagtcatcgttcctatcgtgaccacatgcctactgatagctactctagtaggggtacacagaaattagacatcacgagagatggaaattcagatgcttatgattatacagaggtacatctttgccgtgagcttccctcttttgcaaatggccatcacctaaaattttcattagaagcttgagactttacacatgactgttccactgtccctattctgttccataatttgctggcactactgaacattggggaaacgttatatgttggtgtcttagcttctgtggcagtaatgttcaccctataatgtggtcacactgtcacagtggtgcaactcttttcatttgttgtcacttgcatcttggttcaatatatatctggctgttggatgtactctgctgcttttagtttcaatcggtttttcttgatattatctatgcctaccagaacatctcatattctgtatatatttaaattttatcattgcacaggctgctggacaaattcatggactggaggactatagaggactgccaagtgcttctgggttctcgagcactattgaactaaggattccaaatagttctttggagtctattgttggtgttggcggggtcaatttagcagagatacgtcagatttctggtgcaagactgaggctacatgaggctcatgctggttcttctgagtctgtggtggagatccagggcacactggaccaagcaaaagctgcgcagagcctcctggagggctttatcagcgcgaacagcaggcagcagcaatcccattcttctcgcatgccactttacccaagatggggatagcttctggttgtggcaggggaaaaccgagtcagcagggttggctggagttatctcagactgcagattagatgcatcgatgatgttaatggtagctgtttaaattgaccgtgcaagcatgataacttatattatgccataggacaagtaatgctgattctctcatgaaatactaagtgacaagctgtctctgtagttgtatttgtttctgaatgtttgaaccctactgttacaacggctgctattttaggtcagatttcagaggccggataattatgttatctgcagagttgggccaaaaaaaaaagctcaatctggttgagactggcttcacccatgccgtttcatttttagaagttacagcatctctgcaaaatatatgggtaaggcctcttggaacgcatgaatttcatagaaatcagtttattttctcagaaaaaacatgggaaacaggggaaaaaaatcccacgttccaagaggcctaaagtttgtgtctgtttagatcct

SEQ ID NO: 209221 - DNA, 2132 bp, Zea Mays
cacggactctgagtctctgacgctgccttttgctctccccttccaccccgtctgcccgcgcgcgctgtctcgtggcgacaactgggcgaccgccgccgccgtcgctgccgccgctacgccaagaagctaggtcttcatcggtcccttcgtcgagattttctccggagacaagcacccagcaggggactacaagattgattttgatggattatgacaagtctagaagaagtaactccaaaaagaggagacattccaattctgatgacggaaagaggaaacggttgagctctaggcatgatgacacatctatgtcctctgagccaattgaaaccatctacaggatattgtgcccggcaaaaaagataggcagtgtcttgggaagaggtggtgacattgttaaggcccttagagaggaaactaaagccaagataagggttgccgattccattcctggtgcagatgagagagtaattatcatcttcaattaccaaaatcaacctgaacttactgatgaagcagctgaaaaacaaattagtgatggcttagggaacatgaaaccccattgctttgcccaagatgccttattgaagatacatgataagattgtggctgatgaaatttatgatgaagtcgctcatgatgaaagttctgatgatgtcactgctcgaattttggttcaaggcaatcaagttggctgccttctaggaaaaggtggctccattatacaacaactacgaagtgatactggtgctgggatccgtgtcttgtcatctgaaaaccttccccagtgtgcacttcaaagtgatgaactggtgcagatatctggagcaccatctcttgtaagaaaagctctatatgaaatatctactcgtctccatcagcatcctcgtaaggaaaatagacctcttgaacaaataatagatgcaagcacacaaaggaaacacgagtctccaacactgcaacatgaaaatccaatgttgccgcacctgcatagtcatcatccacctccaatacccctgcttgacccatacagaagtggacctcagtatcctgttagtgaaactgaagagttttctatcagaatcctatgtgcttctgagctcattggttcagttattgggaaaagtggggctaatgttaggcgggtagagcagcagactggtgctcgcattaaagttcaagagattgacaaagatgcttctggagaaaggctgatcattgtttcatctaacgagataccaactgaaccaatatccccaacaattgaggcactcattttgctccacgataaagctgctggacaaattcatggactggaggactatagaggactgccaagtgcttctggaaggttctcgagcactattgaactaaggattccaaatagttctttggagtctattgttggtgttggcggggtcaatttagcagagatacgtcagatttctggtgcaagactgaggctacatgaggctcatgctggttcttctgagtctgtggtggagatccagggcacactggaccaagcaaaagctgcgcagagcctcctggagggctttatcagcgcgaacagcaggcagcagcaatcccattcttctcgcatgccactttacccaagatggggatagcttctggttgtggcaggggaaaaccgagtcagcagggttggctggagttatctcagactgcagattagatgcatcgatgatgttaatggtagctgtttaaattgaccgtgcaagcatgataacttatattatgccataggacaagtaatgctgattctctcatgaaatactaagtgacaagctgtctctgtagttgtatttgtttctgaatgtttgaaccctactgttacaacggctgctattttaggtcagatttcagaggccggataattatgttatctgcagagttgggccaaaaaaaaaagctcaatctggttgagactggcttcacccatgccgtttcatttttagaagttacagcatctctgcaaaatatatgggtaaggcctcttggaacgcatgaatttcatagaaatcagtttattttctcagaaaaaacatgggaaacaggggaaaaaaatcccacgttccaagaggcctaaagtttgtgtctgtttagatcct

SEQ ID NO: 209222 - DNA, 2924 bp, Zea Mays
cacggactctgagtctctgacgctgccttttgctctccccttccaccccgtctgcccgcgcgcgctgtctcgtggcgacaactgggcgaccgccgccgccgtcgctgccgccgctacgccaagaagctaggtcttcatcggtcccttcgtcgagattttctccggagacaagcacccagcaggggactacaagattgattttgatggattatgacaagtctagaagaagtaactccaaaaagaggagacattccaattctgatgacggaaagaggaaacggttgagctctaggcatgatgacacatctatgtcctctgagccaattgaaaccatctacaggatattgtgcccggcaaaaaagataggcagtgtcttgggaagaggtggtgacattgttaaggcccttagagaggaaactaaagccaagataagggttgccgattccattcctggtgcagatgagagagtaattatcatcttcaattaccaaaatcaacctgaacttactgatgaagcagctgaaaaacaaattagtgatggcttagggaacatgaaaccccattgctttgcccaagatgccttattgaagatacatgataagattgtggctgatgaaatttatgatgaagtcgctcatgatgaaagttctgatgatgtcactgctcgaattttggttcaaggcaatcaagttggctgccttctaggaaaaggtggctccattatacaacaactacgaagtgatactggtgctgggatccgtgtcttgtcatctgaaaaccttccccagtgtgcacttcaaagtgatgaactggtgcagatatctggagcaccatctcttgtaagaaaagctctatatgaaatatctactcgtctccatcagcatcctcgtaaggaaaatagacctcttgaacaaataatagatgcaagcacacaaaggaaacacgagtctccaacactgcaacatgaaaatccaatgttgccgcacctgcatagtcatcatccacctccaatacccctgcttgacccatacagaagtggacctcagtatcctgttagtgaaactgaagagttttctatcagaatcctatgtgcttctgagctcattggttcagttattgggaaaagtggggctaatgttaggcgggtagagcagcagactggtgctcgcattaaagttcaagagattgacaaagatgcttctggagaaaggctgatcattgtttcatctaacgagataccaactgaaccaatatccccaacaattgaggcactcattttgctccacgataaagtgattactgaaatgagaagacgaactggggctgaaattcgagtttactcgaaggcagataaaccaaaatacttgtcttttggtgatgaacttgtgcaggttgcagggcctccagctattgcaagaggagccctcacagagattgcttcgaggcttagaactaggactttgagagatacaagtactgccaataatcctccaccttttgccccttccgatgatcctactgtcgatatgcctagcagaaaattaacactatatggagggcctaccaatgatacaccgtatggaaggcctgccaatgatccactgtatggaaggcctgccattgatccaccatttggaagacctaccaacgatcgaccatacggaaggcctgccatcgttccaccatttggaagacctaccaatgatccaccatatggaaggcctgccaatgatccaccatatgaaaggcctaccaatgatccaccatatggacgaccttccagtactatagcatatggaagaccaaacagaagtgcacctcgtgatccttcagatgcatatcctgtagactacttctctaaaagagaacatcctagtggaggccctatgtttactagtaatgccccatcagctgcttatgagagatatgcagcacccacacactttcctactagagaacctccctcaactttcagtcatcgttcctatcgtgaccacatgcctactgatagctactctagtaggggtacacagaaattagacatcacgagagatggaaattcagatgcttatgattatacagaggctgctggacaaattcatggactggaggactatagaggactgccaagtgcttctggaaggttctcgagcactattgaactaaggattccaaatagttctttggagtctattgttggtgttggcggggtcaatttagcagagatacgtcagatttctggtgcaagactgaggctacatgaggctcatgctggttcttctgagtctgtggtggagatccagggcacactggaccaagcaaaagctgcgcagagcctcctggagggctttatcagcgcgaacagcaggcagcagcaatcccattcttctcgcatgccactttacccaagatggggatagcttctggttgtggcaggggaaaaccgagtcagcagggttggctggagttatctcagactgcagattagatgcatcgatgatgttaatggtagctgtttaaattgaccgtgcaagcatgataacttatattatgccataggacaagtaatgctgattctctcatgaaatactaagtgacaagctgtctctgtagttgtatttgtttctgaatgtttgaaccctactgttacaacggctgctattttaggtcagatttcagaggccggataattatgttatctgcagagttgggccaaaaaaaaaagctcaatctggttgagactggcttcacccatgccgtttcatttttagaagttacagcatctctgcaaaatatatgggtaaggcctcttggaacgcatgaatttcatagaaatcagtttattttctcagaaaaaacatgggaaacaggggaaaaaaatcccacgttccaagaggcctaaagtttgtgtctgtttagatcct

SEQ ID NO: 209223 - DNA, 2236 bp, Zea Mays
cacggactctgagtctctgacgctgccttttgctctccccttccaccccgtctgcccgcgcgcgctgtctcgtggcgacaactgggcgaccgccgccgccgtcgctgccgccgctacgccaagaagctaggtcttcatcggtcccttcgtcgagattttctccggagacaagcacccagcaggggactacaagattgattttgatggattatgacaagtctagaagaagtaactccaaaaagaggagacattccaattctgatgacggaaagaggaaacggttgagctctaggcatgatgacacatctatgtcctctgagccaattgaaaccatctacaggatattgtgcccggcaaaaaagataggcagtgtcttgggaagaggtggtgacattgttaaggcccttagagaggaaactaaagccaagataagggttgccgattccattcctggtgcagatgagagagtaattatcatcttcaattaccaaaatcaacctgaacttactgatgaagcagctgaaaaacaaattagtgatggcttagggaacatgaaaccccattgctttgcccaagatgccttattgaagatacatgataagattgtggctgatgaaatttatgatgaagtcgctcatgatgaaagttctgatgatgtcactgctcgaattttggttcaaggcaatcaagttggctgccttctaggaaaaggtggctccattatacaacaactacgaagtgatactggtgctgggatccgtgtcttgtcatctgaaaaccttccccagtgtgcacttcaaagtgatgaactggtgcagatatctggagcaccatctcttgtaagaaaagctctatatgaaatatctactcgtctccatcagcatcctcgtaaggaaaatagacctcttgaacaaataatagatgcaagcacacaaaggaaacacgagtctccaacactgcaacatgaaaatccaatgttgccgcacctgcatagtcatcatccacctccaatacccctgcttgacccatacagaagtggacctcagtatcctgttagtgaaactgaagagttttctatcagaatcctatgtgcttctgagctcattggttcagttattgggaaaagtggggctaatgttaggcgggtagagcagcagactggtgctcgcattaaagttcaagagattgacaaagatgcttctggagaaaggctgatcattgtttcatctaacgagataccaactgaaccaatatccccaacaattgaggcactcattttgctccacgataaagtgggcaggtgattactgaaatgagaagacgaactggggctgaaattcgagtttactcgaaggcagataaaccaaaatacttgtcttttggtgatgaacttgtgcaggctgctggacaaattcatggactggaggactatagaggactgccaagtgcttctgggttctcgagcactattgaactaaggattccaaatagttctttggagtctattgttggtgttggcggggtcaatttagcagagatacgtcagatttctggtgcaagactgaggctacatgaggctcatgctggttcttctgagtctgtggtggagatccagggcacactggaccaagcaaaagctgcgcagagcctcctggagggctttatcagcgcgaacagcaggcagcagcaatcccattcttctcgcatgccactttacccaagatggggatagcttctggttgtggcaggggaaaaccgagtcagcagggttggctggagttatctcagactgcagattagatgcatcgatgatgttaatggtagctgtttaaattgaccgtgcaagcatgataacttatattatgccataggacaagtaatgctgattctctcatgaaatactaagtgacaagctgtctctgtagttgtatttgtttctgaatgtttgaaccctactgttacaacggctgctattttaggtcagatttcagaggccggataattatgttatctgcagagttgggccaaaaaaaaaagctcaatctggttgagactggcttcacccatgccgtttcatttttagaagttacagcatctctgcaaaatatatgggtaaggcctcttggaacgcatgaatttcatagaaatcagtttattttctcagaaaaaacatgggaaacaggggaaaaaaatcccacgttccaagaggcctaaagtttgtgtctgtttagatcct

SEQ ID NO: 209224 - DNA, 2929 bp, Zea Mays
cacggactctgagtctctgacgctgccttttgctctccccttccaccccgtctgcccgcgcgcgctgtctcgtggcgacaactgggcgaccgccgccgccgtcgctgccgccgctacgccaagaagctaggtcttcatcggtcccttcgtcgagattttctccggagacaagcacccagcaggggactacaagattgattttgatggattatgacaagtctagaagaagtaactccaaaaagaggagacattccaattctgatgacggaaagaggaaacggttgagctctaggcatgatgacacatctatgtcctctgagccaattgaaaccatctacaggatattgtgcccggcaaaaaagataggcagtgtcttgggaagaggtggtgacattgttaaggcccttagagaggaaactaaagccaagataagggttgccgattccattcctggtgcagatgagagagtaattatcatcttcaattaccaaaatcaacctgaacttactgatgaagcagctgaaaaacaaattagtgatggcttagggaacatgaaaccccattgctttgcccaagatgccttattgaagatacatgataagattgtggctgatgaaatttatgatgaagtcgctcatgatgaaagttctgatgatgtcactgctcgaattttggttcaaggcaatcaagttggctgccttctaggaaaaggtggctccattatacaacaactacgaagtgatactggtgctgggatccgtgtcttgtcatctgaaaaccttccccagtgtgcacttcaaagtgatgaactggtgcagatatctggagcaccatctcttgtaagaaaagctctatatgaaatatctactcgtctccatcagcatcctcgtaaggaaaatagacctcttgaacaaataatagatgcaagcacacaaaggaaacacgagtctccaacactgcaacatgaaaatccaatgttgccgcacctgcatagtcatcatccacctccaatacccctgcttgacccatacagaagtggacctcagtatcctgttagtgaaactgaagagttttctatcagaatcctatgtgcttctgagctcattggttcagttattgggaaaagtggggctaatgttaggcgggtagagcagcagactggtgctcgcattaaagttcaagagattgacaaagatgcttctggagaaaggctgatcattgtttcatctaacgagataccaactgaaccaatatccccaacaattgaggcactcattttgctccacgataaagtgggcaggtgattactgaaatgagaagacgaactggggctgaaattcgagtttactcgaaggcagataaaccaaaatacttgtcttttggtgatgaacttgtgcaggttgcagggcctccagctattgcaagaggagccctcacagagattgcttcgaggcttagaactaggactttgagagatacaagtactgccaataatcctccaccttttgccccttccgatgatcctactgtcgatatgcctagcagaaaattaacactatatggagggcctaccaatgatacaccgtatggaaggcctgccaatgatccactgtatggaaggcctgccattgatccaccatttggaagacctaccaacgatcgaccatacggaaggcctgccatcgttccaccatttggaagacctaccaatgatccaccatatggaaggcctgccaatgatccaccatatgaaaggcctaccaatgatccaccatatggacgaccttccagtactatagcatatggaagaccaaacagaagtgcacctcgtgatccttcagatgcatatcctgtagactacttctctaaaagagaacatcctagtggaggccctatgtttactagtaatgccccatcagctgcttatgagagatatgcagcacccacacactttcctactagagaacctccctcaactttcagtcatcgttcctatcgtgaccacatgcctactgatagctactctagtaggggtacacagaaattagacatcacgagagatggaaattcagatgcttatgattatacagaggctgctggacaaattcatggactggaggactatagaggactgccaagtgcttctgggttctcgagcactattgaactaaggattccaaatagttctttggagtctattgttggtgttggcggggtcaatttagcagagatacgtcagatttctggtgcaagactgaggctacatgaggctcatgctggttcttctgagtctgtggtggagatccagggcacactggaccaagcaaaagctgcgcagagcctcctggagggctttatcagcgcgaacagcaggcagcagcaatcccattcttctcgcatgccactttacccaagatggggatagcttctggttgtggcaggggaaaaccgagtcagcagggttggctggagttatctcagactgcagattagatgcatcgatgatgttaatggtagctgtttaaattgaccgtgcaagcatgataacttatattatgccataggacaagtaatgctgattctctcatgaaatactaagtgacaagctgtctctgtagttgtatttgtttctgaatgtttgaaccctactgttacaacggctgctattttaggtcagatttcagaggccggataattatgttatctgcagagttgggccaaaaaaaaaagctcaatctggttgagactggcttcacccatgccgtttcatttttagaagttacagcatctctgcaaaatatatgggtaaggcctcttggaacgcatgaatttcatagaaatcagtttattttctcagaaaaaacatgggaaacaggggaaaaaaatcccacgttccaagaggcctaaagtttgtgtctgtttagatcct

SEQ ID NO: 209225 - DNA, 3297 bp, Zea Mays
cacggactctgagtctctgacgctgccttttgctctccccttccaccccgtctgcccgcgcgcgctgtctcgtggcgacaactgggcgaccgccgccgccgtcgctgccgccgctacgccaagaagctaggtcttcatcggtcccttcgtcgagattttctccggagacaagcacccagcaggggactacaagattgattttgatggattatgacaagtctagaagaagtaactccaaaaagaggagacattccaattctgatgacggaaagaggaaacggttgagctctaggcatgatgacacatctatgtcctctgagccaattgaaaccatctacaggatattgtgcccggcaaaaaagataggcagtgtcttgggaagaggtggtgacattgttaaggcccttagagaggaaactaaagccaagataagggttgccgattccattcctggtgcagatgagagagtaattatcatcttcaattaccaaaatcaacctgaacttactgatgaagcagctgaaaaacaaattagtgatggcttagggaacatgaaaccccattgctttgcccaagatgccttattgaagatacatgataagattgtggctgatgaaatttatgatgaagtcgctcatgatgaaagttctgatgatgtcactgctcgaattttggttcaaggcaatcaagttggctgccttctaggaaaaggtggctccattatacaacaactacgaagtgatactggtgctgggatccgtgtcttgtcatctgaaaaccttccccagtgtgcacttcaaagtgatgaactggtgcagatatctggagcaccatctcttgtaagaaaagctctatatgaaatatctactcgtctccatcagcatcctcgtaaggaaaatagacctcttgaacaaataatagatgcaagcacacaaaggaaacacgagtctccaacactgcaacatgaaaatccaatgttgccgcacctgcatagtcatcatccacctccaatacccctgcttgacccatacagaagtggacctcagtatcctgttagtgaaactgaagagttttctatcagaatcctatgtgcttctgagctcattggttcagttattgggaaaagtggggctaatgttaggcgggtagagcagcagactggtgctcgcattaaagttcaagagattgacaaagatgcttctggagaaaggctgatcattgtttcatctaacgagataccaactgaaccaatatccccaacaattgaggcactcattttgctccacgataaagtgattactgaaatgagaagacgaactggggctgaaattcgagtttactcgaaggcagataaaccaaaatacttgtcttttggtgatgaacttgtgcaggttgcagggcctccagctattgcaagaggagccctcacagagattgcttcgaggcttagaactaggactttgagagatacaagtactgccaataatcctccaccttttgccccttccgatgatcctactgtcgatatgcctagcagaaaattaacactatatggagggcctaccaatgatacaccgtatggaaggcctgccaatgatccactgtatggaaggcctgccattgatccaccatttggaagacctaccaacgatcgaccatacggaaggcctgccatcgttccaccatttggaagacctaccaatgatccaccatatggaaggcctgccaatgatccaccatatgaaaggcctaccaatgatccaccatatggacgaccttccagtactatagcatatggaagaccaaacagaagtgcacctcgtgatccttcagatgcatatcctgtagactacttctctaaaagagaacatcctagtggaggccctatgtttactagtaatgccccatcagctgcttatgagagatatgcagcacccacacactttcctactagagaacctccctcaactttcagtcatcgttcctatcgtgaccacatgcctactgatagctactctagtaggggtacacagaaattagacatcacgagagatggaaattcagatgcttatgattatacagaggtacatctttgccgtgagcttccctcttttgcaaatggccatcacctaaaattttcattagaagcttgagactttacacatgactgttccactgtccctattctgttccataatttgctggcactactgaacattggggaaacgttatatgttggtgtcttagcttctgtggcagtaatgttcaccctataatgtggtcacactgtcacagtggtgcaactcttttcatttgttgtcacttgcatcttggttcaatatatatctggctgttggatgtactctgctgcttttagtttcaatcggtttttcttgatattatctatgcctaccagaacatctcatattctgtatatatttaaattttatcattgcacaggctgctggacaaattcatggactggaggactatagaggactgccaagtgcttctgggttctcgagcactattgaactaaggattccaaatagttctttggagtctattgttggtgttggcggggtcaatttagcagagatacgtcagatttctggtgcaagactgaggctacatgaggctcatgctggttcttctgagtctgtggtggagatccagggcacactggaccaagcaaaagctgcgcagagcctcctggagggctttatcagcgcgaacagcaggcagcagcaatcccattcttctcgcatgccactttacccaagatggggatagcttctggttgtggcaggggaaaaccgagtcagcagggttggctggagttatctcagactgcagattagatgcatcgatgatgttaatggtagctgtttaaattgaccgtgcaagcatgataacttatattatgccataggacaagtaatgctgattctctcatgaaatactaagtgacaagctgtctctgtagttgtatttgtttctgaatgtttgaaccctactgttacaacggctgctattttaggtcagatttcagaggccggataattatgttatctgcagagttgggccaaaaaaaaaagctcaatctggttgagactggcttcacccatgccgtttcatttttagaagttacagcatctctgcaaaatatatgggtaaggcctcttggaacgcatgaatttcatagaaatcagtttattttctcagaaaaaacatgggaaacaggggaaaaaaatcccacgttccaagaggcctaaagtttgtgtctgtttagatcct

SEQ ID NO: 209226 - DNA, 3378 bp, Zea Mays
ccctcccctcacgcgcgcggcgcttattataaattgctcctccccgcccggcggcagaaagatggcctggctagctagctgggacttctttggcgcgttaaaacctgccttcttggcagcccagctcgcagtcgcagtcgcaggtcactcactagctagcttgggccctcgtcatctcgttccgcccaggtgaaagtttggcgcgcatgcacgttagcaggcaggaagtagcagcttcgtcttaacacccacccacctactactaccctgctgcaaaccgcaaccgcgcccgcgcgggagagcttaccctcgcgcaccaccaagcccgcacctgcatttctttgcggccgcgcgcgcgcgggccaatggggagttcctgcgtgaacctctcccgcgccgtcctccccggcttcggcgccgccgagggatcccgccgccgccgtggcctccttctcccgctgctgtcgtcgtcgtcgaggcgcctgcacggcggcggcgccgtggcgtgctgctcgtcgtcgtcctccgctactgctgccggctcatcgaggccgccgccaccgctgccgtccttcgtcgacccggcgcacggggatccgcctggagctgccggcggcgggatcggtgtcgccgagtttctcggcgccaagaacttcctcatcaccggcgggaccggtttcctggcaaaagttcttatcgagaagattttgaggacaaaccctgacgtcggcaaggtgtacgtgctcatcaaggccaaggacagcgaagcagcgttggcgagattgcgaaacgaggacatccacggggaaggctacgacggcttcatcgcaaggaagctggtccccgtcgtcggcgacgtcagggaagccaacgtcggcatcgcgcccgacctcgccgacgagatcgccgaccaggtggacgtcatcatcaactcagcggccaacaccacgttcgacgagcggtacgacgtcgccatggacatcaacaccgtggggccgttccggatcatgagcttcgcgcagcgcttccgacgcctcaagctcttcttgcaagtgtctacagcctacgtgaatggacagaggcaaggcctggtgctggagaagccgtttcgcatgggagacaccatagccaaggagctgccggggtggtcttcttctccagggcacaagatacccgtgctggacatcgaggcagagatcaagctggccttctactccacaagacaccgccccgatgattctccctcgtttgctcaagaaatgaaagatttgggcctagagaggtagctagctagctaggcaaaactccatgggtggcaagacacctatgtgttcaccaaggccatgggggagatggtcatcaactccatgcgaggagagataccggtggtcaccatcaggcccagcgtcatcgagagcacctggagggacccattcccgggctggatggaagggaacaggatgatggatcctgtggtcctctattacgggaaaggccagctgacggggttcctcgcagatccagatggtgttcttgatgtggtcccggcggacatggtggtgaacgcgacgctggcgtcgatggcgaagcacggcggcggcgcggcggggcccgggatgcacgtgtaccacgtgtcgtcgtcgacggtgaaccctctggtgttcggcgacctgagccggttcctgttccagcacttcacgcggtgcccctacagcgacgcggcggggcagcccatcctggtgccgcccatgcgcctcttcgacaccatggagcagttcgccagctacgtggagacggacgcgctgctgcgcagcgcccggtcgacctcgtcctcgtcgtcgctggcgcagcgggcgcgcgacctgtgcgccaggtccgtggagcagaccgtccacctgggcagcatctaccggccctacaccttctacggcggccgcttcgacaacgccaacacggaggcgctgctcgcggccatgtcgccggcggagagggcgcggttccacttcgacgtgcggggcgtggactgggcggactacatcaccaacgtccacatccctggactccggaagcacgtcatgaagggcaggggcgtcgccgccaaccagctgctcgccagcacctccgtgtgaccgcccggcatgcgcgacggcgggcgtgtacactatctgccaggcccagaccgttgctgctgctacatgccattgccatgccgccgtcacaccacacggccggtgaccgacgaccaatcttgccgtacgttccatcctcatactactgctacgtacgtagcagcaacctaaggttgcgcttgcattgcactaaagatagatataccatgctgttcatctctcctccatgttgagctgttgattcttgcgcttgtacttcaaaacaaaatgaactctgtgatggtcgtcagtaacaaatctgacgaaacatcgtggctgtctgatagtgtcattcccgacactgtaagccgttcttttaccaaaatttactttactgatggaaggagttcaacagttccttgcaattgatgaatggtgatacagattagcacacgcctatttgtagtacaagcttacgctacacaggtgcaaatggtactccggtctttttggccagttccacgactctgtaaaaactgcataaaacagagggcggccagagttgtaggtggatggccgcccttctctgtcgcctgaaaagggtgaaactctgggcatagtgcttcggcattcccctgttatttctgtctggcccttgatccagcagacgttgacatcgattatcacgacacaggctgggaaacggtaacatcgacagctcaaaggaaataatccggtgttcttcgcgtcacatctggctcacctctcctaggggctggttcaaactatgataataggtagacaaaattggtaaatcatatgcaataggcgtgtactaagaagtctgttttggggaccgaaaaaaacatctggatgtctttttaagaaaaaaacatatagatagtaaattcatatcagggtcatgccacaaaaatgagccaactaaaatggggaagtagcagaatgatgtggccacattacctggatgaatgtgtggctgttgcagtcgtcaacttccaaaatggatgccatattgccgcatcgatagcagtaatttggagcactgaatatggtgacaaccttttgctcctgtaaatacatgcatcgtgcatgatcagaaagattgcttcactcaaagctcagctccataagcgtctaaaagtcaaatcggcttacatgagcccagttatatccctccataactaattgatgagcccgagctacgagtttgagattgtttgtgtgattaaactgctctgatatgtcctgg

SEQ ID NO: 209227 - DNA, 2282 bp, Zea Mays
ctcacttctgcgtatgcacgagtatttcgtgtgcaccgaatattgggatttgggaggacaggcgcccgcactccgcctccgcttccctccgcctcgactctcgaccgcatctgagcactccgccggaggtccgcctccgcaggcaccgccacgccatgtcgaagccagcggatcagcagccgtcggacatgcaggtcgactcctccgtcgccgaggagaagccggccatcagattctccatcaacgtgcttgagctcatgagggaggcgcagatgcagcatggtctccgccagagcgactacacgcggtaccggagatactgctctgcacgactcagaaggctgtacaagtctctcaagtttttgcatggccgaggtaaatacaacagaaggaatataaccgagtcaacagtcacggatgtgagtgttttatatggccgagcgagcatggagtcatgccatggagaagaaaactgctggtacaaacgcaaaacaacgcatctacatgttgggtcgatttcggaaagcagttaaatgggcatcacttttttcacaattatgttctgtaaaaggagattccaggacatctctagaagctgaggcatatgcttcatatatgaagggtgctttgttttttgagcaagacaagaatatagatgccgcaatgataaatttcaagaatacgagggctatatatgaggagcttgggaagtatggcagtatagaaaatcaacttttatgccgtcagcgcatcgacgaagtggagcctatgattgatttctgttcacataaactaggtggatcatatttgcaagcacatgaactcctggatactgctaatgatcttctcaaggcgaagatggaggctgtattgtctgagacaagatcacagcaggcagcttccatgactgagtttaaatggcttggtcgcacttttcctattacaaatgcaaagacccgtgtctctattttgaaagcccagcagcttgagagagacttgagtgctgcagccacagaatcagttgctgctgacaaaaagcttgctatatttgataaaatattttctgcataccatgatgctcggagctgcatccgcaatgacctggcttctgctggcaatgctgaggatataaaagatgacctgaatggtcttgacaaggctgttagtgctgttctaggattgagaactatagaacgtaaccagttacttgttagcattggtaaaagtaaattcacaaagcatcgagatgaaaaaaatgagcgaaccacaaagccagaagaacttgttcggctatatgatctgcttattcagatttagttagctctggaagaaacaaaaatgaagaagaaaactcttttattcatgagtatgagctgaaaggcttggctttccgagctgagagatgtttctttttggctaagtcatatagttcagcaggcaaaagagctgaagcatatgcattattctgccatgcccatactctcactggttctgcactgcaacagcattcaaacagtcatgacaaggctttaatacaagatctggagtttctatctaacaactgtagatcaaatagctgcatagaacatgcaacaggcattatggaggaggagattgttcctttaaaactttctaaaggagtctcaactatgtcacttgctgataataaaacaaaggagaacaagtatctccttgatatgctagagagctatgaatcagcgattggtgagccgaacaccaaagctccatgtcgcattgctcaattcccacctcctttccaagcagttccatgcaatcctattgtgcttgacatggcttacaactcagttgagttcccaaaccttgagaaccgtatgaaaaaagaaaagaagggtcttctgagcaggttctggggttgaaagatggcatatgcctaggattttggtacattgtcccatcatttgatatgctttgtgcatgaacggtgtaaaactagaatgtcctgataatacctctctgatgggtgaaagatcttcagtattccgcccaaggatttttgagattctttatcagaaggttaatttagccgttgcaaagtacatctagctcggtgactgatcagcataaccttttgctgttactaaattttgagcaatgactgatttcttggattatcgatatttaagttgattcattttcatatcccaaagtaggcagggaacaataatgaaaatgttttcaatattaatttaccttgctactcaattaggtataaaattttatatttccatgctatataaaat

SEQ ID NO: 209228 - DNA, 2465 bp, Zea Mays
acttctgcgtatgcacgagtatttcgtgtgcaccgaatattgggatttgggaggacaggcgcccgcactccgcctccgcttccctccgcctcgactctcgaccgcatctgagcactccgccggaggtccgcctccgcaggcaccgccacgccatgtcgaagccagcggatcagcagccgtcggacatgcaggtcgactcctccgtcgccgaggagaagccggccatcagattctccatcaacgtgcttgagctcatgagggaggcgcagatgcagcatggtctccgccagagcgactacacgcggtaccggagatactgctctgcacgactcagaaggctgtacaagtctctcaagtttttgcatggccgaggtaaatacaacagaaggaatataaccgagtcaacagtcacggatgtgaggtgtggtctcttctgctgataatatgctatatagcatgttgcttgtcttcatatttctctttgcagtgttatataaaccttgtctgatgtttggagttggactattacaatttgtttaaacctggagaagacttatgaagcaatttaacatgtgggagtaggtttctccatgtagtgttttatatggccgagcgagcatggagtcatgccatggagaagaaaactgctggtacaaacgcaaaacaacgcatctacatgttgggtcgatttcggaaagcagttaaatgggcatcacttttttcacaattatgttctgtaaaaggagattccaggacatctctagaagctgaggcatatgcttcatatatgaagggtgctttgttttttgagcaagacaagaatatagatgccgcaatgataaatttcaagaatacgagggctatatatgaggagcttgggaagtatggcagtatagaaaatcaacttttatgccgtcagcgcatcgacgaagtggagcctatgattgatttctgttcacataaactaggtggatcatatttgcaagcacatgaactcctggatactgctaatgatcttctcaaggcgaagatggaggctgtattgtctgagacaagatcacagcaggcagcttccatgactgagtttaaatggcttggtcgcacttttcctattacaaatgcaaagacccgtgtctctattttgaaagcttgagagagacttgagtgctgcagccacagaatcagttgctgctgacaaaaagcttgctatatttgataaaatattttctgcataccatgatgctcggagctgcatccgcaatgacctggcttctgctggcaatgctgaggatataaaagatgacctgaatggtcttgacaaggctgttagtgctgttctaggattgagaactatagaacgtaaccagttacttgttagcattggtaaaagtaaattcacaaagcatcgagatgaaaaaaatgagcgaaccacaaagccagaagaacttgttcggctatatgatctgcttattcagaatgtaacggacttgacagatttagttagctctggaagaaacaaaaatgaagaagaaaactcttttattcatgagtatgagctgaaaggcttggctttccgagctgagagatgtttctttttggctaagtcatatagttcagcaggcaaaagagctgaagcatatgcattattctgccatgcccatactctcactggttctgcactgcaacagcattcaaacagtcatgacaaggctttaatacaagatctggagtttctatctaacaactgtagatcaaatagctgcatagaacatgcaacaggcattatggaggaggagattgttcctttaaaactttctaaaggagtctcaactatgtcacttgctgataataaaacaaaggagaacaagtatctccttgatatgctagagagctatgaatcagcgattggtgagccgaacaccaaagctccatgtcgcattgctcaattcccacctcctttccaagcagttccatgcaatcctattgtgcttgacatggcttacaactcagttgagttcccaaaccttgagaaccgtatgaaaaaagaaaagaagggtcttctgagcaggttctggggttgaaagatggcatatgcctaggattttggtacattgtcccatcatttgatatgctttgtgcatgaacggtgtaaaactagaatgtcctgataatacctctctgatgggtgaaagatcttcagtattccgcccaaggatttttgagattctttatcagaaggttaatttagccgttgcaaagtacatctagctcggtgactgatcagcataaccttttgctgttactaaattttgagcaatgactgatttcttggattatcgatatttaagttgattcattttcatatcccaaagtaggcagggaacaataatgaaaatgttttcaatattaatttaccttgctactcaattaggtataaaattttatatttccatgctatataaaat

SEQ ID NO: 209229 - DNA, 1678 bp, Zea Mays
cggcagaacatccgtcgacgtcgccgacaggcgacacgaggctcacggctcacggctcaccagtcacctctaggtcttttccaaaaaaaaaagaagcccctcctatccatccctatccctacccctacgagtatccaagtccaaccagcaagaggggaggtcaccgccggcgtcgacgcaagcaacatcactgccatcgtcacaggagcgacgaatggcattggaaaggagacagccagagttctagcactgaggggagccaaggtaatcataccagctaggacactggagagtggcctcaagttgaaggagagcctcgcagatgaggtcccaagctccaaggtacacgttatggagatggacctgagctgtctcagctccgtccgcgacttcgcacggtccttcaattcatcccacaagcatctgaacctcctcataaacaatgcagggatcatggcctgcccttaccagctgtccaaggatggaattgagctgcaattcgcaacgaatcatgttggccatttcttgctgacaagtctcctgctagacaagatgaaatcaactgctgcagagacaggtgtgcagggaaggatcataaacgtatcatcggtcgcgcataaaagaagtgatggtacatgctttgagctgaacaagctaaacgataaggctaggtacaaaccgttcattgcatacgcgcattcgaagttagccaatattctccacacaaatgagttgtccaggcgttttcaggaagaaggatgcaacctgacagcgaattccctgcatcctggagtgatcatcaccaatatcattcgctatgttgctggaaacagtgcgctgatttcggctctctcccctgtagcaaatcttgttctgaagagcgtgccccggggggctgcaactacttgttacttggcattgcaccctaatgtcaaaggtgtatctggtaaatacttcgctgattgcaatgaagcaacaccgactgctgtcgcgagagactcagagctggcgaagaggctatggtcgttcagcgaagaacttgtcaagatctatgctgatatgtcacagacgacacaggcaagcgaagaggaggaaaccacggttacgaaagacgttttccaagacaagtagcgtaatatatgttgctgcgttttctactttttgtacatgtcctctgggcccgaatggccagtgactgtaatagcacctaagtgcccgagactggtaaggggtattcagacaatcaatcaagaaaccacggtgcggctgaggcctgaggcagtcctctccgtcgttcacccaaatctgagatcactcgtgtgctcacgtcgacggtgattagccggtggccccgggtgttgcaagatagaagaccaaaattatacgatcatatggaaacaagatgtgcctgcaatcatatgatatgagagtactagtgttggataatttttattcttcggaaagcgccaaaatcataaacgtttgatagttttagcattaagagcagccttggttgtttatttgtttccatgcttcttgaattgtcaggaagatcatgacttgtgacgacattaacagctgttacactattggactggacttctttgtcgagtgtcccaaacatttggcaaaagactttttacactcggcaaattctttgtcgagtgttacacttagc

SEQ ID NO: 209230 - DNA, 3183 bp, Zea Mays
cctgtgtccggccagccatcgtcattggtttcgcgcactctcgctcctgctcccggttttgtcgctccccactctctcctccagacctctaccaccaccccacaccgccgcacgcccacacgcaaccacgaaacggaagttttcctcgccttgcctgccctctcgatccgatcgggacccaaccctagcccggaatggcggcggcgaccggcggcatgcggaaggcgccgtcgctggaatggcggtgggtgtccacggaggacgacgacgacgaggaccgcgccggggacggggccgccgccgcggtcgtcggggcggtgagcaggggcgggagctttgagtcggaggatgacgaggatgatgaagaggaggaggacgaggagaagaaggggaggaagaggctgatccggaccgtgccatccgtcgactggttcgacgtcgaggggaacgaggtctccgtcgcgcagcagctcgacgactccgaggacaatgtttcttgctcttcagactcttgctgtggtgtttggagatattggaattggtccattgtatacatttgatgtcatgtttaacaagtaccctattcttggagaggaggatgtccttggagcactctcactagttctgtatactcttatattgatgccattagtgaagtatgttttggttgtcctttgggccaatgatgacggtgaaggtggtctatttgccttgtattctttgatttgtagaaatgcaaaagtgtgtctcattccaaaccaagtacagtctgagaagaggatgtcaagttttcgactcaagcttccaacaccagagcttgagagatccataaaagtaaaagagaaacttgaatcgtcactactgttgaagaaggtgcttctaggcttagtcttgtttgggacttctatgtttatatccaatggagttatcacaccagcaatgtcagtgttatctgctgtcagtggcttgaaagttgggctaccaaatacctcacaagatgctgttgtgatgatttcaattgcacttcttgtagtattgtttagtgtacagaggtatgccactagcaaagtggggtttgcaattggcccttctttacttttatggttttgttgccttggaggaattggaatatacaatttgagtatatatggctcaacagcatttagggcatttaatcctctctacattatttattattttgggaggaatccttttcaggcttggctgtccctcggtggttgtcttttatgtgcaacaggatctgaggccatcttttcaaatctttgttactttcccgtaagatacgttcagtatatgtttgtgcttcttgttcttccttgccttgtcttggcgtatctaggacaagctgcttttctcattgccaaccaaaagtcatcggagcatgtcttcttttcatctattccaagtggagttttctggcctgttttcttagtggcgaatctggctgcactaattgccagtaggacaatgacggttgctatattccagtgcctaaagcagtctatagcacttggttgttttccccggctcaaaatcgttcatacatctcgaaaatttatggctaagatatacattcccgttgtaaactggtttctattggtttcctgcttgggctttatcattctgttcagaaacatatatgatgttggcaatgcatatgctattgctgagctcggggtgatgataatggccacggtttatgttacaataataatgcttctaatatgggagtccaatattacaaaggttctgtcatttgttatcacattcctgttcttggagctgattttcttctcatctgctctgagtagtgttggagatgggggttgggcgttgttgatttttgcatctgttctactcatgattatgtttatatggaactacgggagcaaactaaagtatgacagtgaagtcaagcagaagcttccaaaggatttgatgaggaagttagggcccaaccttggtaccatcagagctcctggactaggcttagtctgcagtgatattgtgaaaggagttcctgcaatttttggtcattttctgacctcactccctgcgatacactcgataattgtatttgtgtgtatcaggaatgtgccagttccggtggttcctcaaagtgaaaggttccttttccaacgtgtatgctcaaggggctatcacttgttccgctgtatagcgagatacgggtataaagacaagaagcaggagcaccatagcgtatttgagcgtcttctgattgaaggccttgagaaattcatacaaagagaggcagtagagctatccctacaaagcgaagacgacattgactcggacgaagagcctccaacccctgtgaagatcatcacagcaccaaatggcagcctgtactcgctcgatgtccctctcctggcagactatgtgccttcaacagagctcattcatgaagccagctgctccacgcctcaacacgatcctgtactggattatgcacagaaccttgaactggagctggcgttcatcgagcagtccaagcggtctggggtcatctacctcatcgataatcccatcatcaaggccaggaaggactcatggttcttcaagaagctgatgataaactatttcttcgcgttcctgaggaacaactgccgccgggcgatcatgttgatgagcatcccgcattcaaacatgatgcaggtgcgcatgacttcttatgtctgattgctggaactgcactggttctgttcatggatgtctgatacaaaccacactgacagtaaaagaatgaacgtggcaaatgcaaagaggatatcggcacttttgtttttgttcataatttgatgatggcttaggttgttgtcggaatctatctcccctgtagttgtacaatgccaaaatatagttggaagttttagctggtacaccattagggtgctgtattaaccttttttactcttgtgcagtaaagattctttttgtcagcctccttgattttgttagataaggtttttggtgtttgcaaagttactggtgaatgtggcaatttgtatgtatatttttgcctctttttttaggtaacggaagcataagcatctggctttgcgaaggaatcaggccaaagtttcaataaccgatttcacagacacttaaccaagataaagacaaaagcctaaacaccgagtc

SEQ ID NO: 209231 - DNA, 3017 bp, Zea Mays
atcgtcattggtttcgcgcactctcgctcctgctcccggttttgtcgctccccactctctcctccagacctctaccaccaccccacaccgccgcacgcccacacgcaaccacgaaacggaagttttcctcgccttgcctgccctctcgatccgatcgggacccaaccctagcccggaatggcggcggcgaccggcggcatgcggaaggcgccgtcgctggaatggcggtgggtgtccacggaggacgacgacgacgaggaccgcgccggggacggggccgccgccgcggtcgtcggggcggtgagcaggggcgggagctttgagtcggaggatgacgaggatgatgaagaggaggaggacgaggagaagaaggggaggaagaggctgatccggaccgtgccatccgtcgactggttcgacgtcgaggggaacgaggtctccgtcgcgcagcagctcgacgactccgaggagtttgattttggcaggacaatgtttcttgctcttcagactcttgctgtggtgtttggagatattggaattggtccattgtatacatttgatgtcatgtttaacaagtaccctattcttggagaggaggatgtccttggagcactctcactagttctgtatactcttatattgatgccattagtgaagtatgttttggttgtcctttgggccaatgatgacggtgaaggtggtctatttgccttgtattctttgatttgtagaaatgcaaaagtgtgtctcattccaaaccaagtacagtctgagaagaggatgtcaagttttcgactcaagcttccaacaccagagcttgagagatccataaaagtaaaagagaaacttgaatcgtcactactgttgaagaaggtgcttctaggcttagtcttgtttgggacttctatgtttatatccaatggagttatcacaccagcaatgtcagtgttatctgctgtcagtggcttgaaagttgggctaccaaatacctcacaagatgctgttgtgatgatttcaattgcacttcttgtagtattgtttagtgtacagaggcttggctgtccctcggtggttgtcttttatgtgcaacaggatctgaggccatcttttcaaatctttgttactttcccgtaagatacgttcagtatatgtttgtgcttcttgttcttccttgccttgtcttggcgtatctaggacaagctgcttttctcattgccaaccaaaagtcatcggagcatgtcttcttttcatctattccaagtggagttttctggcctgttttcttagtggcgaatctggctgcactaattgccagtaggacaatgacggttgctatattccagtgcctaaagcagtctatagcacttggttgttttccccggctcaaaatcgttcatacatctcgaaaatttatggctaagatatacattcccgttgtaaactggtttctattggtttcctgcttgggctttatcattctgttcagaaacatatatgatgttggcaatgcatatgctattgctgagctcggggtgatgataatggccacggtttatgttacaataataatgcttctaatatgggagtccaatattacaaaggttctgtcatttgttatcacattcctgttcttggagctgattttcttctcatctgctctgagtagtgttggagatgggggttgggcgttgttgatttttgcatctgttctactcatgattatgtttatatggaactacgggagcaaactaaagtatgacagtgaagtcaagcagaagcttccaaaggatttgatgaggaagttagggcccaaccttggtaccatcagagctcctggactaggcttagtctgcagtgatattgtgaaaggagttcctgcaatttttggtcattttctgacctcactccctgcgatacactcgataattgtatttgtgtgtatcaggaatgtgccagttccggtggttcctcaaagtgaaaggttccttttccaacgtgtatgctcaaggggctatcacttgttccgctgtatagcgagatacgggtataaagacaagaagcaggagcaccatagcgtatttgagcgtcttctgattgaaggccttgagaaattcatacaaagagaggcagtagagctatccctacaaagcgaagacgacattgactcggacgaagagcctccaacccctgtgaagatcatcacagcaccaaatggcagcctgtactcgctcgatgtccctctcctggcagactatgtgccttcaacagagctcattcatgaagccagctgctccacgcctcaacacgatcctgtactggattatgcacagaaccttgaactggagctggcgttcatcgagcagtccaagcggtctggggtcatctacctcatcgataatcccatcatcaaggccaggaaggactcatggttcttcaagaagctgatgataaactatttcttcgcgttcctgaggaacaactgccgccgggcgatcatgttgatgagcatcccgcattcaaacatgatgcaggtgcgcatgacttcttatgtctgattgctggaactgcactggttctgttcatggatgtctgatacaaaccacactgacagtaaaagaatgaacgtggcaaatgcaaagaggatatcggcacttttgtttttgttcataatttgatgatggcttaggttgttgtcggaatctatctcccctgtagttgtacaatgccaaaatatagttggaagttttagctggtacaccattagggtgctgtattaaccttttttactcttgtgcagtaaagattctttttgtcagcctccttgattttgttagataaggtttttggtgtttgcaaagttactggtgaatgtggcaatttgtatgtatatttttgcctctttttttaggtaacggaagcataagcatctggctttgcgaaggaatcaggccaaagtttcaataaccgatttcacagacacttaaccaagataaagacaaaagcctaaacaccgagtc

SEQ ID NO: 209232 - DNA, 2735 bp, Zea Mays
atcgtcattggtttcgcgcactctcgctcctgctcccggttttgtcgctccccactctctcctccagacctctaccaccaccccacaccgccgcacgcccacacgcaaccacgaaacggaagttttcctcgccttgcctgccctctcgatccgatcgggacccaaccctagcccggaatggcggcggcgaccggcggcatgcggaaggcgccgtcgctggaatggcggtgggtgtccacggaggacgacgacgacgaggaccgcgccggggacggggccgccgccgcggtcgtcggggcggtgagcaggggcgggagctttgagtcggaggatgacgaggatgatgaagaggaggaggacgaggagaagaaggggaggaagaggctgatccggaccgtgccatccgtcgactggttcgacgtcgaggggaacgaggtctccgtcgcgcagcagctcgacgactccgaggagtttgattttggcaggacaatgtttcttgctcttcagactcttgctgtggtgtttggagatattggaattggtccattgtatacatttgatgtcatgtttaacaagtaccctattcttggagaggaggatgtccttggagcactctcactagttctgtatactcttatattgatgccattagtgaagtatgttttggttgtcctttgggccaatgatgacggtgaaggtggtctatttgccttgtattctttgatttgtagaaatgcaaaagtgtgtctcattccaaaccaagtacagtctgagaagaggatgtcaagttttcgactcaagcttccaacaccagagcttgagagatccataaaagtaaaagagaaacttgaatcgtcactactgttgaagaaggtgcttctaggcttagtcttgtttgggacttctatgtttatatccaatggagttatcacaccagcaatgtcagtgttatctgctgtcagtggcttgaaagttgggctaccaaatacctcacaagatgctgttgtgatgatttcaattgcacttcttgtagtattgtttagtgtacagaggcttggctgtccctcggtggttgtcttttatgtgcaacaggatctgaggccatcttttcaaatctttgttactttcccgtaagatacgttcagtatatgtttgtgcttcttgttcttccttgccttgtcttggcgtatctaggacaagctgcttttctcattgccaaccaaaagtcatcggagcatgtcttcttttcatctattccaagtggagttttctggcctgttttcttagtggcgaatctggctgcactaattgccagtaggacaatgacggttgctatattccagtgcctaaagcagtctatagcacttggttgttttccccggctcaaaatcgttcatacatctcgaaaatttatggctaagatatacattcccgttgtaaactggtttctattggtttcctgcttgggctttatcattctgttcagaaacatatatgatgttggcaatgcatatggtaaataatctattgatatgcttttgatgccaatatgttctctatttattcttctgtttgtttcttctgatctgacaaagttccatcttgaacagctattgctgagctcggggtgatgataatggccacggtttatgttacaataataatgcttctaatatgggagtccaatattacaaaggttctgtcatttgttatcacattcctgttcttggagctgattttcttctcatctgctctgagtagtgttggagatgggggttgggcgttgttgatttttgcatctgttctactcatgattatgtttatatggaactacgggagcaaactaaagtatgacagtgaagtcaagcagaagcttccaaaggatttgatgaggaagttagggcccaaccttggtaccatcagagctcctggactaggcttagtctgcagtgatattgtgaaaggagttcctgcaatttttggtcattttctgacctcactccctgcgatacactcgataattgtatttgtgtgtatcaggaatgtgccagttccggtggttcctcaaagtgaaaggttccttttccaacgtgtatgctcaaggggctatcacttgttccgctgtatagcgagatacgggtataaagacaagaagcaggagcaccatagcgtatttgagcgtcttctgattgaaggccttgagaaattcatacaaagagaggcagtagagctatccctacaaagcgaagacgacattgactcggacgaagagcctccaacccctgtgaagatcatcacagcaccaaatggcagcctgtactcgctcgatgtccctctcctggcagactatgtgccttcaacagagctcattcatgaagccagctgctccacgcctcaacacgatcctgtactggattatgcacagaaccttgaactggagctggcgttcatcgagcagtccaagcggtctggggtcatctacctcatcgataatcccatcatcaaggccaggaaggactcatggttcttcaagaagctgatgataaactatttcttcgcgttcctgaggaacaactgccgccgggcgatcatgttgatgagcatcccgcattcaaacatgatgcaggtaacggaagcataagcatctggctttgcgaaggaatcaggccaaagtttcaataaccgatttcacagacacttaaccaagataaagacaaaagcctaaacaccgagtc

SEQ ID NO: 209233 - DNA, 2973 bp, Zea Mays
ctatctttcgcgtacagtttgttgtgctgtggcgccggccagcagcaaggcctggtttggagggcggtgggctgggctgggctgggctggtgatctcggcttgtgcgtgcgtgacttagggcctagagatgcaaaaaaagaagggaaaaaaaatgattcgtgactctcccgaggtgcggtgcggccgcaccccgcatgccattgcggtattgccaacgtcgcttcgcccctgaatccctccgctaccgcgcctagggttttaggcttttagcacacaccggcggcgctgcataccaagggcttcccctgcccgcgccgatgccgcgcaagcacgcgccggcgtttacgccggaggcagcctccgcctcttcgtcaggcggggctggccagccgcataacctccccgtgcttcaggcgaagatgaagcgtgacccggagggctacgaggaggagctccgccagctccaccgccacttcgagtcctcggtgttcctattccagcagcaggcggcgctggctacaacctcgtcctcgggaggcggcggggaggtggccaaggagctcggggacctcgccctgttccttgcccacgtcgcgcctttctacccggatgacctcgccgatttgcccgaccagattggtggcttgctcgacaccaacgcgcgtgggctgccgccggggctcaggtctcacctcgtgcaggcgcttgtattgctggtgaatcggaagattgtcgatcttgaggacacaatggagttattcatggagcttcaagttattggagatcgagctgtaaaaaagctagcattttcgcatattgtacacagtatcaggaggatgaaccagaagcacaagaatgaatcgacaaatcgtaaactgcaaaacgtcctttttaaattcttacaggctgaagaagagtcacgagcaaagagagcatttactatcctttgtgatcttcaccgtcggagggtctggtttgatgaacgcacaacaaatgcaatatgtgatgcttgtttccacccttcctctaggattatgatagctgctatttcatttcttcttggatatgaaaatgctccacaagaggatgatagcgacgcatcaagcagtgaagatgaagcagatcaaaacccacaaattcttctcagtaaacaggacgtttataaggcaaatcacaagggtacgtctgctagtaaaaaaaagaagaaagctaaattacagcgggtcattcgtagcatgaaaagacaacagcggaaatctgtcgaggaaactggttccagtttctattcacccctgacatatttaaaagatgcccagggttttgcggagaagcttttctctcggttgcagaaatgcaatgagcgatttgaggtaaggatgatgatgctaaaagtaatcgcgaggaccattgggctgcatcacttggttttgttgaacttctacccgtatcttcaaagatacgttcaacctcatcaacgagatgtgacgactctactcgctgcagcagttcaggcttgccatgatatggtacctccagatgctgttgaaccactgttcaagcagatagtaaatcagtttgtgcatgaccgttctcgtccagagatgatgaatgaggatctgctccaagacctcgttttatacaaaaagtcccatgagaaagctgtttccattgctgctcgttcgctgatcacattgttcagagagatctgtccttcattgttagtcaagaaagatcgtggccgtcctgtggatccaaaggctcggcccaaagcatttggagaagtcactgttgctagcaacgttcctggtgccgagttgctagatgaaaatatttcttcagaaggggaaagttcggacgatgagtctgatggttttcactccgatgatgagatggacttgacacctgcccctcctggaacagaagaaaatatggagggttcatctgttgcaaacaaacatgatgccgatggagataccaaagaggaagatgacgcatctgatgatgaagatggtacggatcaagatgactccaacagtgatagtgatgaactagacgatgactctgatgtggatgtgggtactgatatatctgatgaagacgaaggtgacgacggtgaactgaaagaaagcataaatggttcagaggatgaagctttagaccagaatgaagacagcgaagaggaagacaagtcaaaaggcagtggctctaaagcgcagaagaggaagttaaatgattatattggacagctaaattctgctgatgcaagccttcgagctctgaagaggttagcaactgccaagaaggctgaagaaccatctgatgaaactggtaaaattctatccgatgaagatttcaaacgcatcaaagaactcaaggctaagaaagaagcgaagctggctttggctcagcatggactaatcaagggtgtcgacacaaggtctgtaacctttaagatgccatcatctgaccagctcagcaggaagcgtgtcgatccacttgagcttgaggctcacgtcaggagaaagatgtccaaggaagaaaggttggcgttggtgaaagctggaagagaggatagaggtccttacatggcaagggcggccgtgaaacagaaaaagaccggtggactgagcaataagcagaagcagcacaagaagaggatgccactggcagcgactagagccaaggcagcacgttcccggcaggagaagaagcagcagcgcaagcgctccgggaatcagttcaggggccgcaaggcgtggaagtgagagagcctctgctgccgctttgcgattcatctagccgaatggccaatttttttgactctttgtatcttcttctgccagttaatgtttccatataataccttgattctatgagaatgcttttccatatttcgccgttggtatctgctccggtccccccctccgtatggtcctggaatgtgattcgtcttgggctgaaagcgagtagga

SEQ ID NO: 209234 - DNA, 3017 bp, Zea Mays
ctatctttcgcgtacagtttgttgtgctgtggcgccggccagcagcaaggcctggtttggagggcggtgggctgggctgggctgggctggtgatctcggcttgtgcgtgcgtgacttagggcctagagatgcaaaaaaagaagggaaaaaaaatgattcgtgactctcccgaggtgcggtgcggccgcaccccgcatgccattgcggtattgccaacgtcgcttcgcccctgaatccctccgctaccgcgcctagggttttaggcttttagcacacaccggcggcgctgcataccaagggcttcccctgcccgcgccgatgccgcgcaagcacgcgccggcgtttacgccggaggcagcctccgcctcttcgtcaggcggggctggccagccgcataacctccccgtgcttcaggcgaagatgaagcgtgacccggagggctacgaggaggagctccgccagctccaccgccacttcgagtcctcggtgttcctattccagcagcaggcggcgctggctacaacctcgtcctcgggaggcggcggggaggtggccaaggagctcggggacctcgccctgttccttgcccacgtcgcgcctttctacccggatgacctcgccgatttgcccgaccagattggtggcttgctcgacaccaacgcgcgtgggctgccgccggggctcaggtctcacctcgtgcaggcgcttgtattgctggtgaatcggaagattgtcgatcttgaggacacaatggagttattcatggagcttcaagttattggagatcgagctgtaaaaaagctagcattttcgcatattgtacacagtatcaggaggatgaaccagaagcacaagaatgaatcgacaaatcgtaaactgcaaaacgtcctttttaaattcttacaggctgaagaagagtcacgagcaaagagagcatttactatcctttgtgatcttcaccgtcggagggtctggtttgatgaacgcacaacaaatgcaatatgtgatgcttgtttccacccttcctctaggattatgatagctgctatttcatttcttcttggatatgaaaatgctccacaagaggatgatagcgacgcatcaagcagtgaagatgaagcagatcaaaacccacaaattcttctcagtaaacaggacgtttataaggcaaatcacaagggtacgtctgctagtaaaaaaaagaagaaagctaaattacagcgggtcattcgtagcatgaaaagacaacagcggaaatctgtcgaggaaactggttccagtttctattcacccctgacatatttaaaagatgcccagggttttgcggagaagcttttctctcggttgcagaaatgcaatgagcgatttgaggtaaggatgatgatgctaaaagtaatcgcgaggaccattgggctgcatcacttggttttgttgaacttctacccgtatcttcaaagatacgttcaacctcatcaacgagatgtgacgactctactcgctgcagcagttcaggcttgccatgatatgatgctgttgaaccactgttcaagcagatagtaaatcagtttgtgcatgaccgttctcgtccagaggctattgctgttggcttaaatgttgtgagagagatctgcatgagaatacctttgatgatgaatgaggatctgctccaagacctcgttttatacaaaaagtcccatgagaaagctgtttccattgctgctcgttcgctgatcacattgttcagagagatctgtccttcattgttagtcaagaaagatcgtggccgtcctgtggatccaaaggctcggcccaaagcatttggagaagtcactgttgctagcaacgttcctggtgccgagttgctagatgaaaatatttcttcagaaggggaaagttcggacgatgagtctgatggttttcactccgatgatgagatggacttgacacctgcccctcctggaacagaagaaaatatggagggttcatctgttgcaaacaaacatgatgccgatggagataccaaagaggaagatgacgcatctgatgatgaagatggtacggatcaagatgactccaacagtgatagtgatgaactagacgatgactctgatgtggatgtgggtactgatatatctgatgaagacgaaggtgacgacggtgaactgaaagaaagcataaatggttcagaggatgaagctttagaccagaatgaagacagcgaagaggaagacaagtcaaaaggcagtggctctaaagcgcagaagaggaagttaaatgattatattggacagctaaattctgctgatgcaagccttcgagctctgaagaggttagcaactgccaagaaggctgaagaaccatctgatgaaactggtaaaattctatccgatgaagatttcaaacgcatcaaagaactcaaggctaagaaagaagcgaagctggctttggctcagcatggactaatcaagggtgtcgacacaaggtctgtaacctttaagatgccatcatctgaccagctcagcaggaagcgtgtcgatccacttgagcttgaggctcacgtcaggagaaagatgtccaaggaagaaaggttggcgttggtgaaagctggaagagaggatagaggtccttacatggcaagggcggccgtgaaacagaaaaagaccggtggactgagcaataagcagaagcagcacaagaagaggatgccactggcagcgactagagccaaggcagcacgttcccggcaggagaagaagcagcagcgcaagcgctccgggaatcagttcaggggccgcaaggcgtggaagtgagagagcctctgctgccgctttgcgattcatctagccgaatggccaatttttttgactctttgtatcttcttctgccagttaatgtttccatataataccttgattctatgagaatgcttttccatatttcgccgttggtatctgctccggtccccccctccgtatggtcctggaatgtgattcgtcttgggctgaaagcgagtagga

SEQ ID NO: 209235 - DNA, 2941 bp, Zea Mays
cctcccctggataaaagcaatcctcccgcagaagcagaacgattccggaaagtgtctcgaatcttccaaattctttcccgagacctaaaattctctcgacggattcgcctgatctgacacgcgatctctcggctcgccccaatggccgacaaggagaagttggagtctgaagaggagtacgagagcgacctcgacgacgcacccctctccgcgttgcggcgccgggacgctgcgagcgatgacgaggacgaggatgaggacggagggatgcccttgaggcggaggaaggctggatccgacgcagattccgacgggcagggcgccgccgaggtgtacgacgaggatggcgcgtacgaagaaagcgaggagtacgaggaatacgagtacggggggttcaaagcagggggcggcggagtgcgcggggtggctgtcgaggcggttgccggtgcgggccatgaggaaggcgaggcgggggatggggaagctgaaaaggcgggtgaggcagcgccaggaggcgaagaggaggacaagaaggggaacgaaccctactccgttccgacgaccggcgccttctacatgcacgacgaccgcttccaggagggccgggggcgggggcgggggcgccaaaggagaatggtgaacagtagaaggttatggagtcctaaagatgagcaagcctgggttcatgacagatttgatgagatggacctgcatgattttcatggtgacaatccaaaaagaaagcagggaggtgtctttagaggacgtggtggtggacaaggtggtagaactcgtggtattagccgtggtaacttcagaggcagcagaactcgaacatactatcatgatggtagcaagaactacagctatgttccaaaggaatctcatgcataccgtgataacaccaagaatgcccatcattcttcacacattaatggaaagaatagagttccaaaaccatctcgtgaccactatgatggtgctaaaagttatgacattgtcccaaatgaatctcacatttaccatggtgatgctaagagccaaaaaaatgcaccaagagtagttcgagggagaggctccaagcgttaccaaccacgcttgaaaagcacctctgatgtatcttcagtgcaaaataccaaatctcagagtcttgaaggcacttcgtcaaatgcaaacttggtaaaagatgaagctcaaggaccaaattcacgacttgagcaagtccttcctattaagcagactgttgcatcaaacttgaattcagcttcgccaccattttatcctgcgaggtcatccagtcaagagtttgcagttggtcaaggagagaatacacaagaacttagtactaacctagtaagaggaaaggcttttgtgccatcggggcatgttgaagctgctataaatggcatgaatagacctgcactgcttccacctgcatcgtcatcaaatggtccatttcctgtagccactaatcaagtcaatagagattatggccatcctgcacatccaattgttcaacaaaacccagttcaaccccctacacgatctgcacccaggatgcctgcccagatgtttggtgcaacattcagcaatggcagtaaaatatcacctgcacaacctacatcaactattttagatgatgacgctgaaatttcttcacctagtggatcaaacaaatatgattctcggttaacagttaaaggacaacctgatgaccaaggagaagagcgagcttcgtttctctatggtggggctcgtgttcttggggctacaagcgcaatgggaatcacacttggtgatcaaaattttcatggtaccccagcattgctgccagttatgcagtttggaggtcagcgaccagttggacgtggtgttccttcaattggtatggctctgccaggatttgtgtctcaacagcaacttggtatcaataattctgagatgacttggctaccaatattgactggtgcctctggagctctaggagcaccttatggttcaccttatatagccgtcgatggaagttattactctcgaccgcctgaacaaccatcttcatcagtttctaatagagaatctagtgcaaataatgcttcttctctgaagtcccaagaaattacagaggttgcaggcgacgcaagaactcaacaccaaaataaacctcgtcgatactcggagatgaactttggccagtgaacatagtgatgatagtaaatcagtgagggttcattggagctttggatccaagtaagacttgtgcaagagaccctggccttaccaagtgcttccagcatttcactgtctgatgtctagcactatcttgtgacccaaacgaggtttgacaggaggtgttcaaaccatcgctgtggtcatttgctgtgattattctgacgggctggtgttgttacaatcattaggtgagattttctggtactctacgtcaccacaataccagacggtcggtccgtaagtgtgaaggtcttgatggaaatcgtgaggacggaggtctcggtcgtactgcaaagctcgtgtccccgctgtacagtgtacatcacgtctctgactgtgtttgggtgtgcgctgcctctgcctacgaactcttcggtggttgtcgcatttttgaactgacaaataaaaaagaacgtgttgagcaccaaattgagaagggcggacggtccagcccggtccggacagtccgcgcctgtgggctgcacggtctgcgcaagcgcagaacagattagggttccaagttttgtgctacagttgttagctagattcgcaggattcgcttggaaattagtttgtaaatggttcagtccccctcctctataaataaagaggtatacggtcgatttgtaataatcaatcgaatcaataaaacttctatctcgcatttattttctgtgcaattaggagtggttctagtctatttctagtttag

SEQ ID NO: 209236 - DNA, 883 bp, Zea Mays
caacatcattgcttaatgccacccttcttcaagctgcagtactatgcttttccacctgtcatattcttgattaccttggcaagtcctctgatagtgacccgtcttcaccagtggagcacttggcctccagatcaagccggaaaacattgatatatctagttctcactcttggccacatatatccagattatgatttcagtgctgttcgggcacacttgttcttccaagaagaggagttggaaagtttcaagcagatggtagacacctacttatctgatgcctctaggcaatgggcagccacaaatgaaggcagttctcttctggacagtatgactaaagcaattgatgaggttatcaaaattaaagagtgtgacatctacagctataatccagactctgacgcagatccagttcttgagaaaggggccatatggtcgttcaactactacttctacaataggaagctaaagcgagttgtgagctttcgatgttactgcactagcaaattatcaggagatgacttcttaaccggtgttgcgtctgatggtgaagaggaagatgccttgattgacatggacatatgactgaccgtgttctgctagctacctgatgtgcgtataatatagaacatgtatgctcattcctggtagggaactttcaatatgacgcacttttaccgtttcctgtaaaaaccatggcacggtttagctttgtctgtatatgcggatttgagatttggtggcgggaaacttccaatcccctaggcttgaactgccacggtaattcggtactctgttgtttgctagacctgcaatgaataatgttgcgccaactgaattgttcaatttgatcaattgtgaattcacctctctggaacctggcg

SEQ ID NO: 209237 - DNA, 1686 bp, Zea Mays
atataaaactatattagcttaattgttctttatctaaattattattattagaatgaaatttaaggatccaaacaaagctattttaatatcctgggtctatactcaactgagttagttaaaaaaacataaaaataagacatttttaatattttaatcctattttttcatttggtaagttaacaaacacgcctgtcacgtgggtccatctgtcggcctataatctttccatttctttcttctctctccttactcggttcttcctactcccgatccatccgcagagggcggtgtcggcctcctctccacccgacagcttggccggcgacgagcaccaccaggacaccagatttgactattttatgagttcacaagccacccagcatgaagtttttagaatacacccccttcgacagtataaatttgttcctcgagcagctcgaccttggtgattgtacaatcagagggaaccttgaggccttctcatgcaagcacactgcgacagaccgccggctttcaataagcctagaacatgagattcttgattaccttggcaagtcctctgatagtgacccgtcttcaccagtggagcacttggcctccagatcaagccggaaaacattgatatatctagttctcactcttggccacatatatccagattatgatttcaggtaatattgtctttgtagcaagtgtgttctaatattatctgggaggaaggatattgggtaatgccatagtcagctttctctgggcgatatggcaaacccgcttttgtcctttccgaccagcctaagggggtgttgtcagatggtatgacagacggattaataaccgttgctctttgagctgagagttcaattctctccatttcccttggtctttggtatttgatatatctgactttcttaaggtctcctgactatcatgttacacattcatgatagcacgaccttcagattaaatttaacatccttttgtcaacatctgttcacttatcagtgctgttcgggcacacttgttcttccaagaagaggagttggaaagtttcaagcagatggtagacacctacttatctgatgcctctaggcaatgggcagccacaaatgaaggcagttctcttctggacagtatgactaaagcaattgatgaggttatcaaaattaaagagtgtgacatctacagctataatccagactctgacgcagatccagttcttgagaaaggggccatatggtcgttcaactactacttctacaataggaagctaaagcgagttgtgagctttcgatgttactgcactagcaaattatcaggagatgacttcttaaccggtgttgcgtctgatggtgaagaggaagatgccttgattgacatggacatatgactgaccgtgttctgctagctacctgatgtgcgtataatatagaacatgtatgctcattcctggtagggaactttcaatatgacgcacttttaccgtttcctgtaaaaaccatggcacggtttagctttgtctgtatatgcggatttgagatttggtggcgggaaacttccaatcccctaggcttgaactgccacggtaattcggtactctgttgtttgctagacctgcaatgaataatgttgcgccaactgaattgttcaatttgatcaattgtgaattcacctctctggaacctggcg

SEQ ID NO: 209238 - DNA, 1417 bp, Zea Mays
atataaaactatattagcttaattgttctttatctaaattattattattagaatgaaatttaaggatccaaacaaagctattttaatatcctgggtctatactcaactgagttagttaaaaaaacataaaaataagacatttttaatattttaatcctattttttcatttggtaagttaacaaacacgcctgtcacgtgggtccatctgtcggcctataatctttccatttctttcttctctctccttactcggttcttcctactcccgatccatccgcagagggcggtgtcggcctcctctccacccgacagcttggccggcgacgagcaccaccaggacaccaggtattttctcccccttggtctttcctccctgctgtacgaagacgtgcgcccgtgattcgtagatttgactattttatgagttcacaagccacccagcatgaagtttttagaatacacccccttcgacagtataaatttgttcctcgagcagctcgaccttggtgattgtacaatcagagggaaccttgaggccttctcatgcaagcacactgcgacagaccgccggctttcaataagcctagaacatgagattcttgattaccttggcaagtcctctgatagtgacccgtcttcaccagtggagcacttggcctccagatcaagccggaaaacattgatatatctagttctcactcttggccacatatatccagattatgatttcagtgctgttcgggcacacttgttcttccaagaagaggagttggaaagtttcaagcagatggtagacacctacttatctgatgcctctaggcaatgggcagccacaaatgaaggcagttctcttctggacagtatgactaaagcaattgatgaggttatcaaaattaaagagtgtgacatctacagctataatccagactctgacgcagatccagttcttgagaaaggggccatatggtcgttcaactactacttctacaataggaagctaaagcgagttgtgagctttcgatgttactgcactagcaaattatcaggagatgacttcttaaccggtgttgcgtctgatggtgaagaggaagatgccttgattgacatggacatatgactgaccgtgttctgctagctacctgatgtgcgtataatatagaacatgtatgctcattcctggtagggaactttcaatatgacgcacttttaccgtttcctgtaaaaaccatggcacggtttagctttgtctgtatatgcggatttgagatttggtggcgggaaacttccaatcccctaggcttgaactgccacggtaattcggtactctgttgtttgctagacctgcaatgaataatgttgcgccaactgaattgttcaatttgatcaattgtgaattcacctctctggaacctggcg

SEQ ID NO: 209239 - DNA, 1594 bp, Zea Mays
gagccagtaagccacacacagacagtcagacacaggcacacagcgagggagtcctctcctcccccagaaaaggaaaagacgcattccgcacacgcgcggctgggtgtcgaggccgggagacgcggtgaagctagctgctagcgtagccgcgcgcggcgggcgggctcgagctgcgctgtcgctccatgtcggccaccgccgagagcggtggggatctgtcggcggcgcgccgccggtgggatctcaccaacaagggggccgagagcacatgaagaatcagatggtgttgttacatgccatccgaatggtaacactgatggatgcgaagaaactattagtggcagtcacgatgatgatagcccagaaggccaggaaactagttccattaaggaacctgatgtagaaggtgacacacaggaagacaaacgtgtaaatcaagattcactcaagttgattgatgaagagtctgctcctcccaagtccccagcaaaatccgcgactgcaagttctagatcggagaggcctaaacgtgttgttccccgaccattttctctttctaatcaaagaagtttgtttggagtaaatggtggtgtggccaatccattggccaataaggataaatctggtgataaaagtagcatctctccagcaagcatgacaaagaagagtacgcagatggcacttaggaagactttgcagcctgagaaggtatttcatcctctggaagaggactcttgttctgtgacatcaactacaacatcaacaagagctggcagaactaagatgactgttcccgtcgctccttcatttgtgtgtgctaaccgtgctgacaagaggaaggagttctacacaaaattagaggagaaacataaagctttggaagcagagaaggacgaggctgaggccaggaaaaaggatgagcaagacgttgctttaaaacaactaaggaagtcattggtgattagagcgaaacccatgccaagcttctatcaagaagggcccccaccaaaggctgaactgaagaaggtgcctcctacccgtgccaaatcgccaaagtttacaagttcaaggagaaggagctgcagtgatacaccattgacacctggcggggaaaataccaacgcaacatctacccggccacatcgtcacagcatcgggagtcctagagacgctaacagagtacaacaatgctcgccaaagagcggtgtggcaaccaaaacaagatctgtcaaggctgagctgaaggccctctgaagagcatggagcagccgagtgatgtgtttctctgtacaaaccgaattgtctaaccgtttccatttccatgcatttttgcttctattttatacccaacatctccagcaaaagaaggctgtagggccaatgacgttgttcagcgccgctggaccttatccattttcttacattcgccttgtactcgtaagaactcttggtggcaccatgtgacattccatgtaaattacttgaggatccttgtagggagttcgtccggtgttttgctcctgttaagcccttggccttaactaatctgtgagctgaaaagactatcggaatggcactgttccgtttgatgcat

SEQ ID NO: 209240 - DNA, 1424 bp, Zea Mays
aaccagcgcagccctcaattcctcactctttttttatcccctcctctgccattccctccctctcccctcaacccagcgcccccctcccgccgccactagggtttctcctccccgcccacccccaaaccatccccgaagcttccagtgcgtcgcgccgcaaccatgagcgacggtaaggactccctcgacctctccgccctcggcgccgccatccccaactcggccgagctcagcgcggaagacaaggctaaccttgtggcgtcgatcaagaacacgctcgagggattggcatcgcggcataccgacgtgctcgagaacctcgagcccaaggtcaggaagcgcgttgagaagctcagggagatccagggcgaacacgatgaacttgaggcgaagtttttcgaagagagagctgctctagaagctaagtatcagaagttgtatgaaccactttactcaaagcgttatgaaattgtcaatggtgtggtcgagattgagggtatcacaaaagaaagtgcagctgaaaccccagaggagcaaaaaagtggagatgagacctctgctgagcaaaaagaagaaaaaggtgtaccagctttctggcttaatgcaatgaagaatcatgaaattttagctgaggaggagagggatgaggaagctctcaagtacctcaaggacatcaagtggtacaggatcagcgagccgaagggttttaagcttgaatttcactttggtacgaatatgttcttcaagaattcggtgcttacaaaaacatatcacatgatcgatgaggatgaaccaattctggagaaagccattggtactgaaattgaatggtaccctgggaagtgcttgacacaaaaagtgctaaaaaagaagccacggaaggggtcaaagaacacgaaacctatcacaaaaaccgaagattgtgagagcttcttcaacttcttcagtccacctcaagtccctgatgacgacgaggaaattgatgaggacacagctgaacagttgcagaaccaaatggagcaagattatgatattggatctaccatagaaacaaaattatcccacatgctgtctcgtggttcactggagaggctgctcaagatgaggactttgaagttatggatggcgaggacgacgacgatgaagacgacgatgatgaagacgacgaggatgaagatgacgatgattatgatacaaagaagaccaagggaactgctggaggggaagggcagcagggtgaacgacctgcagagtgcaagcaacagtgaggtgtgatgtcattaagttggttttgtggggccgttgggtgggggttcttgttggttttattttatggaactggcggggggatttttctgggacatgttacatgtgggtctgtattgggtttcagatgttatatttttttttttttttttggagtg

SEQ ID NO: 209241 - DNA, 1399 bp, Zea Mays
aaactccagtccaaaccaaaccaaaccagcgcagccctcaattcctcactctttttttatcccctcctctgccattccctccctctcccctcaacccagcgcccccctcccgccgccactagggtttctcctccccgcccacccccaaaccatccccgaagcttccagtgcgtcgcgccgcaaccatgagcgacgagctcagcgcggaagacaaggctaaccttgtggcgtcgatcaagaacacgctcgagggattggcatcgcggcataccgacgtgctcgagaacctcgagcccaaggtcaggaagcgcgttgagaagctcagggagatccagggcgaacacgatgaacttgaggcgaagtttttcgaagagagagctgctctagaagctaagtatcagaagttgtatgaaccactttactcaaagcgttatgaaattgtcaatggtgtggtcgagattgagggtatcacaaaagaaagtgcagctgaaaccccagaggagcaaaaaagtggagatgagacctctgctgagcaaaaagaagaaaaaggtgtaccagctttctggcttaatgcaatgaagaatcatgaaattttagctgaggagatccaggagagggatgaggaagctctcaagtacctcaaggacatcaagtggtacaggatcagcgagccgaagggttttaagcttgaatttcactttggtacgaatatgttcttcaagaattcggtgcttacaaaaacatatcacatgatcgatgaggatgaaccaattctggagaaagccattggtactgaaattgaatggtaccctgggaagtgcttgacacaaaaagtgctaaaaaagaagccacggaaggggtcaaagaacacgaaacctatcacaaaaaccgaagattgtgagagcttcttcaacttcttcagtccacctcaagtccctgatgacgacgaggaaattgatgaggacacagctgaacagttgcagaaccaaatggagcaagattatgatattggatctaccatagaaacaaaattatcccacatgctgtctcgtggttcactggagaggctgctcaagatgaggactttgaagttatggatggcgaggacgacgacgatgaagacgacgatgatgaagacgacgaggatgaagatgacgatgattatgatacaaagaagaccaagggaactgctggaggggaagggcagcagggtgaacgacctgcagagtgcaagcaacagtgaggtgtgatgtcattaagttggttttgtggggccgttgggtgggggttcttgttggttttattttatggaactggcggggggatttttctgggacatgttacatgtgggtctgtattgggtttcagatgttatatttttttttttttttttggagtg

SEQ ID NO: 209242 - DNA, 1667 bp, Zea Mays
caggagatagtattagggtacggagtattaacggcggctggcgccccgggcccacactgcagtggctggccgccttcacggcttcacctaacgatctggttcgtctcccacctcgcgccgctcgccggattccgccgccctgcccgcgttctcctagacccaacccaaccgagtcctgaaaggggggtcatttgttcagtgatcatcaaccagtgcaccatggcgtctctgattcctccctgcctctccgtccccaccgccccgggacgcgcgcgccttgctgctccgggggcgccgcggcggaggaggatggcggtggtgagggcgaagattcgggagatattcatgccggcgctgagctcaacgatgatggagggcaagatcgtctcctggacggccgccgagggggaccgcgtgggcaagggcgacccagtggtggtcgtggagtccgacaaggccgatatggatgtggagacgttccacgatggcatagtcgcagtcgtcctcgtcccggccggtgggaccgcccccgtaggcgcccctatcgccctcctcgctgaatcagaggaggaggtcgcgctggcgcgggcgcgcgctcaggccctctcgcagggacaaagccaggcaccctctcctccccatgccgccgccgccctggggccacctcctccagcgcctgtggcgcctccagcgacaaagggcatcgcgacaccttacgccaagaaactcgcgaagcagcacagggtggacatcgccggggttgtcggcaccgggccacacggccgcgtcacggcggctgacgtcgaggcagctgctggcatcaagcacaagcgaccccctccacctccaccccctgcttctgttgacgctgcgccactagtgcccgcaagtgcggtgctgccaccagtacccggtggcacggtggtgccgttcacgacaatgcaggcggcggtgagcaagaacatggtggagagcttgagggtaccgacattccgggttagctactccatgatcactgacaagcttgacgcactctatgagaaggttaagtcaaagggggttacaaagacagtgctgctggtgaaggcggcagctgtggcgctcacccaacaccctgtagtaaatgctagctgcagagatggaaagagcttctcctacaacaatgatgtcaacattggagtggctgttgcactcgagggtggccttcttactccagtattagaggatgctgataagatggatatatatctgcttgcacgaaagtggagagtgctgctcaagaaggcacgcatgaagcagctgcaaccaaatgaatacaactctgggacgtttacactatccaatttgggtatgtttggggtggataaattcgacgcaatccttcctgctggtcagggggctatcatggctgttggagcgtcaagacctactgtagtggctgataaggatggtttctttagtatcaagagtgaaatgctggtgaatgttactgctgatcacaggattatctatggtgctgatttggcagcattcctgcaaacatttgcaaagattgttgaggatcctgaatgcctcacattgattcctaaattacaagaaggtaaaagatgccaggcaggcatatggttacgtcctctgaggcgggcctgccttggtgaagagtgaag

SEQ ID NO: 209243 - DNA, 1736 bp, Zea Mays
ccgcacgctataaactgtagctgccgcggcgcctgcttctccccgatgcgtcaaacacttgacctgcacacggacagcggcggtggcgtcccgatcctgtccacccacccatctaatgcggccgcgaggaggatccacctgattctgctgctcctgctcctccttctagtgagttctattcccgtccccctccctacccgctgcgcgctgctaggatcttcgcctgcgaaaattttcggttcagtcgtcaggaggtcgagagaccatgacacggaagtcagcagtagcggattatgtttagtggcacaaggatcattcgtgtagctgaaaggatttgccttcaatggagcttgaagctgctcctgacgataaagtattctgttcagatgatgagatgcagacgctgtggcctctgggacaagtagacccaaagagcgtgaggttcccttgctgcatcgtgtggactcctctcccagtagtttcatggctggctccctacatagggcacgtggggattgctcgggaggatggaaccgtcttggactttgcaggttcgaatttagtgagtgtggatgatctggcttatggttctgtcgccagatgcctgcagcttgacagggcaaagtgctgcttccctgccaacccggcgtcgcacgtgtgcttgaggtcccacgagcactcggatgccgggacggcgatctcgtgggacgacgcgctgcggtcggggagccggcgcttcgagcacaagtgctacaacctcttcacctgcaacagccactcgttcgtggccgactgcctcaaccggctggcttacggcggctccgttgggtggaacgtgctgaacctggccgcgctcgtctggctgcgcggccggtggctggaccccatggccgccgtccggtccttcctcccgttcgccgtcgtctcctgcgtcggcgtcctgatggccggctggtccttcctcctgggcatgaccgcgttcacgctgctcttgctcggctggttcgtgctcggcgtctactgcatgaagggcctcgtcgtctgacgcacgctggctcggagccgaacgtgtgcccagcttcttcactgagcatcggggtcatgtagtagatgaatgaaggatcgaaatcttgaaaggggtgtgagtcggaggggagagacaacgggaaaacaaaatttgagcccgtttttaatagcggaaacccaaatccagatatttataaaatcgaagtttctatttgaaacaaagtagaagtacaagataaaaggaaggagggggaaatagcacaaaaacaaaattgggctagagtcttagaaccgttggaggccgaaactcacgccctccttgctgcgaagctgtcgatctgcagaatgcagctctgttaactgacagtctcctgttacgaggcaatcagaggctttttctagactggacctcgccatatccaccatatagatataggaggtaccagaagggggtgttctatatagcaagctgtagctgaactcattggattagacatatcagggcgatcaatccaatagcatctcagtgtcctgtcatttcataaaaaaacagcttcaacgatatacaattttacatttctatcaaaaaactataaagatatatcataaaatgatctaaatatacgtacacctgaataagagttggtatctaaattgttataacaaatttgataatttaaattagatatgtatgaacattgatctttttt

SEQ ID NO: 209244 - DNA, 5081 bp, Zea Mays
ctcatccactggtcccaccatccgtcccctagtccgccgcctcccgcctcacgcaccccaaattcaaatttcgaatcccagaaggacagcaccgttgcccttcggcttcgataaacacccctcaacccccattgctttctagccccagatccccaatccccaagaccccaacgcctcacgcacccctcaaccctaccgcagctgcgcaggcacacgacctccgtgtgcagcgcatcgccgccatgacgggtcccttacactccagctccggccacaacgccgccgccggcggcgggggcaagaccatcgaggaaatgtaccagaagaagacgcagctggagcacatcctgctgcgccctgacacctacattggctcggtggagaagcatacccagacgctctgggtctacgaggacggcgccatggtgaaccgctccgtcacctacgtccctggactctacaagatcttcgacgagatcctcgtcaacgccgccgacaacaagcagcgggatcccaagatggacgcgctccgcgtcgagatcgacgtcgacggctgctccatctccgtatacaacaacggcgacgggatacccgtcgaggtccaccaggaggagggcgtctacgtgccagagatgattttcggccacctcctcaccagtagcaactacaacgacaacgagaagaagacaaccggcgggaggaacggatacggcgccaaactcactaacatcttctccacggagttcgtcatcgagaccgctgatggacgtcgccaaaagaagtacaagcaggttttctctgaaaacatggggaagaagtcagagccccagattaccaagtgcaagcagggcgagaactggaccagggtcaccttcaagcctgatcttgccaagttcaacatgatccatctcgaagatgatgttgtagccctcatgaggaagagagtggttgatatggcaggcactcttggcaaaacagtgaaggttgagttggatgggcacagggtgcccataaagagcttctgtgattatgtcgacctgtatatgaagagtgctaactgtgacagacctgataatttcaaaaagatttatgagcaagtaaatgatcggtgggaagtgtgtgttagtcaaagcgaagggcagtttcagcaggtcagctttgtcaacagaattgccaccataaggggtggaactcatgttgattatgtcaccaatcaaattgccacccatgtgatggcttttgtgaataagaaaaacaagaatgcaaacatgaagctacacaatgtgaagagccatttgtgggtctttgtcaatgcgctgattgacaatccggcctttgattcacagaccaaggagaccttgaccactcgtcagggaagctttgggtcaaagtgtgagctttctagtgatttcctcaagaaagttgagaaatctagtgtaatcgataatgtcctctcttgggctgatttcaaacttagcaaagaattaaagaagactgatggaagcaagaagtcaagaatttctggcatccctaagcttgaggatgcaaatgaagctggtgggaaggactctcacaagtgcaccttgattctgactgagggtgactctgcaaaagctcttgctatgtcgggcatagctgttgtagggagagattactatggtgtatttcctctcaggggaaaactattgaatgtcagagaggcaaaccacaagcagataatggacaacgctgaaattcagaacataaagcaaatccttggtttgcagcatggaaagcagtatgatagcaccaaaggtttgagatacggccatctcatgataatgacagatcaggatcacgatggttcccacatcaaagggttgctgatcaatttcattcactcattctggccatcacttcttaaagttccatctttcttggttgagttcattactccaattatcaaggcaaccagaggccaaactactaagtcattctacacgttgccagagtatgaagaatggagaaataatttaggagcaagtgcaagttcatggactataaaatactacaaggggttaggaacaagcacagccaaagaaggccgaaagtacttcgaagatattactgaacataaaaaagattttctctgggtagatgaccaagatggcaatcatattgaattagcattcagcaagaaacggattgctgataggaaacagtggcttacaaattttcagcctgggacatacattgaccaacgtgacaaacatgtcaagtatagcgatttcatcaacaaagagctgatactcttctcaatggcagacctgcagcgatcaataccttcaatggttgacggccttaaaccaggccagaggaaaattctgttttgctcattcaagaggaattttgttaaggaagctaaggtggctcagttctctggttatgtgtcagaacactcagcataccatcatggtgagcagagtttagcaggtacaattattggaatggctcagaactttgttggcagcaataacatcaaccttatgtaccctagtggtcagtttggcaccagagctcaggggggcaaggatgctgcgagtcctaggtacatcttcaccaagctgtctcatatcacacgttcaatttttccgaaggatgatgatattcttcttaattatctgaatgaggatgggcagtcaattgaacccacctggtatatgccaatccttcctatggtcttggtcaatggtagtgaaggaattggaactggatggagcacatatattccaaactacaatccaagagacattcttgctaacctcaggcgattgctgaatggagagtctactgtaccaatgcacccatggtacaggggatttaagggctctatagagaagacagtcaatacaaaggtagctggttccacatatactgtcactggaatcattgaggttcttgacaacactacactgaggatcactgaattgccaatccgccgttggactcaggattacaaagattatcttgagagtttggctccagatactaagaacaaggacaaagtaccattcatagaggatgtcacatgtcaaggtgataatgaagatgtttacattcagttcacattaagtgagaaaaatatgaatatagctatggaagaaggactagtgaagaagtttaagctgacaacaacaattgggacatcaaatatgcacttgtttgattcagatggtaaaattcggaagtatgacactcccgagcaaatacttgaggagttctgtcatttaaggcttgaattctattgtaagagaaaggaagcattgttgaaaagcatcaagttggacttaaagaagcttgaaaacaaagttaggtttatccgctgtgttgttgataatgaaattatagttaacaaccggaaaagggcagatctatttttggagcttcggcagaagaattttgatcctttcccaaagaaaaaaaagagggctgaaccagctgctgtaggtgctttagaagaggaggaaaatgaagagagtcctgaagctgctggagcggaacctagtgactatgagtatctcctctcaatgtcaattggtacgttgactttggaaaagatacaggagcttaatgctgagaaacaaaaattagtggatgatgttgaggaattggagaatatgtcaccaaaatcactatggttgaaagatcttgatgcttttgagaaagaactggatgtgcttgatcaaatggatctagcagaggaactgcaaagggaaaagaggataaatgctggcaaaaaaggaggatcaaaagctgcacccaagaaaccacgtaaaaaggctgcatctaaaaagctggatagcgatacagaagatgatgattttgaaccagcggttgcaaagcgtggagctcaaccgaagaaaacatccagcaaggcaaatgattctgcgtctgaagatggagattatgtggctgctgaaaatcaaaagaaacaatccaagaaagcaagtgcccatgtggacgaagaagttgacatgccttcgttaaaagaccgtctggctgcttttaatatcagcgactcctctccggatcattctgccatggaaactgaagtaacagaattgacagaacagcagaatgaaaacaaagcgacagagggagcaagcaaaagaggcggacgaaagaaggcgtcatcatccttggcgacgataccatctgatgttgatgaggaagtcctagaggtccaagctcagaagaaaggtagaggaaggaagcctgctgccgttgtgaagcccaaggctcctgccgccgccaggaaaagggcgccggctcagggcaaggtaacacagaagaaaatagatgagatgctcaaggccactgaggataacaacaccagtgcatcttcccctgagaagaaggtccggaagatgaggtcctctcccttcaacaagaagagcggctcaatcttacagagaggctcgaccgcttctgcaagctctggaacaactgttgaagcttcaccaccctctggcagctctgcagagccagttggtgctgcacaacctagaaggacagccagggctaccaagaagcctatctatattagcgatagcgaccctgaggatgaagtggagttgattgatgattcggactttgatgcggacggtgactctgacgagtgaagattgtagtcatccgtactttggctgcaacaatatccagtttgtgtcgttgcatgtgacaatttgataatgcatttcttgtgcgttgtatgtgttcgttgcgttgttcagaactgttgccaagagctcaagacaacctggttaactggttaactgaattgtatgtctaattttggcatacaagtgtgcctgtggtatgttttatgctctgatgctggcatgctgctctcagagcgcccattgtgtgcattatcaaagtttgtgcggggagtttccagggttatatataccaaatctaagtagttgaagaatctagctacatttcatcaacatcggggatggtttctaggtgatgagcatctaaatttttgatttattttacaaagaataagtctacataacccactgatttttagagca

SEQ ID NO: 209245 - DNA, 5018 bp, Zea Mays
caaatttcgaatcccagaaggacagcaccgttgcccttcggcttcgataaacacccctcaacccccattgctttctagccccagatccccaatccccaagaccccaacgcctcacgcacccctcaaccctaccgcagctgcgcaggcacacgacctccgtgtgcagcgcatcgccgccatgacgggtcccttacactccagctccggccacaacgccgccgccggcggcgggggcaagaccatcgaggaaatgtaccagaagaagacgcagctggagcacatcctgctgcgccctgacacctacattggctcggtggagaagcatacccagacgctctgggtctacgaggacggcgccatggtgaaccgctccgtcacctacgtccctggactctacaagatcttcgacgagatcctcgtcaacgccgccgacaacaagcagcgggatcccaagatggacgcgctccgcgtcgagatcgacgtcgacggctgctccatctccgtatacaacaacggcgacgggatacccgtcgaggtccaccaggaggagggcgtctacgtgccagagatgattttcggccacctcctcaccagtagcaactacaacgacaacgagaagaagacaaccggcgggaggaacggatacggcgccaaactcactaacatcttctccacggagttcgtcatcgagaccgctgatggacgtcgccaaaagaagtacaagcaggttttctctgaaaacatggggaagaagtcagagccccagattaccaagtgcaagcagggcgagaactggaccagggtcaccttcaagcctgatcttgccaagttcaacatgatccatctcgaagatgatgttgtagccctcatgaggaagagagtggttgatatggcaggcactcttggcaaaacagtgaaggttgagttggatgggcacagggtgcccataaagagcttctgtgattatgtcgacctgtatatgaagagtgctaactgtgacagacctgataatttcaaaaagatttatgagcaagtaaatgatcggtgggaagtgtgtgttagtcaaagcgaagggcagtttcagcaggtcagctttgtcaacagaattgccaccataaggggtggaactcatgttgattatgtcaccaatcaaattgccacccatgtgatggcttttgtgaataagaaaaacaagaatgcaaacatgaagctacacaatgtgaagagccatttgtgggtctttgtcaatgcgctgattgacaatccggcctttgattcacagaccaaggagaccttgaccactcgtcagggaagctttgggtcaaagtgtgagctttctagtgatttcctcaagaaagttgagaaatctagtgtaatcgataatgtcctctcttgggctgatttcaaacttagcaaagaattaaagaagactgatggaagcaagaagtcaagaatttctggcatccctaagcttgaggatgcaaatgaagctggtgggaaggactctcacaagtgcaccttgattctgactgagggtgactctgcaaaagctcttgctatgtcgggcatagctgttgtagggagagattactatggtgtatttcctctcaggggaaaactattgaatgtcagagaggcaaaccacaagcagataatggacaacgctgaaattcagaacataaagcaaatccttggtttgcagcatggaaagcagtatgatagcaccaaaggtttgagatacggccatctcatgataatgacagatcaggatcacgatggttcccacatcaaagggttgctgatcaatttcattcactcattctggccatcacttcttaaagttccatctttcttggttgagttcattactccaattatcaaggcaaccagaggccaaactactaagtcattctacacgttgccagagtatgaagaatggagaaataatttaggagcaagtgcaagttcatggactataaaatactacaaggggttaggaacaagcacagccaaagaaggccgaaagtacttcgaagatattactgaacataaaaaagattttctctgggtagatgaccaagatggcaatcatattgaattagcattcagcaagaaacggattgctgataggaaacagtggcttacaaattttcagacctgcagcgatcaataccttcaatggttgacggccttaaaccaggccagaggaaaattctgttttgctcattcaagaggaattttgttaaggaagctaaggtggctcagttctctggttatgtgtcagaacactcagcataccatcatggtgagcagagtttagcaggtacaattattggaatggctcagaactttgttggcagcaataacatcaaccttatgtaccctagtggtcagtttggcaccagagctcaggggggcaaggatgctgcgagtcctaggtacatcttcaccaagctgtctcatatcacacgttcaatttttccgaaggatgatgatattcttcttaattatctgaatgaggatgggcagtcaattgaacccacctggtatatgccaatccttcctatggtcttggtcaatggtagtgaaggaattggaactggatggagcacatatattccaaactacaatccaagagacattcttgctaacctcaggcgattgctgaatggagagtctactgtaccaatgcacccatggtacaggggatttaagggctctatagagaagacagtcaatacaaaggtagctggttccacatatactgtcactggaatcattgaggttcttgacaacactacactgaggatcactgaattgccaatccgccgttggactcaggattacaaagattatcttgagagtttggctccagatactaagaacaaggacaaagtaccattcatagaggtcgttgaaaacaaaaacgcttccaattgtgttcataaattttccaccgtcataaatgctattcctcaattgcaactattttacaggatgtcacatgtcaaggtgataatgaagatgtttacattcagttcacattaagtgagaaaaatatgaatatagctatggaagaaggactagtgaagaagtttaagctgacaacaacaattgggacatcaaatatgcacttgtttgattcagatggtaaaattcggaagtatgacactcccgagcaaatacttgaggagttctgtcatttaaggcttgaattctattgtaagagaaaggaagcattgttgaaaagcatcaagttggacttaaagaagcttgaaaacaaagttaggtttatccgctgtgttgttgataatgaaattatagttaacaaccggaaaagggcagatctatttttggagcttcggcagaagaattttgatcctttcccaaagaaaaaaaagagggctgaaccagctgctgtaggtgctttagaagaggaggaaaatgaagagagtcctgaagctgctggagcggaacctagtgactatgagtatctcctctcaatgtcaattggtacgttgactttggaaaagatacaggagcttaatgctgagaaacaaaaattagtggatgatgttgaggaattggagaatatgtcaccaaaatcactatggttgaaagatcttgatgcttttgagaaagaactggatgtgcttgatcaaatggatctagcagaggaactgcaaagggaaaagaggataaatgctggcaaaaaaggaggatcaaaagctgcacccaagaaaccacgtaaaaaggctgcatctaaaaagctggatagcgatacagaagatgatgattttgaaccagcggttgcaaagcgtggagctcaaccgaagaaaacatccagcaaggcaaatgattctgcgtctgaagatggagattatgtggctgctgaaaatcaaaagaaacaatccaagaaagcaagtgcccatgtggacgaagaagttgacatgccttcgttaaaagaccgtctggctgcttttaatatcagcgactcctctccggatcattctgccatggaaactgaagtaacagaattgacagaacagcagaatgaaaacaaagcgacagagggagcaagcaaaagaggcggacgaaagaaggcgtcatcatccttggcgacgataccatctgatgttgatgaggaagtcctagaggtccaagctcagaagaaaggtagaggaaggaagcctgctgccgttgtgaagcccaaggctcctgccgccgccaggaaaagggcgccggctcagggcaaggtaacacagaagaaaatagatgagatgctcaaggccactgaggataacaacaccagtgcatcttcccctgagaagaaggtccggaagatgaggtcctctcccttcaacaagaagagcggctcaatcttacagagaggctcgaccgcttctgcaagctctggaacaactgttgaagcttcaccaccctctggcagctctgcagagccagttggtgctgcacaacctagaaggacagccagggctaccaagaagcctatctatattagcgatagcgaccctgaggatgaagtggagttgattgatgattcggactttgatgcggacggtgactctgacgagtgaagattgtagtcatccgtactttggctgcaacaatatccagtttgtgtcgttgcatgtgacaatttgataatgcatttcttgtgcgttgtatgtgttcgttgcgttgttcagaactgttgccaagagctcaagacaacctggttaactggttaactgaattgtatgtctaattttggcatacaagtgtgcctgtggtatgttttatgctctgatgctggcatgctgctctcagagcgcccattgtgtgcattatcaaagtttgtgcggggagtttccagggttatatataccaaatctaagtagttgaagaatctagctacatttcatcaacatcggggatggtttctaggtgatgagcatctaaatttttgatttattttacaaagaataagtctacataacccactgatttttagagca

SEQ ID NO: 209246 - DNA, 1269 bp, Zea Mays
ggatccgctcccgcccctctcgtagtgctgaaaaaagatgcggccgaaaaaaatcgcattgcctctcatccttaccctatcccctctcatccttatcttggcggcggaggcaagtgaaaggaatggcgtaggcgcaggcgagcggccgtccagtcacgcgggcagcagggcacaggcgagaggccgtccaagcgagcggtcgaccaagcgctccaaccagcaccggcagcagcacggcaacaccgtccaggcgagcaaccgtccaagaacaggaacttttctacgcacaacacagtccaagaaccgccttgtggctgaagggatcaggacatcaacaggcttcaagaaagttcaccttaacatgtgtgctaaggctctaaatgactatttcaagatgaatctcactgtagaacaagtgcagaaccatttgaggacatggaagagaagatatgcgaagataaacagacttaggaagttaagtgttgcttcttggaacgaagataactacatgctcactcttgatcatgaacattatgcaaactatgtgcaggatcacaaatctgatgctgagtttttaaacaagcctttggagaactataagtaaatgttcactgtctttggaaacaatatggctacaggaaagtatgcagaaggatcaagtgaagctctagggactgaagatggaaacagtatggctgaaacagagattgatgagggagatggtaatgttgttcctagtcctatagatgatattgggacttcatcctcaactcctagacctaggaagaaggcaaaggttactagtaatgaagaggcagggctgatttggagcattcaaagatggtgctaaaaggcttgcaatgactattgagaaagctggttcagatgacctaccacctgacttgcttcaaacattgcaaagtattccaggttttgatgacacacacaaggccttttactttgcatatctagtgaaaaatcctggattggtaagacagttccctactctcccattgacatatcagataagtttgcttgctcggttcgttagtgagacctttccttagattatgaggaccggtgattaggactatgctggaggttaagtggaaattagaactatgttgttcttttgttatgtaaaccatggccaatactttgttttcaagtattgggactgaaatactggctttgctatgtcgaaatactgggtttgttatgaccaacacggatgctcggtttgtttgttttgaaatactggttttgaga

SEQ ID NO: 209247 - DNA, 1604 bp, Zea Mays
acctctaccgacacgtgggtctacccgccaacctgtccgtttccgccgcctctgacacgcgggcacaggcacgggcctcctccaaaaaaccccccccctccccagcttgtctgcccctctctccatttcgcggaggaagaaaaaggggaccaaaaaacggaaaaggggataggaggaacggatcagcggtggaagcttccagccctagcgcagcaatggcgggttggtgcgagcaggcggtggcgctgctacagcgccccgcggtggcggagatggccgtcgacgtgctgctctgcgcggtgccgatctgggccgccgtcatgatcggcctcgtcgtcggctggtcctggcgcccgcgctggacgggactgctcttcctcggcctccggagccgcctccgcatcctctgggtgccgccaggcctcggggcccggcggctctggttcgcctgcaccgcgctctccgcctgctccgtcgcgaccaagctcatctcctccgcattccgccgctgcagaggcaagcaccaggacagggcctcccccgacgatgatgccgctgcgaccagagacggcggatgtcgcgccgacggcagccgcactatttttgaggatgctactcctgaactggttagagatttcttctgggatggtgattttcgtctaaagtgggatcccatgcttgcatattgcaaatctttggatgagttccctcagaatggagcaacaattgtccactggataaaaaagttcccgttcttttgcagtgaccgtgaatacatctttggaggacgcatatgggaatctgggaagacttactattgtgttactaagggtgttccatatccatcattgcccaagaaagaaaaaccgaggcgtgtggagctgtacttctcaagttggcgtattagagctgttcaatcgcctaaacatgtgggtcagcaatctgcgtgtgaagtaactttggttcactatgaggacatgggtataccaaaagatgtagcccgggttgctgttcgtcatggcatgtggggtgctgttaagaaacttcagtctggattcagagcataccagcaaatgagacacacagaaactaccctgtcacacagcgtcatcatggctcgaatgaccaccaagatatccatcacagcttcaaatgatcccttggaccatgacctctcggttgccgataaaatcagtgacgagaatgacagctccaatgcagttcaacatggttttgattggaagtggttggtggttgggggtgcagtggctgcggtttgtgtgctcaacaccggtctggtaggcaaggccgtcttgcttggagcagcgagaaggcaagcaaagaagtgatatgaggagcagccttccagccagacattcatcagattgtagctacgatcgtacaggcaaaaaaatgttgagaaaataggtggggttcaacagagataactgctgtttgaggcgtatgcaatgggtctatcggatctagtttcacagtatagtctattttatttagagataaaaatcgcttgtttaagaataagtaaagctctttatttaagaagaggtgtttgagaattaagacggaatgaccgttttcttcct

SEQ ID NO: 209248 - DNA, 2534 bp, Zea Mays
gctgacaatcggccccatacgcgtcggacccacacgtcatccacacgaacccgctgccagggacccacctcggctccgtttcattcatcggttcctccccttccgccccgcttccacgatcgattcaacttgaaggtcctgaaccacccaaccggtaacctcctcgccgcccccgcgtccaatgccaccgccaccgccgtcgccgccgtcgctgccgtccgtgtagcgtccccgcggcgatgggcaacacctgcgtcggccccagtgccgctggccgcaacggcttcctggccaacgtcaccctgtggcggccccgcggcgacgaccccgcgccagccccagccctaccgccgcccccctcccccgcctccgacaaagcgcccgatcccgtcaccatcccagaatctgagcattcctcccaccactcatcccgatccaccgacctgccaccggcccctgcctcccagccgcaggacaaccctacggcgaagaagcccgcgcccaaggtcaagcgcgtccagagcgcgggcctcctcgcggactccgtgctcaagcgcgacgttaacacggctcggctcaaggacatctacaccattggcaagaagttaggtcagggtcaattcggcacaacctacctctgcgtcgagaaggccaccggccgggagttcgcctgcaaatccattgccaaacggaagctgctcacggaggaggatgtcgaggatgtgcgccgcgagatccagatcatgcaccacctcgcgggtcatgccaacgtcgtctccatcgtcggcgcctacgaggacgccgtcgccgtgcagctcgtcatggagctctgcgctggtggggaacttttcgacaggatcatccagagggggcactattccgagaaggcggccgcgcagctgaccagggtgatcgtcggcgtcgtcgaggcgtgccactcactcggcgtgatgcacagggatcttaagccggaaaatttcttgtttgtcaatcaaaaggaggactcgcccctgaagaccatcgattttggactgtccatcttcttcaagccaggcgagatgtttacagatgtcgttggaagcccatactatgttgcacctgaggttctgctaaaatactatggccgtgaggttgatgtctggagtgctggtgtcataatctatatcctgttgagtggagtccctccattctgggatgaaagtgaacaaggaatatttgaacaagttttgaaaggtgacctggacttttcgtcggagccctggcctagcatctcagagagtgcaaaggatttggttaggaaaatgcttattcgtgatccaaaaaagagattgactgcccatgaagccttatgtcacccttgggtgtgtgttgatggagttgctcctgacaagcctcttgattccgctgttctaagccggttgaaacaattttctgcaatgaataaactaaagaaaatggcccttagggttattgctgagagcttatctgaggaagaaatcgcggggttaaaagaaatgttcaaaatgattgacagtgacaacagtggtcatatcacattggaggaactaaaaactggcttgcagagagttggtgctaatttgatggattcggaaatcaatgctctaatggaagctgcagatatcgacaacagtggcacaattgattacggggagttcattgctgcaactttgcatataaacaaagttgaaaaggaggataagctctttgctgctttctcatactttgacaaagacggcagtggttacataactcaagatgagctccaaaaggcatgtgaggagtttggtttaggggatacccgacttgaggacattattggggacatcgatcaggacaatgatggacgaatcgactacaatgagttcgttgcaatgatgcagaaaggagataatcctctggggagaaaggggcatcaaagtaatactagttttggtcttggagatgcacttaagcttcggtaaaatagatgtttaccttcataacgaagttagcattcagagactaagaaaagttgaccaaacaacagccccaaaaccgtgtcccatgcctgtactctggtctccaagcttcagtggtgccctatcaaaattcgggggggtcgttgaagcaacctaggagcgtgaacttttgccggaaagcatcgacctcataaaattaacagtagggtcctcatgctcaacatggcatcttttgatttccctcctttctagttcatacgtagtggcaatgaaaccttgaggccaccgtgtaatttaagtaagcatgagagtaggtgagattgcttttttctgccccctttattcttccattgtgaatcgacgacaggaagagagtgaatcatcctacgtctgcattccaagactcatgtttcagttatgtgcatccgtgttgcataggtgtagttcttagtgcctgtaagaatataatattgtattttaggagtctgaccagtgaaacaattcttttgtgttgattctcctttgttaccaaaatatgatgaatgattactgaaa

SEQ ID NO: 209249 - DNA, 495 bp, Zea Mays
aaaaactccagaagttttagctcgtgatcggcttctaggctcgttttctgtcaagcctgtggtaaacagagtgaagttcaccttggtgggtctggcaggctccctcatcctttgcattcttctttacttgggatgcgtaccggtggaaggtctatcccggaagtgtacagtgacgttgccgcaaggtcatttgggcctgatgcgttctgtggagaagctgatctgtcgtagcatcgcaaagcgtggagcatgagaagtttttagatggtggtatatggtctcatagggtaggtatacaagttcccctttgtcttgccttgtggttggtggatggttccatttctgtacggggttttttatccatcagttactgcatcagggtaatgttaataagtaatatttgatagcacgtagtgccgttatttttatagtggcaagctccttacgaaagtttatatgctgctggggcaaggtgaaacggtaaggaaaactttt

SEQ ID NO: 209250 - DNA, 1071 bp, Zea Mays
cgcgcgcctccctttccgccattacaatctttgtttccgggaggggaggggaggggaggggagggaaggttccgtccagcgcaggccgcacggacagagagcgcgaggaacagggggctagctagcagagctaataagaaagaaacgagaagcagcagggttggtggtcaagcatggaacgcaggaggagccggcacgccttgttgctcctctcagccgtcatggcgtccctcgtcgccggctcgaccgccgggatataccacatcgtcggcgccggcaaagggtggcggatgccccccaacaggacgtactacgaggactgggcgcacaccaggcagatcagcatagtgttcctgtaccggagcggggtgcacaacatcgtggaggtgccgacgcgggagctgttcgacgcgtgcagcatgcgcaacatcaccagccggtaccagtgcgggcccaccatcatcgagctcaccgaccccggcgagcgcttctacttctgcggcgtcggcgagcactgcgaggccggccagaagctcgccatcaacgtgctcctcgtcccgccgccgccgccggacacggacgacgacagctccggcgccgcccgcctcctgggccgcgcgggcgcggggctcgccgccgcctgcctgtgcctcgtgtccgcgctgctgacaatggcggtgtgaatcggcacgccgccgccgtagattgtcgatcgccgacggcgatgcttgctgctgcatgcatgtgtatccctttcgagctgattgttggtcaggtgtcaggacaacgcttccagtttcgtggcgagtgaaatcagtaaagttaaggcttgtccattgagtcattgtctttcccagctcatggaaagcggtgtgccggtgtccaggtaaccgttttgtcagcaggaaggaggataggaggaagaacagagtgaaatcagaagtaaaaaaaaagaggtgagtgaaatccttttgtaaattcagaactactaggtactgtaatttatatgaaccacaaaaaagacaagcatttactgtaaatcgtgaattgatcagtgcgaattttgtggat

SEQ ID NO: 209251 - DNA, 1072 bp, Zea Mays
aacacagggatcatatattcgttcacagatcgattcgcaggcgggtggtcggcgtctcactatccaccaccgcgccgctccggtttaatttctcctcgaccggccagcgcaattctgtgcctcgatcgatcggtcgtaaggcaagtgagcaagctatatatatatatatatatatatatatataggagattcttcgagcgagctagtagcgagatgggttccgccgtcctcttttactgcatctgcatcgccgccgtcgtcgcattgtcgtcgtccatggtcgccgtcgggtccgccgccccgggggaaacccccaagttcatctcggcgagcgcccttgagtgctccgctaacgtaacggaaatagcaaaggcgcgcaagctgatcgatgtccatggccacgggctgtgcccggtgcggttcgaccacacgcgcgggatcagcgcggtggccagcagctgcaaggaccgcccgctgccgtcgccggagcgctgctgcggggcgctcaaggcctacgcgtgcccctacagcgagctcatcaacgacaacgccaacaacggctgcgccagcgagatgttctacgtcatcatgacacgcggcaggctgcggccgggcctcttctcgcagctgtgcgtcgaaggcccgctgggcctccagtgctgatcaacactggcctgctgccgcccaccgcccggaatctatctatctatctatctccttggaaacatatatcagacgatgccccagcgcgtgccgctgatttgatgcaagtgctccttcactttcggggtcgccttttcaattttggatgattggagagctctcgtagtatattatttacattatccaagtgttaaagttgaaaagtgtgttcggcggagtgcattcaagtttgtgttgcgcaatgatgagttatataaggaatatcgaagaggtgttattaaaatgtttgtgatttgatcaagcaaggctggctatgggataaattcatgaaggtattttgtagtacacatcgatcatctctaaagatgaggatggttattgtgtagagttaatttttattggtttacta

SEQ ID NO: 209252 - DNA, 1844 bp, Zea Mays
atgggcgctgcagtgcgtgtggccggcgggagaggagcgagggcaagcggggaatggaaatcccaggcgctgaggttggccgaccttgtagagctgctcggtgacggcggccccgaggacgccggtgtagaaggcggcgacgtaggtgccgacgagtggcgcgacggagcgcgccgggcggtggggctccaccataccccacagcaccgtcttctcgcacctgtggaactgccgagttgggtgcagcaggcccacgccgcccgttacggcccaagtgtgcattctctgccgcgccgcgaaaacacaaaaacccggctagtccaaagtgacgatgaaaaaacaaaacaaaacggaaatagctcgcggccgcggtttcttgcgccactccggctcagccgccgcccgccacccgccacagccgccgcagacgagatgggcatcaagggtttgacgaaactgctggcggacaatgcgcccaaggcgatgaaggagcagaagttcgagagctacttcggccgcaaaatcgccgtcgacgccagcatgagcatataccagttcctgattgtagttggaaggacaggcatggaaactctcacaaatgaagctggtgaagtcactagtcatttgcaaggaatgttcaaccggacaataagattactggaagcgggaatcaagccagtttatgtttttgatggcaagcctcctgatatgaagaaacaagagcttgctaaaagatactcaaaaagagatgatgcaaccaaagatctgactgaggcagtagaggtaggagataaagatgcgattgaaaaattgagcaagaggactgtaaaggcaccttctgaagcagaagcagaatgtgcagccctttgcataaacgataaggtgttcgctgttgcttcagaagatatggactcccttacttttggggctccacggttccttcgtcatttaatggatccaagttccaagaaaatacctgtgatggaatttgatgttgccaaggttttggaggagcttgaactcaccatggaccagttcattgatttgtgcatcctgtgtggatgtgactattgtgatagcatcaaaggtatcggggggcaaacagctctgaaacttattcgtcaacatgggtccatagaaagcatcttggagaatcttaataaagacagatatcaaattcctgaggactggccttaccaagaagctcgacgcttgttcaaggagcctaatgtcacattggatattcctgagctaaaatggactgcacctgatgaggagggtctcataagtttcctggtaaaagataatggtttcaacgaagatcgggtgacaaaggccatagagaagatcaaatctgccaagaataaatcgtcgcaaggaagactcgagtcctttttcaagccaactgccaccacatcagcaccgctaaaacggaaggagacttcggataaaacaagcaaggcagctgcgaacaagaaaacaaaggctggtggaaagaagaaataatcttggatgcttgatgtacaactacgactacgaaagcagcggtggcgtgatcacttcgcttagattatttaactccctgttttaactcagagctttggtaaaagtttgctcatgtttcaagctggggtaagttagttgtgtttgaagagattggtgtaccaagtaacaaaacttatcgctgttttttacttcttgtcctttgaagtatgtatgccagtcctcgtccttttaagtatctgtgttgcaacaaaaatttaaggccttgttttgatgcataggctcactttaagatttagtttaaatttcacaccaagctactttaacacgcatggattacg

SEQ ID NO: 209253 - DNA, 4127 bp, Zea Mays
aatcgctaatcatcattgtggatatgtactagtagcaaccatttctgcaaacggtgaaaaggaaattggagatctaatatcaaaagccatggaaaaagttggaaaggatggagtcattactattgttgatggcaaaacattggacaatgagcttgaagcagtacagggaatgaagctgtccagaggatacatatctccttactttgtgactgatcaaaagactcagaaatgtgagatggagaaccctcttattcttatccatgacaagaaaatctcaaacatggattctctccttccagcattagaaatttctatcaagaatcgcaagcctcttctcattgttgctgaggatgttgaaggagatgctctgtcaatgcttgtactgaacaagcatcgtgctggactcaaggtatgtgctgtcaaagctcctggatttggtgaaaatagaaggcacaatctagatgacatggctgtgatgactggaggagaggttattagcgaggaacgcggtcttgatcttggcaaagttcaattacaaatgcttggcactgctaaaaaggtaactgtatcccttgatgatactatcatcctagatggtggaggtgacaaacagcagatagatgagaggtgccaacagcttagagaatcaattgacacaagcactgctgtattcgacaaagaaaaggcccaagagcgtttatctaagttatctggaggtgttgctgtactcaagattggtggagctagtgaagctgaagttggtgagaaaaaagatagggtgacagatgctctaaatgctgcaagggctgctgtggaggagggcattgtgccaggtggtggagttgcccttctttatgccaccaaggagcttgacaagattagcacagcaaacgaggacgaaaagattggagttcaaattatcaagaattctttgaaggctcccttgatgaccatagctgcaaatgctggcattgatggagctatagtcatagggaagctgattgaacaagaggacctcagtttgggctatgatgcagcaaaaggggagtacgtagacatgatcaaggccggcatcatcgatcccgtgaaggtgatccgcaccgcacttcaagacgctgcaagtgtttccctgctgatggcaaccacggaggccgctgtctccgagctcccggcaaccaagtccagaatagccagccgtatgccgcagatgagcgggatggacttctgaggaaattcaggcgccgtgtatgatgctgatctgtgacctgtaaggctaggaattgggaggttggggacgaactttgtttccctagcggatagtcggatacgtctacggagttcattcgaaacgaggtgcagaactgtcaccgagttgcagtttttgatgcagtgcggcgttcgatggtggggtaataaagctggactgatagcgccttccattttgaatgctctgtctgaggcatcgtttggtgccgtcgaagcagctgaattccctttgtacgagcgcagctgagtttctttctgtcaccgtctcgagttcaaccttcacacgacacgagctacatttttacccgtctggtttttccgtagctgagcacagagcaacagcacatgtcagcaaatttgacacctgccgtgccgtccctgaaaggataccaggaggcgaaaacggctgtaataatatggatgaaaaggtaaaactccgtttgcttaaacgcgcagagtttgttcacgtcgaagaattacggttagaagacgaagaaatcacgggagagtagagactttgggaaggtagattgctgctcgcttgaagctcctacgctgtcttggcctcgtcgggcggctggatgaagcgggaaacttctccgttcatcaccctccatgggccccagtagaacttgggcggcatgatcggcaccgcctcgccagggtgatcctcccagatttttcgcaaaaaaaaaagagagtcagtttagccttgcctagcgagctcaatgaagcgcacggcccgaattctcgaaatgcttcgaacaaatctgatgctttcggtgcatggcaacagaacctctctccagatgcaatgagcagacagacgaattcgggcaccgagatcatgtgaggggccttggaaaatttcatcaacacagagtcccgatgtacgagtcaccacgccactcaagctggccggagatccgctaagcattccgacgagcaccgatgggcgctgcagtgcgtgtggccggcgggagaggagcgagggcaagcggggaatggaaatcccaggcgctgaggttggccgaccttgtagagctgctcggtgacggcggccccgaggacgccggtgtagaaggcggcgacgtaggtgccgacgagtggcgcgacggagcgcgccgggcggtggggctccaccataccccacagcaccgtcttctcgcacctgtggaactgccgagttgggtgcagcaggcccacgccgcccgttacggcccaagtgtgcattctctgccgcgccgcgaaaacacaaaaacccggctagtccaaagtgacgatgaaaaaacaaaacaaaacggaaatagctcgcggccgcggtttcttgcgccactccggctcagccgccgcccgccacccgccacagccgccgcagacgagatgggcatcaagggtttgacgaaactgctggcggacaatgcgcccaaggcgatgaaggagcagaagttcgagagctacttcggccgcaaaatcgccgtcgacgccagcatgagcatataccagttcctgattgtagttggaaggacaggcatggaaactctcacaaatgaagctggtgaagtcactagtcatttgcaaggaatgttcaaccggacaataagattactggaagcgggaatcaagccagtttatgtttttgatggcaagcctcctgatatgaagaaacaagagcttgctaaaagatactcaaaaagagatgatgcaaccaaagatctgactgaggcagtagaggtaggagataaagatgcgattgaaaaattgagcaagaggactgtaaaggtcacaaggcaacacaacgaagattgtaaacggctattaagacttatgggggttcctgttgtagaggcaccttctgaagcagaagcagaatgtgcagccctttgcataaacgataaggtgttcgctgttgcttcagaagatatggactcccttacttttggggctccacggttccttcgtcatttaatggatccaagttccaagaaaatacctgtgatggaatttgatgttgccaaggttttggaggagcttgaactcaccatggaccagttcattgatttgtgcatcctgtgtggatgtgactattgtgatagcatcaaaggtatcggggggcaaacagctctgaaacttattcgtcaacatgggtccatagaaagcatcttggagaatcttaataaagacagatatcaaattcctgaggactggccttaccaagaagctcgacgcttgttcaaggagcctaatgtcacattggatattcctgagctaaaatggactgcacctgatgaggagggtctcataagtttcctggtaaaagataatggtttcaacgaagatcgggtgacaaaggccatagagaagatcaaatctgccaagaataaatcgtcgcaaggaagactcgagtcctttttcaagccaactgccaccacatcagcaccgctaaaacggaaggagacttcggataaaacaagcaaggcagctgcgaacaagaaaacaaaggctggtggaaagaagaaataatcttggatgcttgatgtacaactacgactacgaaagcagcggtggcgtgatcacttcgcttagattatttaactccctgttttaactcagagctttggtaaaagtttgctcatgtttcaagctggggtaagttagttgtgtttgaagagattggtgtaccaagtaacaaaacttatcgctgttttttacttcttgtcctttgaagtatgtatgccagtcctcgtccttttaagtatctgtgttgcaacaaaaatttaaggccttgttttgatgcataggctcactttaagatttagtttaaatttcacaccaagctactttaacacgcatggattacg

SEQ ID NO: 209254 - DNA, 1368 bp, Zea Mays
tgcatgcccatggcctttttctgtggaatataactttgacctgtaaaatgaggccagttttttgcgggaaccttgactatgatgttcgcatctctgaggtcgagcgccttttcgggaagtatggaagggtggaacgagtggatctgaagacagggtttgcattcatctacatggaagacgaacgtgacgctgaagatgctatcagtagacttgatggaattgattttggcagaaaaggaaggagaatcaaagttgagtggaccaaggaggatcgcactgctgatcgaagaggcaactcaaggaggtctccaaccaatgcaaaaccgaccaaaaccttgttcgtgatcaactttgacccgatcaacacgagaattcgagatctggagaggcactttgataaatatggcagggtcgcgaatgtaaggatcaaaaagaacttcgcctttatacagtttgaggcgcaggaggatgctactagagcattggagggtgctaatgggagccatttcatggacagggtcatctcagttgagtatgcgctccgtgacgacgatgaaaaaggtgaaagggcgacgaacggatacagcccagacaggagaggccgcgaaagatccccaggtgcaagacggtctcctagtccttacggcagaggtcgggagagaggtagcccagactatgggagaggcaaggagaggggcagcccagactacggcaggggaggccgcagccctgataatggcaggggaggccgcccagccggcggtggcggcggcggcagaggtgatcacgccaggggaggaggacgacgacgcagccctgactattatgaccgcgagcgccgagaagctagtcctggctatgacaggccccccagctgctcacctggaactgggagggacgcgagagactagaaaagcgccccatgcctgtgttgtagaattcaagcatcaaagcctcccgcgtcagatgaagttagagttggtgatgttagccagcaggaaactcgtttacttatgtgcgttagctcgtgctgactttgcaagttagcttaccatttcccatttgcgactccagaatgtaactcgtatggtctggaatggtagctttcaggactcgtttgaacctttcttggagtttttttcttcttttccggctaccttgattgccctgtgcatgcgctgatgaatctacagattgtttcgtctgtcaagtgttccgctgtaatgtaagagacgaaattatttgttccttgttgatgtagtccctgttttgtgcagcgagaaatttcagtatcttacgctcagtatgcgcgcctctccagatctgacacctaatatccacgcgaccacgctgatcagcccaaacggc

SEQ ID NO: 209255 - DNA, 1901 bp, Zea Mays
cggccctgcgtgcgtgatgatagtagctggacagcagcagcagcagctatacatgccctcatgaatgaatcatcgaccaccccaacccaaccccctgccgcgcccgcacccagcgccccgagccctgctcccccatcgtcttcttccttgtccgtctccactaccgaccaacgggctgcctgctcacacttcgccactactgctgctgcgcgttggcgagcgcgcgtggttcacgagcgagctccaccacaagcccagtcgcgcacggcagccgttttgcttgttttgtttgctttccgcctcttccgtgcttcctcttttgggcggcctggctgggctagctagctgttctgttcattccgagttcccggcatagaacacgaggttggagttagaggcttaccgagggagcagacagcagaggacactataagagtagctagccctacccaatatcttcagccgtgcttgccaacttggagagagagagagagagagagagagagagagagagagagagagagagagagagagagagagagagagagagagagagagagagagagagagagagaagagaagagaagagaagagaagggagtgagtgatcgcaggaaggaggatcggagtgatgggagacgcagcagagaccaacaagactcttcacaactggatgggcgagccgaggccgaggtcgagcgaccagcgcgacgaggaggagacgcttcagctcagcctcggcctccccggaggaggagcaagtgcgggtggtggggtagcacccgccgcctggagaatgctgccggccagagacgaggagatgcgctctgctgctgctgtcgtcgacacctccctgctctctctcggctactccgccccagctttctcgccccgctcaccaggcaaggcaaaggggtccccagcagcagctacagagaatgcccttgcatccaccaacaacgcctcccagagaagatctccaaataccccggttattgggtggcctccagttcgtgccttcagaagaaatctggccacctctagcagagcatcccttgaacatcagaatgggaagaaggaagacaaacctgaacagaccacaaaaagagctccatttgtaaagatcaacatggacggcatccctattggtagaaaaatcgatctgagtgccctcggtagttacgatgagctgtctctgtctgtcgacaagctattccgggggcttcttgcagcacaacaagaccctctggctgccggcgcaaaggagtgttcacaggaagaggtggcgatatcgggtttactagatggaactggggagtacactctggtttatgaggattatgaaggcgatagggtgctggttggcgatgtcccctgggggatgtttgtttcttcggtgaagaggctgcgcgttctgaagacatctgacctctcttcatctctaacagcacctcctggccagaagaggacggtaactgagtgtccagtgtttacctcttagacacttccttgcagtgatgttggtgtgctgtgaagaagaaaacgtcttctgagcttgtatcatctttcttcgtggtttcttcctcttcttttccctactttctcttggaagggatcatcaaagaaccgaaccgaccttttgggttttcctgctcttgtttattttgtttctctttccgggaagcgatgtgaccttttgggttgtatgtaaatgttcagacgaaccagctctatgtttatgcagcctatcctgtctgttgccttttacacaccgaggacatgtactgtttgttgtggtcatgatggctgaaatcgacgatttttttcccgtcaacatgcatgaacaattctggtcatgttatccgtttggtgggggtttgcagcggggatcttgaagttct

SEQ ID NO: 209256 - DNA, 1074 bp, Zea Mays
caatgcatgtccattactcattcttttttatcctatggtcttgttctgcacaaagtcctttcgtttgttcctggtgcaaggcaaaggggtccccagcagcagctacagagaatgcccttgcatccaccaacaacgcctcccagagaagatctccaaataccccggttattgggtggcctccagttcgtgccttcagaagaaatctggccacctctagcagagcatcccttgaacatcagaatgggaagaaggaagacaaacctgaacagaccacaaaaagagctccatttgtaaagatcaacatggacggcatccctattggtagaaaaatcgatctgagtgccctcggtagttacgatgagctgtctctgtctgtcgacaagctattccgggggcttcttgcagcacaacaagaccctctggctgccggcgcaaaggagtgttcacaggaagaggtggcgatatcgggtttactagatggaactggggagtacactctggtttatgaggattatgaaggcgatagggtgctggttggcgatgtcccctgggggatgtttgtttcttcggtgaagaggctgcgcgttctgaagacatctgacctctcttcatctctaacagcacctcctggccagaagaggacggtaactgagtgtccagtgtttacctcttagacacttccttgcagtgatgttggtgtgctgtgaagaagaaaacgtcttctgagcttgtatcatctttcttcgtggtttcttcctcttcttttccctactttctcttggaagggatcatcaaagaaccgaaccgaccttttgggttttcctgctcttgtttattttgtttctctttccgggaagcgatgtgaccttttgggttgtatgtaaatgttcagacgaaccagctctatgtttatgcagcctatcctgtctgttgccttttacacaccgaggacatgtactgtttgttgtggtcatgatggctgaaatcgacgatttttttcccgtcaacatgcatgaacaattctggtcatgttatccgtttggtgggggtttgcagcggggatcttgaagttct

SEQ ID NO: 209257 - DNA, 952 bp, Zea Mays
gtcctgttcaaaattttatgcccccaatctccaaataccccggttattgggtggcctccagttcgtgccttcagaagaaatctggccacctctagcagagcatcccttgaacatcagaatgggaagaaggaagacaaacctgaacagaccacaaaaagagctccatttgtaaagatcaacatggacggcatccctattggtagaaaaatcgatctgagtgccctcggtagttacgatgagctgtctctgtctgtcgacaagctattccgggggcttcttgcagcacaacaagaccctctggctgccggcgcaaaggagtgttcacaggaagaggtggcgatatcgggtttactagatggaactggggagtacactctggtttatgaggattatgaaggcgatagggtgctggttggcgatgtcccctgggggatgtttgtttcttcggtgaagaggctgcgcgttctgaagacatctgacctctcttcatctctaacagcacctcctggccagaagaggacggtaactgagtgtccagtgtttacctcttagacacttccttgcagtgatgttggtgtgctgtgaagaagaaaacgtcttctgagcttgtatcatctttcttcgtggtttcttcctcttcttttccctactttctcttggaagggatcatcaaagaaccgaaccgaccttttgggttttcctgctcttgtttattttgtttctctttccgggaagcgatgtgaccttttgggttgtatgtaaatgttcagacgaaccagctctatgtttatgcagcctatcctgtctgttgccttttacacaccgaggacatgtactgtttgttgtggtcatgatggctgaaatcgacgatttttttcccgtcaacatgcatgaacaattctggtcatgttatccgtttggtgggggtttgcagcggggatcttgaagttct

SEQ ID NO: 209258 - DNA, 704 bp, Zea Mays
tttttggtgttcttcagcaggacgaacctagctacgatgatgaacctgttgatcgcagcaaacactggggagatttggaggaagaggaggaagaagaggaagaggaggaagaggaagaaccaatggaagacgaggaaatggaagacggaattcagtccgtcgataccatttcaagtactccgactggtgttgaaacacctgatgttatcgaccttcggaagctgcagaggaaggagactgacaagcaggcagaacggccgttgtatcaggttcttgaacagaaggacaaaaggatcgcccctgggacactatatgggtcaagccatacgtacgtgctgggagcacaagataaatcatcagctccgaaaagagtggatctgcttaagaatcaaaagtcagacaaggtggacgtcaccatccaacccgatgccatggatgatgttgtggcagccaagtacgaagaagcgcgagaggaagagaagcttcggaaccaaaaggaggacttcagcgacatggtggcggagtttcataacacttctcatgatgtggcagagttggaaagatcaaaaaagtgctacaaaattttcattgaaaatagcctaaggaaggaaatgatgacgctgcctaaggaaagaaatgatgacgctgtggtttggtacaaatcgtactgccttgttcaacaattcacctatatagtcatctaa

SEQ ID NO: 209259 - DNA, 1206 bp, Zea Mays
tcgatcgccatcgcctcccttccgctccttcatccgcgcctcccactgtttctcagtaaggggaagagaggtattgagaagcagcctttccagcttcctgactttatagctgcaactggaatagaaaagataagacaggcgtatattgagaaagaggatagcaagaagttgaaacagaaacagcgggagcgcatgcagcccaaaatgggcaaaatggatatagattatcaggttttgcatgatgcgttcttcaaatatcagacaaaacccaagttgtctagtcatggtgatctgtattatgaaggcaaagagtttgaggttaaactgagggaaatgaagccaggcatgctgtctcatgagcttaaagatgctcttggtatgcctgatggtgcccctcccccatggcttataaacatgcagcgctatggtccacctccatcttatccccaactgaagatcccaggtcttaatgccccaatcccccctggtgccagttttggttatagaccaggagagtggggaaagccaccagttgatgaggatgaacctgttgatcgcagcaaacactggggagatttggaggaagaggaggaagaagaggaagaggaggaagaggaagaaccaatggaagacgaggaaatggaagacggaattcagtccgtcgataccatttcaagtactccgactggtgttgaaacacctgatgttatcgaccttcggaagctgcagaggaaggagactgacaagcaggcagaacggccgttgtatcaggttcttgaacagaaggacaaaaggatcgcccctgggacactatatgggtcaagccatacgtacgtgctgggagcacaagataaatcatcagctccgaaaagagtggatctgcttaagaatcaaaagtcagacaaggtggacgtcaccatccaacccgatgccatggatgatgttgtggcagccaagtacgaagaagcgcgagaggaagagaagcttcggaaccaaaaggaggacttcagcgacatggtggcggagtttcataacacttctcatgatgtggcagagttggaaagatcaaaaaagtgctacaaaattttcattgaaaatagcctaaggaaggaaatgatgacgctgcctaaggaaagaaatgatgacgctgtggtttggtacaaatcgtactgccttgttcaacaattcacctatatagtcatctaa

SEQ ID NO: 209260 - DNA, 3707 bp, Zea Mays
gcggtaatccggctagatgcgtttgcggtaatcagccctccccaacaacatttggtgaggttttccagtgcatgtttgattatatcgacagactattcgtcatggttcgcccccggaggcttttgtacatggccattgatggtgttgctcctcgtgctaagatgaaccagcagcgctcaagacgattcagggctgcaaaagatgcagctgatgcggctgcagaagaagaacggttacgtgaagagtttgaaagggaaggcagaaagcttcctccaaagcagcaatcacaaacatgtgattcaaatgttattactccagggactgaatttatggctgttttatcagttgctttgcagtattacatccatcgtagattgaattatgatcctggatggaaacaaattaaagttattttgtctgatgccaatgttcctggtgaaggggaacataaaatcatgtcatatattcgtggccaacggaatctgtctggttttaacccaaatacgcgccattgcctgtatggcctggacgcagatctgatcatgctagctttggcgacacatgaagtacacttctcaatactgagagaggtagtttatacacctggacagcaggataaatgcttcttgtgtggtcaggtgggacatctagcagcaaactgtgaaggaaaggtgaaaagaaaagctggggagtttgatgagaagggtggtgctattgttcccaagaagccctatcagttcttgaatatatggaccctgcgggaatatttagaatacgagttcagaatgccaaacccacctttcaagattgattttgaacgcattgttgatgatttcatcttcatgtgcttctttgttggcaacgattttcttccacatatgccgacgctagagatccgtgagggagctattaatttgctaatggcagtgtacaagaaggaatttccctcaatgggtggatatttaactgattcttgcacgcctgatctgagcagagttgagcacttcattcaagcagttggttcatatgaggacaaaatatttcagaaaagagcacgtttgcatcagcgtcaagcggaaaggataaaacgggaaaaagctcaagcaaagcggggtgatgatctggatccccatgttagggatgaccttattgtacctattcaacgttttcaagggtctcgcctagcctctggggctgtacctgtgccatatgagcagaatggatcccataaagacaataaagaaaggaatagtcgagctcggaaagctgcacgagtatcaacgtcaggttccagcattgcctcagccttagttgaagctgaaaatgacctcgaagcccaagaatgtgaaaacaaagaagaactgaagtcaatgcttaaagatgcacttcgcgagaaatctgatatttttaattctgacaatccagaggaggataaggtgaaacttggagaaccaggatggagggaaaggtactatgaagagaaatttggggcaagaacacccgagcagattgaagaaatacgcagagatgttgttctcaaatacacagaaggattgtgttgggtaatgcactactattatgaaggggtatgctcatggcaatggtaatttagctgctcaagttagccaaatatatcaaattatgcagaggttctacccttatcattatgctccgtttgcttcggatctaagtggattgggccaacttaatattaaatttgaacttgggacaccattcaaaccttttgatcaacttatgggtgttttcccagctgcaagtgcccatgcgctaccgctacagtatcgacgattgatgaccgatccaaattcaccaataattgatttttatcctacagattttgaagtagatatgaatgggaagagatattcttggcaagggattgcaaaactaccgtttattgatgaagatcgtttgttggctgagataaaaaaagttgagcatactttgacgcctgaagaagcaaggagaaacagtatcatgtgtgatatgctttttgtgaatgggtcacatccactttcgccttatatctactctctcaacagcaaatttgggcatctgcctgacaaaaggagaaatgaaattaaagaaaaacttgatccttctgctagtggaggaatgaatggatacataacactttgcagtggggatccatgccctcctatctttaggtctcctgtggacgggctggaggatattatggacaatcaagtgatatgttcaatctacaatcttccagaccatcataagcacatagcccagccgccagttggtgttatcatgcccaagaagattgttgaagccggtgatctgaaaccacctccagtgctgtggcatgaagatagtggcaggcggcctcatgataatagcaacaggcaaaacccatctggtgccatatcaggccgtcaacttggagaggcagctcaccgacttgtcataaacagcttaaatgctcagggtagggggcaacatagtggcacatcaatgccatatcgaactataatgaatggcttgcatcatctggatgtagcgtcccctgtcagcaatcaaggcatgcgtccacaagtggggcagtctgccggacctcctggttggtatgttcctaggggtagtgtatcaaatggtcaaccaccagcttatgcatcatcaggatcaggtcattatcagtatgaaagttcggggcattcacaatatgaacaaggtaaccatggaaggcaacaatctcacccatatgcaagagatggcttccatgatacacgaggaagggttccacctgcatatgggtaccagcagagcaacatgtatccatcgggtcctggattgtatgggcaacctccatcagcatatcctggggttcatggtggaggctaccaaccccctccatatggcggaggccagcagtggcagcaacaatcatatagttcgtatgccgtgcgaggcccctacggaggcaggccaccacccacaagggctgattcagggtcacagcaaccacagaaccgttatggtgctttagacagaagtaacaaccggaggccttcatctggatacagaagataatagtttgtgacccagtttatgttataactcaaagtttgttatcagtaaagcttcgagtaactcagctaaagcataggcggaatagtctgctaagtcttgtgaccttcaagcagttagggggtggccatcaaagatattgggaggcaaaatttgtatgctagtgcagactttcaggtactagcggttttgatcgccattgaagcagctaggtttgcggcatctcagaggttttgtgaagcaagatttgtatactactgttatcaacgggccatcaggtactggtggctggtcgccattctttatctgtagctgccatttgtttagaagatgtcataaacggccctggggtttaaataggtcccattgagaatatttttgaaggacgtttactctgagacttgacaagttttgggggcattttgatatcagataaatgtatgcaggagtgcagttttgatgatgtgtgtattccaagtcattaattaaagtgtgacgtgtctattgccaggcgaggaaggaaacgttacgctttgcacttatcccgttccaaattacaagtgatttcaagaaaaaaaattcagctttcttggagagtcctaaattactacctccattctcaaatattattt

SEQ ID NO: 209261 - DNA, 3961 bp, Zea Mays
ctcttcgttagggtttcgcgcctcttctcaccgtctgcctactactagggatagacctccggcaaggcctccctcgcgccggcggcgtcagcagcggatatgggtgttccggcgttctaccgatggctggcggagaagtacccgatggtggtggtggacgtggtggaggaggagcccgtagagatcgagggcgtcaaggtgcccgtcgacacctccaagcccaaccccaacagcctcgagttcgacaacctctacctcgatatgaacggaatcatacacccctgcttccacccggaggacaggccctccccaacaacatttggtgaggttttccagtgcatgtttgattatatcgacagactattcgtcatggttcgcccccggaggcttttgtacatggccattgatggtgttgctcctcgtgctaagatgaaccagcagcgctcaagacgattcagggctgcaaaagatgcagctgatgcggctgcagaagaagaacggttacgtgaagagtttgaaagggaaggcagaaagcttcctccaaagcagcaatcacaaacatgtgattcaaatgttattactccagggactgaatttatggctgttttatcagttgctttgcagtattacatccatcgtagattgaattatgatcctggatggaaacaaattaaagttattttgtctgatgccaatgttcctggtgaaggggaacataaaatcatgtcatatattcgtggccaacggaatctgtctggttttaacccaaatacgcgccattgcctgtatggcctggacgcagatctgatcatgctagctttggcgacacatgaagtacacttctcaatactgagagaggtagtttatacacctggacagcaggataaatgcttcttgtgtggtcaggtgggacatctagcagcaaactgtgaaggaaaggtgaaaagaaaagctggggagtttgatgagaagggtggtgctattgttcccaagaagccctatcagttcttgaatatatggaccctgcgggaatatttagaatacgagttcagaatgccaaacccacctttcaagattgattttgaacgcattgttgatgatttcatcttcatgtgcttctttgttggcaacgattttcttccacatatgccgacgctagagatccgtgagggagctattaatttgctaatggcagtgtacaagaaggaatttccctcaatgggtggatatttaactgattcttgcacgagttgagcacttcattcaagcagttggttcatatgaggacaaaatatttcagaaaagagcacgtttgcatcagcgtcaagcggaaaggataaaacgggaaaaagctcaagcaaagcggggtgatgatctggatccccatgttagggatgaccttattgtacctattcaacgttttcaagggtctcgcctagcctctggggctgtacctgtgccatatgagcagaatggatcccataaagacaataaagaaaggaatagtcgagctcggaaagctgcacgagtatcaacgtcaggttccagcattgcctcagccttagttgaagctgaaaatgacctcgaagcccaagaatgtgaaaacaaagaagaactgaagtcaatgcttaaagatgcacttcgcgagaaatctgatatttttaattctgacaatccagaggaggataaggtgaaacttggagaaccaggatggagggaaaggtactatgaagagaaatttggggcaagaacacccgagcagattgaagaaatacgcagagatgttgttctcaaatacacagaaggattgtgttgggtaatgcactactattatgaaggggtatgctcatggcaatggtaatttagctgctcaagttagccaaatatatcaaattatgcagaggttctacccttatcattatgctccgtttgcttcggatctaagtggattgggccaacttaatattaaatttgaacttgggacaccattcaaaccttttgatcaacttatgggtgttttcccagctgcaagtgcccatgcgctaccgctacagtatcgacgattgatgaccgatccaaattcaccaataattgatttttatcctacagattttgaagtagatatgaatgggaagagatattcttggcaagggattgcaaaactaccgtttattgatgaagatcgtttgttggctgagataaaaaaagttgagcatactttgacgcctgaagaagcaaggagaaacagtatcatgtgtgatatgctttttgtgaatgggtcacatccactttcgccttatatctactctctcaacagcaaatttgggcatctgcctgacaaaaggagaaatgaaattaaagaaaaacttgatccttctgctagtggaggaatgaatggatacataacactttgcagtggggatccatgccctcctatctttaggtctcctgtggacgggctggaggatattatggacaatcaagtgatatgttcaatctacaatcttccagaccatcataagcacatagcccagccgccagttggtgttatcatgcccaagaagattgttgaagccggtgatctgaaaccacctccagtgctgtggcatgaagatagtggcaggcggcctcatgataatagcaacaggcaaaacccatctggtgccatatcaggccgtcaacttggagaggcagctcaccgacttgtcataaacagcttaaatgctcagggtagggggcaacatagtggcacatcaatgccatatcgaactataatgaatggcttgcatcatctggatgtagcgtcccctgtcagcaatcaaggcatgcgtccacaagtggggcagtctgccggacctcctggttggtatgttcctaggggtagtgtatcaaatggtcaaccaccagcttatgcatcatcaggatcaggtcattatcagtatgaaagttcggggcattcacaatatgaacaaggtaaccatggaaggcaacaatctcacccatatgcaagagatggcttccatgatacacgaggaagggttccacctgcatatgggtaccagcagagcaacatgtatccatcgggtcctggattgtatgggcaacctccatcagcatatcctggggttcatggtggaggctaccaaccccctccatatggcggaggccagcagtggcagcaacaatcatatagttcgtatgccgtgcgaggcccctacggaggcaggccaccacccacaagggctgattcagggtcacagcaaccacagaaccgttatggtgctttagacagaagtaacaaccggaggccttcatctggatacagaagataatagtttgtgacccagtttatgttataactcaaagtttgttatcagtaaagcttcgagtaactcagctaaagcataggcggaatagtctgctaagtcttgtgaccttcaagcagttagggggtggccatcaaagatattgggaggcaaaatttgtatgctagtgcagactttcaggtactagcggttttgatcgccattgaagcagctaggtttgcggcatctcagaggttttgtgaagcaagatttgtatactactgttatcaacgggccatcaggtactggtggctggtcgccattctttatctgtagctgccatttgtttagaagatgtcataaacggccctggggtttaaataggtcccattgagaatatttttgaaggacgtttactctgagacttgacaagttttgggggcattttgatatcagataaatgtatgcaggagtgcagttttgatgatgtgtgtattccaagtcattaattaaagtgtgacgtgtctattgccaggcgaggaaggaaacgttacgctttgcacttatcccgttccaaattacaagtgatttcaagaaaaaaaattcagctttcttggagagtcctaaattactacctccattctcaaatattattt

SEQ ID NO: 209262 - DNA, 4087 bp, Zea Mays
ctcttcgttagggtttcgcgcctcttctcaccgtctgcctactactagggatagacctccggcaaggcctccctcgcgccggcggcgtcagcagcggatatgggtgttccggcgttctaccgatggctggcggagaagtacccgatggtggtggtggacgtggtggaggaggagcccgtagagatcgagggcgtcaaggtgcccgtcgacacctccaagcccaaccccaacagcctcgagttcgacaacctctacctcgatatgaacggaatcatacacccctgcttccacccggaggacaggccctccccaacaacatttggtgaggttttccagtgcatgtttgattatatcgacagactattcgtcatggttcgcccccggaggcttttgtacatggccattgatggtgttgctcctcgtgctaagatgaaccagcagcgctcaagacgattcagggctgcaaaagatgcagctgatgcggctgcagaagaagaacggttacgtgaagagtttgaaagggaaggcagaaagcttcctccaaagcagcaatcacaaacatgtgattcaaatgttattactccagggactgaatttatggctgttttatcagttgctttgcagtattacatccatcgtagattgaattatgatcctggatggaaacaaattaaagttattttgtctgatgccaatgttcctggtgaaggggaacataaaatcatgtcatatattcgtggccaacggaatctgtctggttttaacccaaatacgcgccattgcctgtatggcctggacgcagatctgatcatgctagctttggcgacacatgaagtacacttctcaatactgagagaggtagtttatacacctggacagcaggataaatgcttcttgtgtggtcaggtgggacatctagcagcaaactgtgaaggaaaggtgaaaagaaaagctggggagtttgatgagaagggtggtgctattgttcccaagaagccctatcagttcttgaatatatggaccctgcgggaatatttagaatacgagttcagaatgccaaacccacctttcaagattgattttgaacgcattgttgatgatttcatcttcatgtgcttctttgttggcaacgattttcttccacatatgccgacgctagagatccgtgagggagctattaatttgctaatggcagtgtacaagaaggaatttccctcaatgggtggatatttaactgattcttgcacgcctgatctgagcagagttgagcacttcattcaagcagttggttcatatgaggacaaaatatttcagaaaagagcacgtttgcatcagcgtcaagcggaaaggataaaacgggaaaaagctcaagcaaagcggggtgatgatctggatccccatgttagggatgaccttattgtacctattcaacgttttcaagggtctcgcctagcctctggggctgtacctgtgccatatgagcagaatggatcccataaagacaataaagaaaggaatagtcgagctcggaaagctgcacgagtatcaacgtcaggttccagcattgcctcagccttagttgaagctgaaaatgacctcgaagcccaagaatgtgaaaacaaagaagaactgaagtcaatgcttaaagatgcacttcgcgagaaatctgatatttttaattctgacaatccagaggaggataaggtgaaacttggagaaccaggatggagggaaaggtactatgaagagaaatttggggcaagaacacccgagcagattgaagaaatacgcagagatgttgttctcaaatacacagaaggattgtgttgggtaatgcactactattatgaaggggtatgctcatggcaatggttctacccttatcattatgctccgtttgcttcggatctaagtggattgggccaacttaatattaaatttgaacttgggacaccattcaaaccttttgatcaacttatgggtgttttcccagctgcaagtgcccatgcgctaccgctacagtatcgacgattgatgaccgatccaaattcaccaataattgatttttatcctacagattttgaagtagatatgaatgggaagagatattcttggcaagggattgcaaaactaccgtttattgatgaagatcgtttgttggctgagataaaaaaagttgagcatactttgacgcctgaagaagcaaggagaaacagtatcatgtgtgatatgctttttgtgaatgggtcacatccactttcgccttatatctactctctcaacagcaaatttgggcatctgcctgacaaaaggagaaatgaaattaaagaaaaacttgatccttctgctaggttaactaagctcaatattgttgttgttcgacaagtaatattattttgttaaatgtacatgtattgatgtttctgtactgacactttcttttgttgtgtggaccgggggggggggggggggttagtaaaagagcattgaaccagtttgtctgctagttaaattgagaaaatgtggctgatttccacatgtgtggggatccatgccctcctatctttaggtctcctgtggacgggctggaggatattatggacaatcaagtgatatgttcaatctacaatcttccagaccatcataagcacatagcccagccgccagttggtgttatcatgcccaagaagattgttgaagccggtgatctgaaaccacctccagtgctgtggcatgaagatagtggcaggcggcctcatgataatagcaacaggcaaaacccatctggtgccatatcaggccgtcaacttggagaggcagctcaccgacttgtcataaacagcttaaatgctcagggtagggggcaacatagtggcacatcaatgccatatcgaactataatgaatggcttgcatcatctggatgtagcgtcccctgtcagcaatcaaggcatgcgtccacaagtggggcagtctgccggacctcctggttggtatgttcctaggggtagtgtatcaaatggtcaaccaccagcttatgcatcatcaggatcaggtcattatcagtatgaaagttcggggcattcacaatatgaacaaggtaaccatggaaggcaacaatctcacccatatgcaagagatggcttccatgatacacgaggaagggttccacctgcatatgggtaccagcagagcaacatgtatccatcgggtcctggattgtatgggcaacctccatcagcatatcctggggttcatggtggaggctaccaaccccctccatatggcggaggccagcagtggcagcaacaatcatatagttcgtatgccgtgcgaggcccctacggaggcaggccaccacccacaagggctgattcagggtcacagcaaccacagaaccgttatggtgctttagacagaagtaacaaccggaggccttcatctggatacagaagataatagtttgtgacccagtttatgttataactcaaagtttgttatcagtaaagcttcgagtaactcagctaaagcataggcggaatagtctgctaagtcttgtgaccttcaagcagttagggggtggccatcaaagatattgggaggcaaaatttgtatgctagtgcagactttcaggtactagcggttttgatcgccattgaagcagctaggtttgcggcatctcagaggttttgtgaagcaagatttgtatactactgttatcaacgggccatcaggtactggtggctggtcgccattctttatctgtagctgccatttgtttagaagatgtcataaacggccctggggtttaaataggtcccattgagaatatttttgaaggacgtttactctgagacttgacaagttttgggggcattttgatatcagataaatgtatgcaggagtgcagttttgatgatgtgtgtattccaagtcattaattaaagtgtgacgtgtctattgccaggcgaggaaggaaacgttacgctttgcacttatcccgttccaaattacaagtgatttcaagaaaaaaaattcagctttcttggagagtcctaaattactacctccattctcaaatattattt

SEQ ID NO: 209263 - DNA, 4086 bp, Zea Mays
aatagaaaaaaaaactcgatggacagacgtcatagacagatttttcgttgctcgactggcccgacagatgagtccgtctcgacagtgaccggacctcttcgttagggtttcgcgcctcttctcaccgtctgcctactactagggatagacctccggcaaggcctccctcgcgccggcggcgtcagcagcggatatgggtgttccggcgttctaccgatggctggcggagaagtacccgatggtggtggtggacgtggtggaggaggagcccgtagagatcgagggcgtcaaggtgcccgtcgacacctccaagcccaaccccaacagcctcgagttcgacaacctctacctcgatatgaacggaatcatacacccctgcttccacccggaggacaggccctccccaacaacatttggtgaggttttccagtgcatgtttgattatatcgacagactattcgtcatggttcgcccccggaggcttttgtacatggccattgatggtgttgctcctcgtgctaagatgaaccagcagcgctcaagacgattcagggctgcaaaagatgcagctgatgcggctgcagaagaagaacggttacgtgaagagtttgaaagggaaggcagaaagcttcctccaaagcagcaatcacaaacatgtgattcaaatgttattactccagggactgaatttatggctgttttatcagttgctttgcagtattacatccatcgtagattgaattatgatcctggatggaaacaaattaaagttattttgtctgatgccaatgttcctggtgaaggggaacataaaatcatgtcatatattcgtggccaacggaatctgtctggttttaacccaaatacgcgccattgcctgtatggcctggacgcagatctgatcatgctagctttggcgacacatgaagtacacttctcaatactgagagaggtagtttatacacctggacagcaggataaatgcttcttgtgtggtcaggtgggacatctagcagcaaactgtgaaggaaaggtgaaaagaaaagctggggagtttgatgagaagggtggtgctattgttcccaagaagccctatcagttcttgaatatatggaccctgcgggaatatttagaatacgagttcagaatgccaaacccacctttcaagattgattttgaacgcattgttgatgatttcatcttcatgtgcttctttgttggcaacgattttcttccacatatgccgacgctagagatccgtgagggagctattaatttgctaatggcagtgtacaagaaggaatttccctcaatgggtggatatttaactgattcttgcacgcctgatctgagcagagttgagcacttcattcaagcagttggttcatatgaggacaaaatatttcagaaaagagcacgtttgcatcagcgtcaagcggaaaggataaaacgggaaaaagctcaagcaaagcggggtgatgatctggatccccatgttagggatgaccttattgtacctattcaacgttttcaagggtctcgcctagcctctggggctgtacctgtgccatatgagcagaatggatcccataaagacaataaagaaaggaatagtcgagctcggaaagctgcacgagtatcaacgtcaggttccagcattgcctcagccttagttgaagctgaaaatgacctcgaagcccaagaatgtgaaaacaaagaagaactgaagtcaatgcttaaagatgcacttcgcgagaaatctgatatttttaattctgacaatccagaggaggataaggtgaaacttggagaaccaggatggagggaaaggtactatgaagagaaatttggggcaagaacacccgagcagattgaagaaatacgcagagatgttgttctcaaatacacagaaggattgtgttgggtaatgcactactattatgaaggggtatgctcatggcaatggttctacccttatcattatgctccgtttgcttcggatctaagtggattgggccaacttaatattaaatttgaacttgggacaccattcaaaccttttgatcaacttatgggtgttttcccagctgcaagtgcccatgcgctaccgctacagtatcgacgattgatgaccgatccaaattcaccaataattgatttttatcctacagattttgaagtagatatgaatgggaagagatattcttggcaagggattgcaaaactaccgtttattgatgaagatcgtttgttggctgagataaaaaaagttgagcatactttgacgcctgaagaagcaaggagaaacagtatcatgtgtgatatgctttttgtgaatgggtcacatccactttcgccttatatctactctctcaacagcaaatttgggcatctgcctgacaaaaggagaaatgaaattaaagaaaaacttgatccttctgctaggttaactaagctcaatattgttgttgttcgacaaagtttaacacctgctattattttgtacagtggaggaatgaatggatacataacactttgcagtggggatccatgccctcctatctttaggtctcctgtggacgggctggaggatattatggacaatcaagtgatatgttcaatctacaatcttccagaccatcataagcacatagcccagccgccagttggtgttatcatgcccaagaagattgttgaagccggtgatctgaaaccacctccagtgctgtggcatgaagatagtggcaggcggcctcatgataatagcaacaggcaaaacccatctggtgccatatcaggccgtcaacttggagaggcagctcaccgacttgtcataaacagcttaaatgctcagggtagggggcaacatagtggcacatcaatgccatatcgaactataatgaatggcttgcatcatctggatgtagcgtcccctgtcagcaatcaaggcatgcgtccacaagtggggcagtctgccggacctcctggttggtatgttcctaggggtagtgtatcaaatggtcaaccaccagcttatgcatcatcaggatcaggtcattatcagtatgaaagttcggggcattcacaatatgaacaaggtaaccatggaaggcaacaatctcacccatatgcaagagatggcttccatgatacacgaggaagggttccacctgcatatgggtaccagcagagcaacatgtatccatcgggtcctggattgtatgggcaacctccatcagcatatcctggggttcatggtggaggctaccaaccccctccatatggcggaggccagcagtggcagcaacaatcatatagttcgtatgccgtgcgaggcccctacggaggcaggccaccacccacaagggctgattcagggtcacagcaaccacagaaccgttatggtgctttagacagaagtaacaaccggaggccttcatctggatacagaagataatagtttgtgacccagtttatgttataactcaaagtttgttatcagtaaagcttcgagtaactcagctaaagcataggcggaatagtctgctaagtcttgtgaccttcaagcagttagggggtggccatcaaagatattgggaggcaaaatttgtatgctagtgcagactttcaggtactagcggttttgatcgccattgaagcagctaggtttgcggcatctcagaggttttgtgaagcaagatttgtatactactgttatcaacgggccatcaggtactggtggctggtcgccattctttatctgtagctgccatttgtttagaagatgtcataaacggccctggggtttaaataggtcccattgagaatatttttgaaggacgtttactctgagacttgacaagttttgggggcattttgatatcagataaatgtatgcaggagtgcagttttgatgatgtgtgtattccaagtcattaattaaagtgtgacgtgtctattgccaggcgaggaaggaaacgttacgctttgcacttatcccgttccaaattacaagtgatttcaagaaaaaaaattcagctttcttggagagtcctaaattactacctccattctcaaatattattt

SEQ ID NO: 209264 - DNA, 2379 bp, Zea Mays
cattatatcgtctaattaaaagatttaatcaccgaaccgatttcatatccgcgttcctgacatttttgcgaacgaaactagaccactcatactatatatatttcaaataaaaaaattacgtgattaagattaatatataattagtgtatattaacatgtaattagtatctattaagcaatttaccatataattagtgtctattaatagattttttaaatttttttaactcatgcaccatgtactcatgcaagcaaccaaacaacatctcttgtgaaccagactggccacatacacacaaccaaacacgctatactgcatgcactcagccagtccagtctgagccaggctcactagatacgagccaggctcacccatacaagtaaccaaacgccccctaagagaacctggaaccggctgcgtctgggagagtggctgggtgccgtcgtgtacgaactccaactatacctatactccagaaatcttcgtgagaggaagtcgagcgccgggagcggcgctcaactcatccgctcaacggggttctaacactatccatggaagaccccgtggcggcgccctcttcgtcttccgccgccccagctgcttccgcagcggctaggatttcggcggcggcggcggcggcggtaacatctgccgttacctctgcgccgcccgctctcgctccgctgcagccgtctggcaccgccgctgcggtccctgaagccgcgtcgacgtgccggaggcagctgttcacggtggagctgcggccaggggagtccacaatcgtgtcgtggaagaagcttctcaaggaggccgggcacaccgccacggcaccgccagtggcgccggagccaaagttcgctgcacatgcgggcccatctggtgctgtaagcagtcattttgcggttgttgcgtgttggttggttacttggttacctgctgcatcgatgtaatctgtgcgctatctagcttagccttttgagttcatgaaaatagaaggattccctgctgactgaaggtaagatctggaagatggaacgtgagggccgtttgtgtttggtgcctgtgctctatcttccagagatgttctacagcgagtatcagttcctcttgtaatctgccaaaaccttgaaagcatataggtccaaatcaatgacacctcatcgtgatggattgttgtacctgttcatgccaaaaccttatcattcttgaacatgatgttcttagcattcagcatttcatcagtgtgaaaagcacatcctgcagaaaatgacccaaaggatccaatgcagtcattgaaaaaattgagtgcctttacatgggaaaacatagcagtgacgaagaggatcttaatgatgtaccagatgatgatcagtatgacactgaggattctttcgttgatgatgctgaattggatgaatattttgaagtcgataatttgaaaactaagcacgatgggtattttgtgaacaagggaagttggatcagataactgatgaacctggcggatcggcaaatgtcgctccaaagaaaaggagaagaaaggatgcatcaagtacttatctggagactaatcatcttgctccagttgattattttgatattggctatgtacctggaaaatcctctgcaagaggtactgcgaaggtgggaaaacaattagctagtagcaacataggttcttatggtcaataccacgaagacaatagagtggtgaagaataaaaccagtggtcctggaggagcccctagaagaaaatcttctgaattctcggttggtgatgctgcagcacgcgctaaggttattaaggatgtctcagatgctcctttggagctaagagacttggaaaagcaaaaggctgcaccaccacctgtttcctatgcacataagtcaaaaaccagtgaggcatttgattatgcttatccagctgacagggataaaggcacttcagcacaacttggtttccaacaaagaaaggtaagtggagaaaatcaagatccatcaaatagaatatatcacaaagagaagcattgaacaagtgaatatcctggcttggttatggctagtgcggcctattctacacaaacaatggttcatgtattaaacccaaaggcaccaggcttgagcgaggtattcgtgacctccagaagattgctgcagaatacagaccaccaacaattgatattaatgaggttgatccaaatggccaggcagcagttaaaagacggttgcctcctgaagtaaagcaaaaggttgcaaggttatcggtatgaactatgtagtacactagcaccacatccaaatttacttcagattcaagtgcagatactacttcgtctgaactttggaaattttgtttgcagactacatatgcatgcttg

SEQ ID NO: 209265 - DNA, 2401 bp, Zea Mays
cattatatcgtctaattaaaagatttaatcaccgaaccgatttcatatccgcgttcctgacatttttgcgaacgaaactagaccactcatactatatatatttcaaataaaaaaattacgtgattaagattaatatataattagtgtatattaacatgtaattagtatctattaagcaatttaccatataattagtgtctattaatagattttttaaatttttttaactcatgcaccatgtactcatgcaagcaaccaaacaacatctcttgtgaaccagactggccacatacacacaaccaaacacgctatactgcatgcactcagccagtccagtctgagccaggctcactagatacgagccaggctcacccatacaagtaaccaaacgccccctaagagaacctggaaccggctgcgtctgggagagtggctgggtgccgtcgtgtacgaactccaactatacctatactccagaaatcttcgtgagaggaagtcgagcgccgggagcggcgctcaactcatccgctcaacggggttctaacactatccatggaagaccccgtggcggcgccctcttcgtcttccgccgccccagctgcttccgcagcggctaggatttcggcggcggcggcggcggcggtaacatctgccgttacctctgcgccgcccgctctcgctccgctgcagccgtctggcaccgccgctgcggtccctgaagccgcgtcgacgtgccggaggcagctgttcacggtggagctgcggccaggggagtccacaatcgtgtcgtggaagaagcttctcaaggaggccgggcacaccgccacggcaccgccagtggcgccggagccaaagttcgctgcacatgcgggcccatctggtgctgtaagcagtcattttgcggttgttgcgtgttggttggttacttggttacctgctgcatcgatgtaatctgtgcgctatctagcttagccttttgagttcatgaaaatagaaggattccctgctgactgaaggtaagatctggaagatggaacgtgagggccgtttgtgtttggtgcctgtgctctatcttccagagatgttctacagcgagtatcagttcctcttgtaatctgccaaaaccttgaaagcatataggtccaaatcaatgacacctcatcgtgatggattgttgtacctgttcatgccaaaaccttatcattcttgaacatgatgttcttagcattcagcatttcatcagtgtgaaaagcacatcctgcagaaaatgacccaaaggatccaatgcagtcattgaaaaaattgagtgcctttacatgggaaaacatagcagtgacgaagaggatcttaatgatgtaccagatgatgatcagtatgacactgaggattctttcgttgatgatgctgaattggatgaatattttgaagtcgataatttgaaaactaagcacgatgggtattttgtgaacaagggaagttggatcagataactgatgaacctggcggatcggcaaatgtcgctccaaagaaaaggagaagaaaggatgcatcaagtacttatctggagactaatcatcttgctccagttgattattttgatattggctatgtacctggaaaatcctctgcaagaggtactgcgaaggtgggaaaacaattagctagtagcaacataggttcttatggtcaataccacgaagacaatagagtggtgaagaataaaaccagtggtcctggaggagcccctagaagaaaatcttctgaattctcggttggtgatgctgcagcacgcgctaaggttattaaggatgtctcagatgctcctttggagctaagagacttggaaaagcaaaaggctgcaccaccacctgtttcctatgcacataagtcaaaaaccagtgaggcatttgattatgcttatccagctgacagggataaaggcacttcagcacaacttggtttccaacaaagaaaggtaagtggagaaaatcaagatccatcaaatagaatatatcacaaagagaagcattgaacaagtgaatatcctggcttggttatggctagtgcggcctattctacacaaacaatgcacccagttgttggtagggcaggttcatgtattaaacccaaaggcaccaggcttgagcgaggtattcgtgacctccagaagattgctgcagaatacagaccaccaacaattgatattaatgaggttgatccaaatggccaggcagcagttaaaagacggttgcctcctgaagtaaagcaaaaggttgcaaggttatcggtatgaactatgtagtacactagcaccacatccaaatttacttcagattcaagtgcagatactacttcgtctgaactttggaaattttgtttgcagactacatatgcatgcttg

SEQ ID NO: 209266 - DNA, 2048 bp, Zea Mays
gttgcgtccccgcttccgttactccctccgcgccccgctcctcccgcctgtcctccacgcgacgttccttgtatccccgtcgccttccttgggcagttgggctgagtcctcccgtctctcgcccctgcagatatagttgcggcggggtttccttcttcgagaaagttccgaaccagagggagccgcgcggaaagccggaggcgtcccatgctgctggcagtcttgctaacttcagctgatggttaatatgagggacaatgactcatcaagcgacgcacaattggacgagccattaggacgggtatcgatactctcttacggttctgggcatatgctcaacgacatcacatcgtcttgttggtttacctatttgcttgtgttcttgacagatctgggacttagtccaggtgatgccgctattgtgatgctttctggacaattggcggatggcttcacaacaatctttgttggggaattgatggatcgctttggacatttcaaactgtggcatgcaggaggatctattttagtggcaatttccttctcgtctgtttttggtagctgtgttccttgcaaacttatgggaattaatacatctactttggagactgttggatacagcacatttgctgctatttttaatgttggttgggcagttactcaagtcgctcacatgtctatggtaaactgcattacatcaaatccaactagccgggtttcacttgtaagctgtcgtaatgccttcacgatggttgcgaatcttagcctgtatggcgttgctttggtgatatttactctattgcagtcagtgaatgtactagttcagtatcggtggattgcttaggtgtccatttccctcggatcttgctttgttgtcatcttcttgattggaaccaaagagccaggatcaattcggcactgtttggataagagtccttccagaatttcatgggactactggttcaagagagtattgtactaccaagttgctctagtctatactctgactagattggtgaccaatgtttcacaggcatttcttgctttctatgtaataaatgatttagaaatgaatcaatcctccaaagcattggtacctgctattatctacatctgcagtttgatagtatctgtaatattacaggtcttggaattgttcttctaccgagcagaatgcacaacctcatgtatgccatttcaatcgtaataggagctgcgaatgcacttatgacagtgacaagtattagcatggaaggtgttctagtaggagaagatctaaatggttgtgcttttgtgtatggctcattaagttttgttgacaaagtttcatgtggaatagctctctatgttctcgagtcctatcaaggaagtacaaagatcagatcaaatttaggaacaacatctggctattcagttacaagacttggcttgggcttagttccagctgcttgttcgctgctttcagctatagcagcttataccatggagctccctgatactcagaaaggacctttggtggaaccccttctagcataacttcactggtggcagtgttacagtttcaccgtgagatttcacagtaattgctcgatggaatgacactgctgctcgagcctgaagatgttagcgacctggtcaattcgttttgacttcgtatatatagtctgaataaattatgacggaggggatatactgagacacgtttgaatagggattagaagtgacataggggggctaggggcaagaagatctgtgttgatcatactgagctttacaagtcattctgcaatccaatgtaaatataacttagcttcatttcgaaagcatcaaaactgccaactaggcacatgtagcgacgatgggcaaggaaaagaatatctctggtccttgttctacgctataatttcattgtatatgtagcatcatgattgaaaagaaatatcttatatttatattgatgggtgaaatagtgtcgcctatgctcatgtaaattgtttctgacatttagaaattaaatatgcttgagaagagagcactaatctgtctaa

SEQ ID NO: 209267 - DNA, 3079 bp, Zea Mays
catagttaaaataagtttttcttaaaaaaagcatctctcttcccccacactccaccattcccgtggacgcgcgcacacactccacggcccaagctcggcacctcgccggcggcaaaccaatccaaaaagcggcggcacaaacaagattatgcaaacgggggttaaaattcccccgtcgcagttgcccgccctcctctagtctagataaaaaaactcgccacctcacgcccttcccatccatcccatcgccactccactcgcactcggccaagaaagaagcggcaggtcactgcccactgctgctccaggagcgagaaaggccagccaaggagggagctttgctttcaggaggagaggagcggcgaggtgggcggcgggcgccatggccgcagcgccgcgtagtcttgtcacctgcagcggcgggggcagtagcagtagtcgcatcctgctcgccgtcttcctggcggccgccctcttggcgtccgcggccaatgcggccgtctcgtacgaccaccgctccctcgtcatcaacggccgccgccgcatcctcatctccggctctatccactacccgagaagcgcccccgagatgtggcccgggctgatccagaaggccaaggacggcggcctcgacgtcgtccagacctacgtcttctggaacgggcacgagccggcgcaggggcagtactacttcgccgaccgctacgacctcgtccgcttcgtcaagctcgtcaggcaggccggcctctacgtccacctccgcgtcggcccctacgtctgcgcggagtggaacttcggtggctttccagtttggctcaagtatgtgccgggcatcaggttcaggacagacaatggcccattcaaggcggcaatgcagaagttcgtggagaagatagtgtccatgatgaagtcggaggggctgttcgagtggcagggaggcccgatcatcatggctcaggtggagaacgagttcgggccaatggagtccgtcgtgggcagtggcggcaagccatacgctcactgggcggcccagatggctgtcgggaccaacgccggcgtgccgtgggtgatgtgcaagcaggatgacgccccggaccccgtgatcaacacttgcaatggcttctactgcgactacttcacgccaaacaacaagcacaagccgaccatgtggaccgaagcctggactggatggttcaccaagttcggcggcgcggcgcctcaccggccggtggaggacctggccttcgccgtggcacggttcgttcagaaaggaggctccttcgtgaactactacatgtaccatggaggaacgaactttgggcgcaccgccggtggccccttcatcgcgaccagctacgactacgatgcccccattgacgagtttggtctgctcaggcaaccgaaatggggtcacttgaggaacatgcacagagctatcaagcaggccgagcctgcgttggtttctggcgatccaacgatacgatctattggaaactacgaaaaggcatatgtcttcaagtcaaagaatggagcctgtgctgcgttcctgtcgaactaccacgttaaatctgctgtgaggatcaggtttgacgggcgtcactatgacctcccggcttggtccatcagcattctgcccgactgcaaaaccgcagtcttcaacaccgcgacggtgaaggagccgactctgctgccgaagatgagcccggtgatgcatcgcttcgcttggcagtcctacagcgaggacacgaactcgctggatgacagcgcgtttgcaagggatggcctgatcgagcagctcagcttgacatgggacaagtcggactacctgtggtacaccacccatgtcaacattggttccaacgaacgattcctcaagtctggccagtggcctcagctcagtgtgtactctgctggacactccatgcaggtgttcgtcaatgggaggtcatatggatctgtttacggcggctacgacaacccgaagctaacattcagtgggtatgtgaagatgtggcagggcagcaacaagatctccattctaagctcagcagtgggccttcctaacaacggtgaccatttcgagctgtggaacgtcggcgtcctcgggccagtgaccctctccggcctgaacgaggggaagagggacctgagccatcagagatggatataccaggtcggcctgaaaggcgagtcgctcggcctccacaccgtgaccggaagctccgccgtggaatgggccggccccggcggcggcacgcagccgctgacttggcacaaggccctgttcaacgcgccggcggggagcgatccggtggccctggacatgggcagcatgggcaagggccaggtgtgggtgaacgggcgccacgccgggcgctactggtcgtacagggctcactcccgcggctgcgggcggtgcagctacgccgggacgtaccgcgaggaccagtgcacgtccaactgcggcgacctctcccagagatggtaccacgtgccgcggtcgtggctgaagccgagcgggaacctgctggtggtgctggaggagtacggcggcgacctcgccggcgtcagtctcgcgacacggactacgtgaacaagtgaggtgaggccatggcgaggaggagcaagcataccgaccatgccgtattcgcggaccgtatttatacacacgacaccgtacattacactcgcgtgatagcaatggttatactgcaaggggaaggtaaggatggcatttaagtgcagagcggagagggtgggtgcctgggtggtctccggccatcagtgcggcggcaggaccggcagctagctagctgcgccggcgcggcacacacttcgaggccaattcaattcaactgtttcaattcatgtaactggcactctggcagcgggtgtttgctgctgcttgctgtgtttttttgaagacgtgaacatgaaatacaaaactgagcttgttttgtccatggctatattttgctgtcgtaatgttgttggcatttggaaaaaaaaaaccaaatcttggactggtatgtacaacactgtatagtattcactgtggtaaaaccgtaaaactgtgaat

SEQ ID NO: 209268 - DNA, 3121 bp, Zea Mays
aacgggggttaaaattcccccgtcgcagttgcccgccctcctctagtctagataaaaaaactcgccacctcacgcccttcccatccatcccatcgccactccactcgcactcggccaagaaagaagcggcaggtcactgcccactgctgctccaggagcgagaaaggccagccaaggagggagctttgctttcaggaggagaggagcggcgaggtgggcggcgggcgccatggccgcagcgccgcgtagtcttgtcacctgcagcggcgggggcagtagcagtagtcgcatcctgctcgccgtcttcctggcggccgccctcttggcgtccgcggccaatgcggccgtctcgtacgaccaccgctccctcgtcatcaacggccgccgccgcatcctcatctccggctctatccactacccgagaagcgcccccgagatgtggcccgggctgatccagaaggccaaggacggcggcctcgacgtcgtccagacctacgtcttctggaacgggcacgagccggcgcaggggcagtactacttcgccgaccgctacgacctcgtccgcttcgtcaagctcgtcaggcaggccggcctctacgtccacctccgcgtcggcccctacgtctgcgcggagtggaacttcggtggctttccagtttggctcaagtatgtgccgggcatcaggttcaggacagacaatggcccattcaaggcggcaatgcagaagttcgtggagaagatagtgtccatgatgaagtcggaggggctgttcgagtggcagggaggcccgatcatcatggctcaggtggagaacgagttcgggccaatggagtccgtcgtgggcagtggcggcaagccatacgctcactgggcggcccagatggctgtcgggaccaacgccggcgtgccgtgggtgatgtgcaagcaggatgacgccccggaccccgtgatcaacacttgcaatggcttctactgcgactacttcacgccaaacaacaagcacaagccgaccatgtggaccgaagcctggactggatggttcaccaagttcggcggcgcggcgcctcaccggccggtggaggacctggccttcgccgtggcacggttcgttcagaaaggaggctccttcgtgaactactacatgtaccatggaggaacgaactttgggcgcaccgccggtggccccttcatcgcgaccagctacgactacgatgcccccattgacgagtttggtatgcagtggtctgctcaggcaaccgaaatggggtcacttgaggaacatgcacagagctatcaagcaggccgagcctgcgttggtttctggcgatccaacgatacgatctattggaaactacgaaaaggcatatgtcttcaagtcaaagaatggagcctgtgctgcgttcctgtcgaactaccacgttaaatctgctgtgaggatcaggtttgacgggcgtcactatgacctcccggcttggtccatcagcattctgcccgactgcaaaaccgcagtcttcaacaccgcgacggtgaaggagccgactctgctgccgaagatgagcccggtgatgcatcgcttcgcttggcagtcctacagcgaggacacgaactcgctggatgacagcgcgtttgcaagggatggcctgatcgagcagctcagcttgacatgggacaagtcggactacctgtggtacaccacccatgtcaacattggttccaacgaacgattcctcaagtctggccagtggcctcagctcagtgtgtactctgctggacactccatgcaggtgttcgtcaatgggaggtcatatggatctgtttacggcggctacgacaacccgaagctaacattcagtgggtatgtgaagatgtggcagggcagcaacaagatctccattctaagctcagcagtgggccttcctaacaacggtgaccatttcgagctgtggaacgtcggcgtcctcgggccagtgaccctctccggcctgaacgaggggaagagggacctgagccatcagagatggatataccaggtcggcctgaaaggcgagtcgctcggcctccacaccgtgaccggaagctccgccgtggaatgggccggccccggcggcggcacgcagccgctgacttggcacaaggttcttccatccatccgtcagcgatctgaagagatgcatggcaaggcagcgtggcagtgatatacatcctttttgtttggtgtgacgaattaagcaggccctgttcaacgcgccggcggggagcgatccggtggccctggacatgggcagcatgggcaagggccaggtgtgggtgaacgggcgccacgccgggcgctactggtcgtacagggctcactcccgcggctgcgggcggtgcagctacgccgggacgtaccgcgaggaccagtgcacgtccaactgcggcgacctctcccagagatggtaccacgtgccgcggtcgtggctgaagccgagcgggaacctgctggtggtgctggaggagtacggcggcgacctcgccggcgtcagtctcgcgacacggactacgtgaacaaggcaggcgaacgacacgcgttgcatctaactcgtacatgtatactatactccgacgtgcgagtatatacatcgattggtatttgtttagtgaggtgaggccatggcgaggaggagcaagcataccgaccatgccgtattcgcggaccgtatttatacacacgacaccgtacattacactcgcgtgatagcaatggttatactgcaaggggaaggtaaggatggcatttaagtgcagagcggagagggtgggtgcctgggtggtctccggccatcagtgcggcggcaggaccggcagctagctagctgcgccggcgcggcacacacttcgaggccaattcaattcaactgtttcaattcatgtaactggcactctggcagcgggtgtttgctgctgcttgctgtgtttttttgaagacgtgaacatgaaatacaaaactgagcttgttttgtccatggctatattttgctgtcgtaatgttgttggcatttggaaaaaaaaaaccaaatcttggactggtatgtacaacactgtatagtattcactgtggtaaaaccgtaaaactgtgaat

SEQ ID NO: 209269 - DNA, 1246 bp, Zea Mays
acgacacgtaacaagtcgaaacttaggtttgaaaggagagcccatacaaagacgacttgttgttcggcccgacttaattagttaggcccataagcgtgcccgttctttttcgcgtttcacggcggcgcggacagagagccatcggcggcgcaccgaccgccggcgaagggtacagagatgaagacggttagcctcggcgcctctaggccttccactgtcaacttccgcatgccgacgagggacaacctcgtgcctatacgcgtcgacgtcgaggtggacggccagcgctacagggacgccttcacctggaacccgcgagatcccgactcggagataatcagcttcgctaagcggacggccaaggacctcaagctgccggccaatttcgtcccccagatgctccagtccatccaggggcaacttgcggagttccgttcctacgaggggcaggagatgcaaatcaaagagaagattgtgcctctgaagcctgcaatagctgtttccatccgtgagcagctttatgagattgctagtcagagcgtctctgttatgagagagaagcaaatgtcaaagaagggaaggcgagcaccagaattttcttcaaatagtaaagccgtgaacaatgcagtggatttgttcaagtattttggcagcaaagggagcgtcatccggaaaaggaaggaatggtacctgtatgagcctgttgttgatgtggtagctaatgacgaagacgggaaagaggaggctaataattctagcaggccgaagaaaagagccgacgaagagaaagctgcaagccttcagtccctttgaacacaagctgctgatagttctaaccaaggagggtttctcttgccaatcccagcagatgcctgcctttgacattcgtcgtaggatggcttcatcatagctacatatttgtatgtaagcggtgtgagagcgtgttattctctagagttgagttccacaagagtcttctctagagttgagttacaagcggctcttaatttctctacacaagacaaggaagaaacactagctgtagaattccaaaaggctcttaatttctcttaatttgtctacttgcataccttttggagaacctctatgttttcttggatcaccagctttaggagaaggcttctttgttgcactttttgataagagcatgttgattcttggagaaccccttccaaacatgttaactgatattatataacacaatattaaaccaaatttctatgct

SEQ ID NO: 209270 - DNA, 1128 bp, Zea Mays
  misc_feature (1127)..(1128): n is a, c, g, or t
cctcgctcaacctctccctcgcgctctctctctctctctcagtctctctgacccccaagattcctctgctcctccatctccatggctgtcgccggcttgccgtgcttcccgctctctgccgccgccgccgccccagctgtgcggctggccgcgaggccaaaccggcagcgaccaccccgacgatggacgggtgccgcaccgtcagcagaccgtggggagatgggcaacgacgacggtggtggtgaggcgttgccgccaggtcggtccgtcgtcgtgacgactacaaagcccgccgcagcagaactttctgtgaaggaggatgtcagattgtcagtattctagtttgaggatatgatgatattcccaagtgagcatggtggggtgtttcctcatcaacaagcactctaaggtataattgatgttgctccaataccgggtgtgagagaagccacaactgatgttactacaaccaaagtcatcaatgggacatcgccttcgcttattcggtcattggatactaaaatgtgtgatgtttgtgtggcatatcagggatcacctggtacggtcattgaggcatttgtgcttaaagctttcccagaatgtacaacagttcccctccaaaggtctgaagctgcgcttgaggctgtcgagtcttcacttgctgacatagctattcttcctatcgaaaatgcatacaccggaagcttccataagagctatgacatacttcttagtcatgatttgcaaattgtgcaagaagtacaaatggatgtagagctatgtcttcttgctttacctggagtgcataaggatgatttgaagacaattttcagccatccacagtatcttgctcaatgcgaacattccatttctggtttgagtgtttcaaagaaaaacgtggatcatggagttgttggtgctgagattatatcaaagcagaatttaagggattctggagttatatgcagtgctcgagcagcagaattgtatgggcttaacatcttagaatgcaactttcaggatgaatcacccaatgtcacaaggtacctagtattggcaaaaactgctaaccttcccaaagaacacgaccaatacaagacaagcgttgttttcggtctcgaagaagnn

SEQ ID NO: 209271 - DNA, 2543 bp, Zea Mays
ctgcctagagtgcacggagagaaaagcagcgcctgcaagcatataaaatgagtggaacgacaaaagaggcccttttttgtctgacatataaaagttggtcctctttcttggagcctgcagacgaatggtgcagcggtgaaggcaggaggaggaggaggacataggaggggataggagccgccgcagacatggctggcggggtggccgttggggtcgtggcgctgttcttggctgcagcttcatttggggctaatgccaacaccgactcgaatgatgtgaatgccctcaatgtgttctacacaaccatgaattcgccgccgcagctgacgaactgggtgtcccaaaatggggatccctgtgggcagtcgtggctgggggtcacctgctcgggttccagagtgacagcaataaagttatctgggatgaggcttaacggcaccttgggctacaacatgaaccagctcactgcactagttcagctggatatgagcaataataatcttggaggcagtgacattccttataatcttcctccgaatctccagagcttaaatcttgcagtaaataacttcactgggactgtaccttactccatctcccagatggttgcacttagggatttaaatcttgatcataatcagctctcgaacatcaacgatatgtttagtcagctcacaaatttaacaacgttggatctatcatacaacacattctctggtgatatcccacatagctttaactccttgacaagtttgaaaacactttaccttcagaacaacaaatttaacggcacaatagatgttctcactgatcttcctcttactgacttaaatgtcgaaaacaaccaactcaccggttggatacccgataaactaaagggaatcaataatctccagacaagtggaaactcgtttaacaatggccctgctccaccacctccaccatcaccattatcacctccatcgacaaatacccctcctccctctcggcagcatgctgttccaagtagcgctggtaaaaataccccatctgaaaatggtggaaaacactcgaaacttggtggtggtgcagtagcaggaatcataatatgtttgctggttgttagcgcaatagttgcattccttgtgatcaaaaggaaatcatggaggttatcacagggacaagaccctgaacaaaatgaacctctcagcccttttgcttcaggacttaaacagatgaaatcgatcaaatctatcaaaatcgtatcaacaatgggaaaagaagaattgcagaagactgtttcgatgagtttgaagcctccaacaaaaattgacctgcacaagtcctttgatgaaaatgataccactaacaaggccatctcaaggaatgtaagcttgtcttccatcacaatacctgcatacacagtggcagaccttcagatggcaacgggcagcttcagtcctgacagttttatcggtgagggatcggtaggccgtgtttacaaagccaaattcggtgatcagaaggtcatggctgtaaagaaaataaacttctctgtatttccaagccatccttcagatttgttcattgagttggttgcaaacatttcaatgttaaatcatccaaaccttgctgagcttgctggttactgttcagagcatggacaatgcttgctggcatatgaattctaccgaaacggttctcttcatgatttccttcatctgaaagatgaacacagcaagccattgtcttggaacaaccgtgtcaagattgcgcttggatctgcaagagcattagagtacctacatgagacttgttcaccctctgtggtccacaagaatttcaagtcatccaacattttattggatggtgagctgaccccccacctctctgattctgggtttgcaggccttcttgcaaaccaggaattccaggaatcggatgagaactcaggatacagggcacctgaggtgatcttggctggtcagtactccctgaagagcgacgtgtacagcttcggagtcgtcatgctagagcttctgactggccggaaaccgtttgacaggacccgaccgcggcctgagcagtcactggtccgatgggctactccgcagctgcacgacatcgacgcgctggaccagatggtcgaccccgcgctgcaagggctgtacccgtccaaatccctctcccgcttcgccgatgccatcgccctttgtgttcagcctgagccggagtttcggccgccgatgtcggaggtcgtgcagtcgctggtgcgcctggtgcagagggcgaacatgacgaggatgcacgagagccagtcgcggcgccacggcgaatccggcggggactacgagttttgagcgagacaaaactgtgcctttgcctagatttttttcttctaaaagcattttgttttgctaaagacacccccaaaacatttggaacgaacttggttgagatttcgatgtaaaggagggtaagtttgattagagtttgacctagccaaagctatccgaccatgacaccaaacattttacggaagataagaaaggatcacatttttt

SEQ ID NO: 209272 - DNA, 2401 bp, Zea Mays
taaaagttggtcctctttcttggagcctgcagacgaatggtgcagcggtgaaggcaggaggaggaggaggacataggaggggataggagccgccgcagacatggctggcggggtggccgttggggtcgtggcgctgttcttggctgcagcttcatttggggctaatgccaacaccgactcgaatgatgtgaatgccctcaatgtgttctacacaaccatgaattcgccgccgcagctgacgaactgggtgtcccaaaatggggatccctgtgggcagtcgtggctgggggtcacctgctcgggttccagagtgacagcaataaagttatctgggatgaggcttaacggcaccttgggctacaacatgaaccagctcactgcactagttcagctggatatgagcaataataatcttggaggcagtgacattccttataatcttcctccgaatctccagagcttaaatcttgcagtaaataacttcactgggactgtaccttactccatctcccagatggttgcacttagggatttaaatcttgatcataatcagctctcgaacatcaacgatatgtttagtcagctcacaaatttaacaacgttggatctatcatacaacacattctctggtgatatcccacatagctttaactccttgacaagtttgaaaacactttaccttcagaacaacaaatttaacggcacaatagatgttctcactgatcttcctcttactgacttaaatgtcgaaaacaaccaactcaccggttggatacccgataaactaaagggaatcaataatctccagacaagtggaaactcgtttaacaatggccctgctccaccacctccaccatcaccattatcacctccatcgacaaatacccctcctccctctcggcagcatgctgttccaagtagcgctgagatgaaatcgatcaaatctatcaaaatcgtatcaacaatgggaaaagaagaattgcagaagactgtttcgatgagtttgaagcctccaacaaaaattgacctgcacaagtcctttgatgaaaatgataccactaacaaggccatctcaaggaatgtaagcttgtcttccatcacaatacctgcatacacagtggcagaccttcagatggcaacgggcagcttcagtcctgacagttttatcggtgagggatcggtaggccgtgtttacaaagccaaattcggtgatcagaaggtcatggctgtaaagaaaataaacttctctgtatttccaagccatccttcagatttgttcattgagttggttgcaaacatttcaatgttaaatcatccaaaccttgctgagcttgctggttactgttcagagcatggacaatgcttgctggcatatgaattctaccgaaacggttctcttcatgatttccttcatctgaaagatgaacacagcaagccattgtcttggaacaaccgtgtcaagattgcgcttggatctgcaagagcattagagtacctacatgagacttgttcaccctctgtggtccacaagaatttcaagtcatccaacattttattggatggtgagctgaccccccacctctctgattctgggtttgcaggccttcttgcaaaccaggaattccaggaatcggatgagaactcaggatacagggcacctgaggtgatcttggctggtcagtactccctgaagagcgacgtgtacagcttcggagtcgtcatgctagagcttctgactggccggaaaccgtttgacaggacccgaccgcggcctgagcagtcactggtccgatgggctactccgcagctgcacgacatcgacgcgctggaccagatggtcgaccccgcgctgcaagggctgtacccgtccaaatccctctcccgcttcgccgatgccatcgccctttgtgttcagcctgagccggagtttcggccgccgatgtcggaggtcgtgcagtcgctggtgcgcctggtgcagagggcgaacatgacgaggatgcacgagagccagtcgcggcgccacggcgaatccggcggggactacgagttttgagcgagacaaaactgtgcctttgcctagatttttttcttctaaaagtataaaaatagttataaactctccttgagagttttgaacttcaaatattcacatatagtttcaaactatattagataggtagtagttcagaataagtatttatctgaaataagtattggttcacatttgcctttgcgttgcaggcattttgttttgctaaagacacccccaaaacatttggaacgaacttggttgagatttcgatgtaaaggagggtaagtttgattagagtttgacctagccaaagctatccgaccatgacaccaaacattttacggaagataagaaaggatcacatttttt

SEQ ID NO: 209273 - DNA, 2475 bp, Zea Mays
agcaaagcatatgaaagaaataccggctgctgactggtttcttgaaatttcggttcagatacagtgaatgccctcaatgtgttctacacaaccatgaattcgccgccgcagctgacgaactgggtgtcccaaaatggggatccctgtgggcagtcgtggctgggggtcacctgctcgggttccagagtgacagcaataaagttatctgggatgaggcttaacggcaccttgggctacaacatgaaccagctcactgcactagttcagctggatatgagcaataataatcttggaggcagtgacattccttataatcttcctccgaatctccagagcttaaatcttgcagtaaataacttcactgggactgtaccttactccatctcccagatggttgcacttagggatttaaatcttgatcataatcagctctcgaacatcaacgatatgtttagtcagctcacaaatttaacaacgttggatctatcatacaacacattctctggtgatatcccacatagctttaactccttgacaagtttgaaaacactttaccttcagaacaacaaatttaacggcacaatagatgttctcactgatcttcctcttactgacttaaatgtcgaaaacaaccaactcaccggttggatacccgataaactaaagggaatcaataatctccagacaagtggaaactcgtttaacaatggccctgctccaccacctccaccatcaccattatcacctccatcgacaaatacccctcctccctctcggcagcatgctgttccaagtagcgctggtaaaaataccccatctgaaaatggtggaaaacactcgaaacttggtggtggtgcagtagcaggaatcataatatgtttgctggttgttagcgcaatagttgcattccttgtgatcaaaaggaaatcatggaggttatcacagggacaagaccctgaacaaaatgaacctctcagcccttttgcttcaggacttaaacagatgaaatcgatcaaatctatcaaaatcgtatcaacaatgggaaaagaagaattgcagaagactgtttcgatgagtttgaagcctccaacaaaaattgacctgcacaagtcctttgatgaaaatgataccactaacaaggccatctcaaggaatgtaagcttgtcttccatcacaatacctgcatacacagtggcagaccttcagatggcaacgggcagcttcagtcctgacagttttatcggtgagggatcggtaggccgtgtttacaaagccaaattcggtgatcagaaggtcatggctgtaaagaaaataaacttctctgtatttccaagccatccttcagatttgttcattgagttggttgcaaacatttcaatgttaaatcatccaaaccttgctgagcttgctggttactgttcagagcatggacaatgcttgctggcatatgaattctaccgaaacggttctcttcatgatttccttcatctgaaagatgaacacagcaagccattgtcttggaacaaccgtgtcaagattgcgcttggatctgcaagagcattagagtacctacatgagacttgttcaccctctgtggtccacaagaatttcaagtcatccaacattttattggatggtgagctgaccccccacctctctgattctgggtttgcaggccttcttgcaaaccaggaattccaggaatcggatgagaactcaggatacagggcacctgaggtgatcttggctggtcagtactccctgaagagcgacgtgtacagcttcggagtcgtcatgctagagcttctgactggccggaaaccgtttgacaggacccgaccgcggcctgagcagtcactggtccgatgggctactccgcagctgcacgacatcgacgcgctggaccagatggtcgaccccgcgctgcaagggctgtacccgtccaaatccctctcccgcttcgccgatgccatcgccctttgtgttcagcctgagccggagtttcggccgccgatgtcggaggtcgtgcagtcgctggtgcgcctggtgcagagggcgaacatgacgaggatgcacgagagccagtcgcggcgccacggcgaatccggcggggactacgagttttgagcgagacaaaactgtgcctttgcctagatttttttcttctaaaagtataaaaatagttataaactctccttgagagttttgaacttcaaatattcacatatagtttcaaactatattagataggtagtagttcagaataagtatttatctgaaataagtattggttcacatttgcctttgcgttgcaggcattttgttttgctaaagacacccccaaaacatttggaacgaacttggttgagatttcgatgtaaaggagggtaagtttgattagagtttgacctagccaaagctatccgaccatgacaccaaacattttacggaagataagaaaggatcacatttttt

SEQ ID NO: 209274 - DNA, 2487 bp, Zea Mays
cagcaccagcccacgaaacatgttgaggtgaaggatttacactaccaacaaagttttgcttcgggtggcacagaggtaaaagtatggtttggaaaggttgaagatctgccagtttacttcttggaaccacaaaatggcatgttttgggttggatgtgtctatgggaagaatgatgagagtagatttggcttcttctgtcattctgctctggagtttctgctccaaaaaggatcttctcctgatatcatacattgtcatgactggtcaagtgctcccgttgcttggctatacaaggaacagtatgctcttaatgggatgggaaatggtcggattgtatttaccatccacaatcttgagtttggagcgcatcacattggcaaggcaatggcacattgtgacaaggctacaactgtctctgatacatattcaaaggaagtggctggacacggagctattgcacctcactactataaattccatggaattcgaaatggaattgatcctgacatttgggatccatatactgacagatttattccggttcattatacatcagagaatgttcttgagggcaagagtgctgcaaaaaaggcattgcagcagatgcttggattacagcaaactgatagccctgttgttggaatcatcactcgtctaacagtgcagaagggaatccaccttatcaaacatgcaatgcatcgagctcttgaacgcaatgggcaggtggttttactgggttctgcaccagatcatcgcatacaaggtgactttacaaatttagccagtaagctgcatggtgaataccatggccgggtgaagctatgtttaacctatgacgagccactgtcacatttgatatatgctggcgcagacttcattcttgttccttccatcttcgaaccttgtggtttaacacagcttattgctatgcgctacggatccatcccgattgttcggaaaactggaggcctgtacgacaccgtctttgacgtcgacgatgataaggatcgggctcaagcacaaggcctcgagccaaatggattcagtttcgaaggagctgatagcagtggcgtagattatgctctcgacagagctataaccgcgttttatgatgcccgcgactggttcaactcccttagcaagagggtaatggagcaagattggtcatggaatagacctgcactagactacatggagttgtaccattctgctcgcaaaaactgatacatattatcacaagagaaaacaggctcagtttgcccagtttatgagcatctcagcctctcaggcctctgtgcaaattcaatttgcacactgggaagaaaaagagtactgattggccttgtggttgtgcatgaccgccgtccaaggtccaacgatgcaacacagagtgtatagttagagaatgtcacccgttgtacgttactgccgttacatgcatgtgtatacacatcaggtagtttgcaaaacaacattacgcgtatcccggccggctaccctgccataggctctgtctctttcaatttcaattaagaagaatgtaattgacctagttttagaaaaattggctccaaaacctacacaggccctaccaacaaactagacaacaatagcctgatacacaaagctcatccaacgtcgttgtcaagacgaatagctttaaactgcttaacacaagagacaaacaactctgaactctcaaaacgggccacacaaggccaaaggaaatcgacttgaaccaaacactaacaaacaaggagaaagagacaaccccacgcgagatagcactgatccttcaccatccaaccttgatcctctgcgtcgcttctggcttttgcccaacctccggaacaatctagtccacgaagaaggggagtcgtctcatgttatcgttgtcgagccatatcccctaacgtagcacctccgactccacgaagcaagacccaacatccagccgcatactgaacgatgagaagcgaaagcatcaatcgaagaagacatcatggctaagacgaacttcagcaacgacaccttcaggaagggagcgatgtcagggacgccaccgccacccgtccgagatggatctagctttcacccatggaagaccgtactggggattgcgacgaactcaacaacgcttttgcccaagatgccccagcacaaacgtcaggccaagaccctgagacataacatgttgtctccgtcgtctttgctcagacatcccgcgcaaaccctttcagaggggcattgacatgccagctgccgcaaagctgtgtcagacgccaacccctctggctgggcacatggatccgggcaacaccttgccacatgtgtcatattgtcacgcgtcggagccaatgccggaccatgggcaacaccaccggcgctgccctctaacctaggggcaccggatccagccaccagggtaggtcctagccaccgcgtcgtcgtagttgcatcatgtgtcaccgcgctaagagctcacct

SEQ ID NO: 209275 - DNA, 2061 bp, Zea Mays
aatgatcacggagtgttttcatgttcattatacatcagagaatgttcttgagggcaagagtgctgcaaaaaaggcattgcagcagatgcttggattacagcaaactgatagccctgttgttggaatcatcactcgtctaacagtgcagaagggaatccaccttatcaaacatgcaatgcatcgagctcttgaacgcaatgggcaggtggttttactgggttctgcaccagatcatcgcatacaaggtgactttacaaatttagccagtaagctgcatggtgaataccatggccgggtgaagctatgtttaacctatgacgagccactgtcacatttgatatatgctggcgcagacttcattcttgttccttccatcttcgaaccttgtggtttaacacagcttattgctatgcgctacggatccatcccgattgttcggaaaactggaggcctgtacgacaccgtctttgacgtcgacgatgataaggatcgggctcaagcacaaggcctcgagccaaatggattcagtttcgaaggagctgatagcagtggcgtagattatgctctcgacaggcaagtataaacaacccatctgaagttgcgtaaactacagtgctgtaacacactaacgcttcttattccacctgcccgtcattttatctcagagctataaccgcgttttatgatgcccgcgactggttcaactcccttagcaagagggtaatggagcaagattggtcatggaatagacctgcactagactacatggagttgtaccattctgctcgcaaaaactgatacatattatcacaagagaaaacaggctcagtttgcccagtttatgagcatctcagcctctcaggcctctgtgcaaattcaatttgcacactgggaagaaaaagagtactgattggccttgtggttgtgcatgaccgccgtccaaggtccaacgatgcaacacagagtgtatagttagagaatgtcacccgttgtacgttactgccgttacatgcatgtgtatacacatcaggtagtttgcaaaacaacattacgcgtatcccggccggctaccctgccataggctctgtctctttcaatttcaattaagaagaatgtaattgacctagttttagaaaaattggctccaaaacctacacaggccctaccaacaaactagacaacaatagcctgatacacaaagctcatccaacgtcgttgtcaagacgaatagctttaaactgcttaacacaagagacaaacaactctgaactctcaaaacgggccacacaaggccaaaggaaatcgacttgaaccaaacactaacaaacaaggagaaagagacaaccccacgcgagatagcactgatccttcaccatccaaccttgatcctctgcgtcgcttctggcttttgcccaacctccggaacaatctagtccacgaagaaggggagtcgtctcatgttatcgttgtcgagccatatcccctaacgtagcacctccgactccacgaagcaagacccaacatccagccgcatactgaacgatgagaagcgaaagcatcaatcgaagaagacatcatggctaagacgaacttcagcaacgacaccttcaggaagggagcgatgtcagggacgccaccgccacccgtccgagatggatctagctttcacccatggaagaccgtactggggattgcgacgaactcaacaacgcttttgcccaagatgccccagcacaaacgtcaggccaagaccctgagacataacatgttgtctccgtcgtctttgctcagacatcccgcgcaaaccctttcagaggggcattgacatgccagctgccgcaaagctgtgtcagacgccaacccctctggctgggcacatggatccgggcaacaccttgccacatgtgtcatattgtcacgcgtcggagccaatgccggaccatgggcaacaccaccggcgctgccctctaacctaggggcaccggatccagccaccagggtaggtcctagccaccgcgtcgtcgtagttgcatcatgtgtcaccgcgctaagagctcacct

SEQ ID NO: 209276 - DNA, 1986 bp, Zea Mays
tattgatatacatttggcctttactacctcattggacttgttcattatacatcagagaatgttcttgagggcaagagtgctgcaaaaaaggcattgcagcagatgcttggattacagcaaactgatagccctgttgttggaatcatcactcgtctaacagtgcagaagggaatccaccttatcaaacatgcaatgcatcgagctcttgaacgcaatgggcaggtggttttactgggttctgcaccagatcatcgcatacaaggtgactttacaaatttagccagtaagctgcatggtgaataccatggccgggtgaagctatgtttaacctatgacgagccactgtcacatttgatatatgctggcgcagacttcattcttgttccttccatcttcgaaccttgtggtttaacacagcttattgctatgcgctacggatccatcccgattgttcggaaaactggaggcctgtacgacaccgtctttgacgtcgacgatgataaggatcgggctcaagcacaaggcctcgagccaaatggattcagtttcgaaggagctgatagcagtggcgtagattatgctctcgacagagctataaccgcgttttatgatgcccgcgactggttcaactcccttagcaagagggtaatggagcaagattggtcatggaatagacctgcactagactacatggagttgtaccattctgctcgcaaaaactgatacatattatcacaagagaaaacaggctcagtttgcccagtttatgagcatctcagcctctcaggcctctgtgcaaattcaatttgcacactgggaagaaaaagagtactgattggccttgtggttgtgcatgaccgccgtccaaggtccaacgatgcaacacagagtgtatagttagagaatgtcacccgttgtacgttactgccgttacatgcatgtgtatacacatcaggtagtttgcaaaacaacattacgcgtatcccggccggctaccctgccataggctctgtctctttcaatttcaattaagaagaatgtaattgacctagttttagaaaaattggctccaaaacctacacaggccctaccaacaaactagacaacaatagcctgatacacaaagctcatccaacgtcgttgtcaagacgaatagctttaaactgcttaacacaagagacaaacaactctgaactctcaaaacgggccacacaaggccaaaggaaatcgacttgaaccaaacactaacaaacaaggagaaagagacaaccccacgcgagatagcactgatccttcaccatccaaccttgatcctctgcgtcgcttctggcttttgcccaacctccggaacaatctagtccacgaagaaggggagtcgtctcatgttatcgttgtcgagccatatcccctaacgtagcacctccgactccacgaagcaagacccaacatccagccgcatactgaacgatgagaagcgaaagcatcaatcgaagaagacatcatggctaagacgaacttcagcaacgacaccttcaggaagggagcgatgtcagggacgccaccgccacccgtccgagatggatctagctttcacccatggaagaccgtactggggattgcgacgaactcaacaacgcttttgcccaagatgccccagcacaaacgtcaggccaagaccctgagacataacatgttgtctccgtcgtctttgctcagacatcccgcgcaaaccctttcagaggggcattgacatgccagctgccgcaaagctgtgtcagacgccaacccctctggctgggcacatggatccgggcaacaccttgccacatgtgtcatattgtcacgcgtcggagccaatgccggaccatgggcaacaccaccggcgctgccctctaacctaggggcaccggatccagccaccagggtaggtcctagccaccgcgtcgtcgtagttgcatcatgtgtcaccgcgctaagagctcacct

SEQ ID NO: 209277 - DNA, 742 bp, Zea Mays
atggtgtttaaagagaagcaaaaggagttctacaagaatgctaaattaattagcaagtacaaaaagacaaagaagcaacaaagtcagtcaaacaaccatccagaaattccagtccatgaggatggtggtgacactgtccgatatgtggcaaaaccgcatcacaaagggaagaagcaccctgtgcatagtttgaaggaagagtatgagaaaaaacgtgctgaggaggagaaggctaaggaagagcgtgatgcaatggttcaggcaaagagggagcatcgggagaagtctgaggcgaagcggaaagaactgagggagaagatgttcaagaagacaagatctggccaacctgtgatgagataccggatcgagcatctcttggagactgcactgagcaagaaagtacaattccagctaccatcttcataatgttagttgtggtcggaggctccctgtccgtgacccgacgaaggttccaatggtggcttgccgcgcatcgatggaggaggcactagcaacatggccacgcccagcagatggtggcttccgtggccaaatcggatcgaataacttggtattagggggagggagggagaggatcgatttgtacactgaattcgatgggatgggattgtactctcaaataacatccatttccatcgatccaactttacccctatcaataaaccttcaattagcacagtgccctctaggctacatgttcaatatgaccccaacttttaat

SEQ ID NO: 209278 - DNA, 756 bp, Zea Mays
atggtgtttaaagagaagcaaaaggagttctacaagaatgctaaattaattagcaagtacaaaaagacaaagaagcaacaaagtcagtcaaacaaccatccagaaattccagtccatgaggatggtggtgacactgtccgatatgtggcaaaaccgcatcacaaagggaagaagcaccctgtgcatagtttgaaggaagagtatgagaaaaaacgtgctgaggaggagaaggctaaggaagagcgtgatgcaatggttcaggcaaagagggagcatcgggagaagtctgaggcgaagcggaaagaactgagggagaagatgttcaagaagacaagatctggccaacctgtgatgagataccggatcgagcatctcttggagactgcactgagcaagaaagtacaattccagctaccatcttcataatgttagttgtgtggacggaggacaggtcggaggctccctgtccgtgacccgacgaaggttccaatggtggcttgccgcgcatcgatggaggaggcactagcaacatggccacgcccagcagatggtggcttccgtggccaaatcggatcgaataacttggtattagggggagggagggagaggatcgatttgtacactgaattcgatgggatgggattgtactctcaaataacatccatttccatcgatccaactttacccctatcaataaaccttcaattagcacagtgccctctaggctacatgttcaatatgaccccaacttttaat

SEQ ID NO: 209279 - DNA, 1249 bp, Zea Mays
gtgctaaacaattgtccggaggatatacaaggaagagttagcggatcaaggaactccttatgttcaaaaaacccatgataagcaattttctttctggtttaagaagcatattgcaaaactacgttacgtggatggagaagacattagtgatgacctatttgcattgtcatgtgaaccggaccttcgggttcgaatattttcagcatgtcttgtcgatggggttcgatatcacactattgaccaaataattgagttgcgttataactcagatatgtccaaatgtcgcacagtggttctatttcgttgtgactggtttgacacttatagcaagaaggttagaatgaaagatgatggatattttagaagcatcaaccatggtagttgttggtacaaggatgatccttttattctatcaacacaagcaacaaaagtattttacttggatgacactaaacactgtgaaagctggagaattgttcaaaagtttacacataggcacttatggaatgtcactgaaaatgaaaatgaggaaacacccatgggcttgggactatcataccaagatgaaatatgtgcaggttttcatgtacaagtgaatgaaggaaatttgaatgatgaagtaccggatagtgaagattgtcaccacgtcaatacaagtttagttgatgagtttcgtaaaccaaggcaagacaatgtgcaaggagacgggacaagcgatgatgaagatgaaactatatggcaatatgttagtgatgatgaaagtccaacaattcttgtcgaggatgatgatgatgatagcgatgccgagtaaagactagaaagttgatggtggaagcgttgctgacctatatggatcttggtcatgaaaatggtgacccacatggatattgggtcactatgataggatggtggcaattagtgtgtgctaggatattaaattttattctagattttgggatgtcctaggtcttttagctcggacaaagtctatgcttgtgtcaaatatttttatctttctctatatgtctacagacgaagaaattataatatgtcagaactataatatgaatgagcaccaattcattgattttattcagaaatcatagtatccctttttcctgggcatatgtttcacttaatattgttttagtgtaggctgagtgaggaattgaggatgcatgcagtatgaatatgtgtaggcaatctgaaattctgaatatgtgcacgcaatctaaaattctgaatatgt

SEQ ID NO: 209280 - DNA, 2634 bp, Zea Mays
aataaaatccagccacgcctgcgcatccctcgtcctcgtctctctcacagctgctttcttccttcctgttcctgctcgtcgcctctcgaaagccaggaggagtctcgcctccccctcctcgcgcgcgtgggcagctatggcgatggacgacctcgcgggcgcctcctcctcctcctccatggcggcggccgcctcctccgacccctcgcacggctggcagacggtgtcgtatcccaagcgcaaccgcaagcaggcgcagccgccccgcaccacggcgcccgatctggcgctgcagtccaacggcaagcctggcggcgtcttcgacgccgtcgagaagcgctcccaggagcgccaccgcgcgctgcagcagcagctcgcctccagggcggccgacctcgacgacgcgcggatcgccgttgccacgggcgccgcctactccgacgacgacgactccgacgaggccgctgccccgcgccaggagggagaggtcaagaagcctaagaagcccaaggtgaagaagccgaaggtgacggtcgccgaggccgccgtcctgatcgacgccgagaacctcgcagcgcacctcttcgagatctcggcatcgtacgagaatcaacaggacattcagctcatgaggtttgctgattactttggccgggcatttgcagctgtgagcgcatctcaatttccatgggcaaagatgttcaaagaatcaacagtgtccaagatggttgatatcccactgtgccatatatctgaggctgtgatcaagactgtgagtgattggatcagtcaaagatcttctgatgccctgggagactttgttttgtggtgcatagatagcatcatgtctgaattgtcaggtccatcagctggccctaagggttcaaagaaggttgcacaacagtctccaagggcccaggttgcaatctttgttgttcttgccatgactttaagaagaaagcctgatgtactggtaaatgttatgccaaagataatgggaaacaataaatatctgggacaggaaaagcttcccatcattgtctgggttattgctcaggcctctcaaggtgacctagtgtctggcatgttttgctgggctcattctctatttcccacattatgtgcgaagtcaagtgggaatccccttgcaagagatttggttttgcagttgcttgaaaggctacagaaaggtttgaagcagcctacccaataatcaaggagttggctcttgccggtcctcctggctcaaaaactgtgaaacaagcatcacaacagcttttacctttgtgtgcaaaagcaatgcaagaaaacaacgcagagctcaccagggaggctgttgatgttttcatttggtgcttaactcaaaatgcagagtcttacaagcagtgggaaagaatttatcttgaaaatattgaagccagtgttgctgtcctgagcaaagttgtgattgattggagggatgtgtctcctaagctcagttctgaagctctcaaggcaacagtgaagaactttaaggctaagaatgaggctgcgctggagtccacaacagatgctggaaagcaggcatctatcaaagaagcagacaagcactgcaaggcgatctttggaaagctgacccgtggcgccacctgcctgaagagcagcctggtggtcatcgcgctcgctgttgctgctagttacgtgctgtctcctggcatggacctcgagaaggtccaggcgatggtctcatcgcacctgtcgttctaaacatacctgtccagaatctccagacgtggatctaaattatacgagccatccaaaggggatggctcactcatcagtgaagagagctcagggggtgagaataagagggggataggcgctagaaccgaaagggtacagtttcctgagttgcctttttttatttttcccgcgtctcctcgagcagcagtgcgtgggaggagacgcagtcgactttgcagggagttggttaatcggtagactgatgggtgcgaagaaggtcaagtcaaacggctcaaccagaggattaacacctttgcttttctctttctgcatctgagatgattgcaaacagttttggtttaaaaattaagaatcttgaatcgtattcggtgctgtgtgcttgtcggctaaatgtatctgttgcgttgatatccgattaaattgcgtgtgatgctgtgctcgtgtcagtgtgctgttgtcgaagatctccctttttgcaggtgtgaatgtgatgcctgaaggccttttgaaacatgttccatttttttggacgccggaggtgtgatgtctgatgttggagcgtgaagatcttttgaaatatgttgcatttccagatggtttttggacgagggagatgctggttaatttctgggtttttttatttgaggattcgatctgaatctcaagggactgtatgttatctactgtctcttggtggtgtggatactgtggatgagaaggttttccttcatgcccgattattatctgcagcttatgtgggactggtccagatgtcaattttttatgatctaccatatcatttttcctcttaggtctctaatttctccatgatctatcgtactgggaatagaagagatgagaattttgtctccaggacaaaaaaaggttttg

SEQ ID NO: 209281 - DNA, 1001 bp, Zea Mays
atcgagaacagccatcgacgccgcaagaggagacgcacccaagagagaggaggcgaccatgagggccaagatccatgtggcatatcgccctgctggtgctcccggcgttggcccaggtcccgaagcgggagggttggtgggggaggaggaactaacgatagccatcgccatggccaccgacgacgactgataggactgcctcttcttcatcgatgtggtaacgacagaaatcaagtaatggggacggggctctccaggccatgcgggtcaaacgactggaacacgtccccttagcctccgaacgggaaccccgggctggagctctacagcgagaagaccaagcttgctgaagggccgcaggcttggaacatctagattttgttttgctaaggggagcgctatgtgagggtgggcaggttgctcaggtcaagtgggttcacggctgcgagcttcatggagagactattgatagcagttgtgtcctgcatcattctttgatcaagattgatgagggaaagatcagtatgccgaggatgggaccgggttgtagcttgcgatgctagatctgctcatcatgaaacccatcatgactaatgcatttatctgccatttaagtgtacaccagattatttgtatgtttgctgcttactatgcaaaatggcagctaaaagaagccctaaagcatgcgagctgcacctctaccggtttagtggccaaactggctgttactacgtttcaggtgttttatctgtaacttttattttgttctttttcttgttactcacttatttctgaataattaagtatatatgtcacttaatttagtgctagaatgcagatctggcatgtttgggaactaacctgcactattggttgttttttgcttcttggtggaccattttatctatagggtttggaatgttttccagcatgcattaaattactgttaacatatgattttagaatacaagtttttagacatgtgttgtgtatttggctgt

SEQ ID NO: 209282 - DNA, 1075 bp, Zea Mays
agaacagccatcgacgccgcaagaggagacgcacccaagagagaggaggcgaccatgagggccaaggtatactccacccatctcccttcctacttctcgcgcctactacctcatctcttagatccatgtggcatatcgccctgctggtgctcccggcgttggcccaggtcccgaagcgggagggttggtgggggaggaggaactaacgatagccatcgccatggccaccgacgacgactgataggactgcctcttcttcatcgatgtggtaacgacagaaatcaagtaatggggacggggctctccaggccatgcgggtcaaacgactggaacacgtccccttagcctccgaacgggaaccccgggctggagctctacagcgagaagaccaagcttgctgaagggccgcaggcttggaacatctagattttgttttgctaaggggagcgctatgtgagggtgggcaggttgctcaggtcaagtgggttcacggctgcgagcttcatggagagactattgatagcaggtttctttattttcatgggaaaattgtgtcctgcatcattctttgatcaagattgatgagggaaagatcagtatgccgaggatgggaccgggttgtagcttgcgatgctagatctgctcatcatgaaacccatcatgactaatgcatttatctgccatttaagtgtacaccagattatttgtatgtttgctgcttactatgcaaaatggcagctaaaagaagccctaaagcatgcgagctgcacctctaccggtttagtggccaaactggctgttactacgtttcaggtgttttatctgtaacttttattttgttctttttcttgttactcacttatttctgaataattaagtatatatgtcacttaatttagtgctagaatgcagatctggcatgtttgggaactaacctgcactattggttgttttttgcttcttggtggaccattttatctatagggtttggaatgttttccagcatgcattaaattactgttaacatatgattttagaatacaagtttttagacatgtgttgtgtatttggctgt

SEQ ID NO: 209283 - DNA, 900 bp, Zea Mays
cagccatcgacgccgcaagaggagacgcacccaagagagaggaggaggaactaacgatagccatcgccatggccaccgacgacgactgataggactgcctcttcttcatcgatgtggtaacgacagaaatcaagtaatggggacggggctctccaggccatgcgggtcaaacgactggaacacgtccccttagcctccgaacgggaaccccgggctggagctctacagcgagaagaccaagcttgctgaagggccgcaggcttggaacatctagattttgttttgctaaggggagcgctatgtgagggtgggcaggttgctcaggtcaagtgggttcacggctgcgagcttcatggagagactattgatagcagttgtgtcctgcatcattctttgatcaagattgatgagggaaagatcagtatgccgaggatgggaccgggttgtagcttgcgatgctagatctgctcatcatgaaacccatcatgactaatgcatttatctgccatttaagtgtacaccagattatttgtatgtttgctgcttactatgcaaaatggcagctaaaagaagccctaaagcatgcgagctgcacctctaccggtttagtggccaaactggctgttactacgtttcaggtgttttatctgtaacttttattttgttctttttcttgttactcacttatttctgaataattaagtatatatgtcacttaatttagtgctagaatgcagatctggcatgtttgggaactaacctgcactattggttgttttttgcttcttggtggaccattttatctatagggtttggaatgttttccagcatgcattaaattactgttaacatatgattttagaatacaagtttttagacatgtgttgtgtatttggctgt

SEQ ID NO: 209284 - DNA, 791 bp, Zea Mays
cgaccatgagggccaagaaatcaagtaatggggacggggctctccaggccatgcgggtcaaacgactggaacacgtccccttagcctccgaacgggaaccccgggctggagctctacagcgagaagaccaagcttgctgaagggccgcaggcttggaacatctagattttgttttgctaaggggagcgctatgtgagggtgggcaggttgctcaggtcaagtgggttcacggctgcgagcttcatggagagactattgatagcagttgtgtcctgcatcattctttgatcaagattgatgagggaaagatcagtatgccgaggatgggaccgggttgtagcttgcgatgctagatctgctcatcatgaaacccatcatgactaatgcatttatctgccatttaagtgtacaccagattatttgtatgtttgctgcttactatgcaaaatggcagctaaaagaagccctaaagcatgcgagctgcacctctaccggtttagtggccaaactggctgttactacgtttcaggtgttttatctgtaacttttattttgttctttttcttgttactcacttatttctgaataattaagtatatatgtcacttaatttagtgctagaatgcagatctggcatgtttgggaactaacctgcactattggttgttttttgcttcttggtggaccattttatctatagggtttggaatgttttccagcatgcattaaattactgttaacatatgattttagaatacaagtttttagacatgtgttgtgtatttggctgt

SEQ ID NO: 209285 - DNA, 389 bp, Zea Mays
cttggaacatctagattttgttttgctaaggggagcgctatgtgttgctcaggtcaagtgggttcacggctgcgagcttcatggagagactattgatagcagttgtgtcctgcatcattctttgatcaagattgatgagggaaagatcagtatgccgaggatgggaccgggttgtagcttgcgatgctagatctgctcatcatgaaacccatcatgactaatgcatttatctgccatttaagtgtacaccagattatttgtatgtttgctgcttactatgcaaaatggcagctaaaagaagccctaaagcatgcgagctgcacctctaccggtttagtggccaaactggctgttactacgtttcagagctctctgaagaagtggacatc

SEQ ID NO: 209286 - DNA, 2280 bp, Zea Mays
cgccgttcagccgttgggctttggccactcagccagcgctcaccaactcaccgagtgtccgagtcgttggcttggcttggcttggctccgcccgttggcatcgtctactcgccgaaaacctcgccgagtccctgccctccctgggcggtgggcgcggaaacccttcgtctgttcgctaaaccttggcggccggatctcccaccttcagaatccatctggtctcctctataaaagcgctgggaggatctgccgactttgccgtccataggcggcgtctctccggtgtcctgcgtctgcgccgcacacatcccccactcttcttccagtgaaacagttcaggcaaaaactctcctggaattgattgttgaggcatcacagattgcatttgccagtgcaagcaaatttcagagataaggatggcagcacaactacttttctccaatgcttccagttgccactgcccattaggcatttcaaggataaacgttgggaagacacttcttggtgaaagtgcaagttttcagagaaagaagtcgttttctggtggttcctatcgcttttctcgatttgattgctctgcgaactcccgccgagctgggccaaggcgcaccaaggatactttatatgaccttcaccctgagatctccttgctttatggagaagataatggtgcagctaccttatccagcaaagagcagggtattgacactacagctgaaagattggtggacacttctccctcttaccgctataatgagcccaggattaaagtcataggggttggaggtggtggctccaatgctgtgaacaggatgattgaaagctccatgaagggtgtggaattctggattgtgaacactgattttcaggctatgcggatgtcacccattgaaccagaaaataggttacagattggccaagaattgacacgtggtcttggtgctggtgggaacccagaaattggcatgaatgcagccaaggaaagccaggagttggtagaacaggcagttgctggtgccgatatggtttttgtgacggctggaatgggaggtgggacaggcactggtggagcacctattattgcagggattgcaaagtccatgggtatattgactgttggaattgtcacaaccccattttcatttgagggaagaaggcgggctcttcaggcacaagaaggaattgcatcgttgagaagcaatgttgatacactgattgtaattccaaatgacaagttactgactgctgtgtccccaaatactcctgtgacagaagcattcaatttagcagatgatattcttcggcaaggtgttcgtgggatatcagatataatcactgtgccaggtctggtgaatgtggactttgctgatgttcgatcagttatgtcagatgctggctcatcattaatgggcattggaacagcaacaggcaagacacgagcaagagatgccgcactcaatgccatacagtctcctctacttgatattggtattgaaagagcaactggaattgtatggaatatcactggagggaatgatctaaccttgacagaggtgaatgctgcagctgaagtaatctatgatcttgttgaccctggtgcaaatctgatttttggctctgttatagatccgtcatacactggtcaagtgagcataactctaattgcaactggtttcaaacgccaggaggaaagtgagagccggtcttcacaggctggagaagacagcaaccgcggtcgctcgggctggttttctcccacttcccaggaggaaggtcatgcattgcagatcccggagttcctacagaggaaagggcgtccagggtttccacgagtctgaacacactttggttcaatgtttttcttgtcatagtttggtacgatgtaggtttggtttctgggtctcttagttagcaaggtagagcagatgttcctgaaccgcatactaatctgtgtgcaaacttcgtcgcctgagtacattggctgggctgctttgcttctcaggaacctgcagtaggtctcaatttgctagttattatgattaaaagacatcgctgagaccaaattataacgttccgtgtgaagaattactggctcactgccaatttcctttcctttgcggcatacattgtttcattagtcgttattttggtttcgttcaatgttatgacaccaaaataggattataagggttagtttggaaaccattttctcaataaatttctatttttcgagggaaattagttcattttcctttgaaaaataggaactacttgaaaaaa

SEQ ID NO: 209287 - DNA, 1725 bp, Zea Mays
tggccactcagccagcgctcaccaactcaccgagtgtccgagtcgttggcttggcttggcttggctccgcccgttggcatcgtctactcgccgaaaacctcgccgagtccctgccctccctgggcggtgggcgcggaaacccttcgtctgttcgctaaaccttggcggccggatctcccaccttcagaatccatctggtctcctctataaaagcgctgggaggatctgccgactttgccgtccataggcggcgtctctccggtgtcctgcgtctgcgccgcacacatcccccactcttcttccagtgaaacagttcaggcaaaaactctcctggaattgattgttgaggcatcacagattgcatttgccagtgcaagcaaatttcagagataaggatggcagcacaactacttttctccaatgcttccagttgccactgcccattaggcatttcaaggataaacgttgggaagacacttcttggtgaaagtgcaagttttcagagaaagaagtcgttttctggtggttcctatcgcttttctcgatttgattgctctgcgaactcccgccgagctgggccaaggcgcaccaaggatactttatatgaccttcaccctgagatctccttgctttatggagaagataatggtgcagctaccttatccagcaaagagcagggtattgacactacagctgaaagattggtggacacttctccctcttaccgctataatgagcccaggattaaagtcataggggttggaggtggtggctccaatgctgtgaacaggatgattgaaagctccatgaagggtgtggaattctggattgtgaacactgattttcaggctatgcggatgtcacccattgaaccagaaaataggttacagattggccaagaattgacacgtggtcttggtgctggtgggaacccagaaattggcatgaatgcagccaaggaaagccaggagttggtagaacaggcagttgctggtgccgatatggtttttgtgacggctggaatgggaggtgggacaggcactggtggagcacctattattgcagggattgcaaagtccatgggtatattgactgttggaattgtcacaaccccattttcatttgagggaagaaggcgggctcttcaggcacaagaaggaattgcatcgttgagaagcaatgttgatacactgattgtaattccaaatgacaagttactgactgctgtgtccccaaatactcctgtgacagaagcattcaatttagcagatgatattcttcggcaaggtgttcgtgggatatcagatataatcactgtgccaggtctggtgaatgtggactttgctgatgttcgatcagttatgtcagatgctggctcatcattaatgggcattggaacagcaacaggcaagacacgagcaagagatgccgcactcaatgccatacagtctcctctacttgatattggtattgaaagagcaactggaattgtatggaatatcactggagggaatgatctaaccttgacagaggtgaatgctgcagctgaagtaatctatgatcttgttgaccctggtgcaaatctgatttttggctctgttatagatccgtcatacactggtcaagtgagcataactctaattgcaactggtttcaaacgccaggaggaaagtgagagccggtcttcacagatgtattttcatgagtagtaacagcactctttgc

SEQ ID NO: 209288 - DNA, 2471 bp, Zea Mays
tggccactcagccagcgctcaccaactcaccgagtgtccgagtcgttggcttggcttggcttggctccgcccgttggcatcgtctactcgccgaaaacctcgccgagtccctgccctccctgggcggtgggcgcggaaacccttcgtctgttcgctaaaccttggcggccggatctcccaccttcagaatccatctggtctcctctataaaagcgctgggaggatctgccgactttgccgtccataggcggcgtctctccggtgtcctgcgtctgcgccgcacacatcccccactcttcttccagtgaaacagttcaggatagcaagcaaaaatgttaaagtatctcactgaacagtaaggcggaaggcgcggccgtgtgcccgtgcccagcgcggcgagggctagcccaatggcctgcacgtctctggccagcatgggcgtaggggcaacggtccggcgacgggcagttcttgagagatcgagtgatcctttctctcctcgtccttggcggcgcatagcagattagcaggcaaaaactctcctggaattgattgttgaggcatcacagattgcatttgccagtgcaagcaaatttcagagataaggatggcagcacaactacttttctccaatgcttccagttgccactgcccattaggcatttcaaggataaacgttgggaagacacttcttggtgaaagtgcaagttttcagagaaagaagtcgttttctggtggttcctatcgcttttctcgatttgattgctctgcgaactcccgccgagctgggccaaggcgcaccaaggatactttatatgaccttcaccctgagatctccttgctttatggagaagataatggtgcagctaccttatccagcaaagagcagggtattgacactacagctgaaagattggtggacacttctccctcttaccgctataatgagcccaggattaaagtcataggggttggaggtggtggctccaatgctgtgaacaggatgattgaaagctccatgaagggtgtggaattctggattgtgaacactgattttcaggctatgcggatgtcacccattgaaccagaaaataggttacagattggccaagaattgacacgtggtcttggtgctggtgggaacccagaaattggcatgaatgcagccaaggaaagccaggagttggtagaacaggcagttgctggtgccgatatggtttttgtgacggctggaatgggaggtgggacaggcactggtggagcacctattattgcagggattgcaaagtccatgggtatattgactgttggaattgtcacaaccccattttcatttgagggaagaaggcgggctcttcaggcacaagaaggaattgcatcgttgagaagcaatgttgatacactgattgtaattccaaatgacaagttactgactgctgtgtccccaaatactcctgtgacagaagcattcaatttagcagatgatattcttcggcaaggtgttcgtgggatatcagatataatcactgtgccaggtctggtgaatgtggactttgctgatgttcgatcagttatgtcagatgctggctcatcattaatgggcattggaacagcaacaggcaagacacgagcaagagatgccgcactcaatgccatacagtctcctctacttgatattggtattgaaagagcaactggaattgtatggaatatcactggagggaatgatctaaccttgacagaggtgaatgctgcagctgaagtaatctatgatcttgttgaccctggtgcaaatctgatttttggctctgttatagatccgtcatacactggtcaagtgagcataactctaattgcaactggtttcaaacgccaggaggaaagtgagagccggtcttcacaggctggagaagacagcaaccgcggtcgctcgggctggttttctcccacttcccaggaggaaggtcatgcattgcagatcccggagttcctacagaggaaagggcgtccagggtttccacgagtctgaacacactttggttcaatgtttttcttgtcatagtttggtacgatgtaggtttggtttctgggtctcttagttagcaaggtagagcagatgttcctgaaccgcatactaatctgtgtgcaaacttcgtcgcctgagtacattggctgggctgctttgcttctcaggaacctgcagtaggtctcaatttgctagttattatgattaaaagacatcgctgagaccaaattataacgttccgtgtgaagaattactggctcactgccaatttcctttcctttgcggcatacattgtttcattagtcgttattttggtttcgttcaatgttatgacaccaaaataggattataagggttagtttggaaaccattttctcaataaatttctatttttcgagggaaattagttcattttcctttgaaaaataggaactacttgaaaaaa

SEQ ID NO: 209289 - DNA, 1561 bp, Zea Mays
tggccactcagccagcgctcaccaactcaccgagtgtccgagtcgttggcttggcttggcttggctccgcccgttggcatcgtctactcgccgaaaacctcgccgagtccctgccctccctgggcggtgggcgcggaaacccttcgtctgttcgctaaaccttggcggccggatctcccaccttcagaatccatctggtctcctctataaaagcgctgggaggatctgccgactttgccgtccataggcggcgtctctccggtgtcctgcgtctgcgccgcacacatcccccactcttcttccagtgaaacagttcaggctggaatgggaggtgggacaggcactggtggagcacctattattgcagggattgcaaagtccatgggtatattgactgttggaattgtcacaaccccattttcatttgagggaagaaggcgggctcttcaggcacaagaaggaattgcatcgttgagaagcaatgttgatacactgattgtaattccaaatgacaagttactgactgctgtgtccccaaatactcctgtgacagaagcattcaatttagcagatgatattcttcggcaaggtgttcgtgggatatcagatataatcactgtgccaggtctggtgaatgtggactttgctgatgttcgatcagttatgtcagatgctggctcatcattaatgggcattggaacagcaacaggcaagacacgagcaagagatgccgcactcaatgccatacagtctcctctacttgatattggtattgaaagagcaactggaattgtatggaatatcactggagggaatgatctaaccttgacagaggtgaatgctgcagctgaagtaatctatgatcttgttgaccctggtgcaaatctgatttttggctctgttatagatccgtcatacactggtcaagtgagcataactctaattgcaactggtttcaaacgccaggaggaaagtgagagccggtcttcacaggctggagaagacagcaaccgcggtcgctcgggctggttttctcccacttcccaggaggaaggtcatgcattgcagatcccggagttcctacagaggaaagggcgtccagggtttccacgagtctgaacacactttggttcaatgtttttcttgtcatagtttggtacgatgtaggtttggtttctgggtctcttagttagcaaggtagagcagatgttcctgaaccgcatactaatctgtgtgcaaacttcgtcgcctgagtacattggctgggctgctttgcttctcaggaacctgcagtaggtctcaatttgctagttattatgattaaaagacatcgctgagaccaaattataacgttccgtgtgaagaattactggctcactgccaatttcctttcctttgcggcatacattgtttcattagtcgttattttggtttcgttcaatgttatgacaccaaaataggattataagggttagtttggaaaccattttctcaataaatttctatttttcgagggaaattagttcattttcctttgaaaaataggaactacttgaaaaaa

SEQ ID NO: 209290 - DNA, 2220 bp, Zea Mays
tggccactcagccagcgctcaccaactcaccgagtgtccgagtcgttggcttggcttggcttggctccgcccgttggcatcgtctactcgccgaaaacctcgccgagtccctgccctccctgggcggtgggcgcggaaacccttcgtctgttcgctaaaccttggcggccggatctcccaccttcagaatccatctggtctcctctataaaagcgctgggaggatctgccgactttgccgtccataggcggcgtctctccggtgtcctgcgtctgcgccgcacacatcccccactcttcttccagtgaaacagttcagattgcatttgccagtgcaagcaaatttcagagataaggatggcagcacaactacttttctccaatgcttccagttgccactgcccattaggcatttcaaggataaacgttgggaagacacttcttggtgaaagtgcaagttttcagagaaagaagtcgttttctggtggttcctatcgcttttctcgatttgattgctctgcgaactcccgccgagctgggccaaggcgcaccaaggatactttatatgaccttcaccctgagatctccttgctttatggagaagataatggtgcagctaccttatccagcaaagagcagggtattgacactacagctgaaagattggtggacacttctccctcttaccgctataatgagcccaggattaaagtcataggggttggaggtggtggctccaatgctgtgaacaggatgattgaaagctccatgaagggtgtggaattctggattgtgaacactgattttcaggctatgcggatgtcacccattgaaccagaaaataggttacagattggccaagaattgacacgtggtcttggtgctggtgggaacccagaaattggcatgaatgcagccaaggaaagccaggagttggtagaacaggcagttgctggtgccgatatggtttttgtgacggctggaatgggaggtgggacaggcactggtggagcacctattattgcagggattgcaaagtccatgggtatattgactgttggaattgtcacaaccccattttcatttgagggaagaaggcgggctcttcaggcacaagaaggaattgcatcgttgagaagcaatgttgatacactgattgtaattccaaatgacaagttactgactgctgtgtccccaaatactcctgtgacagaagcattcaatttagcagatgatattcttcggcaaggtgttcgtgggatatcagatataatcactgtgccaggtctggtgaatgtggactttgctgatgttcgatcagttatgtcagatgctggctcatcattaatgggcattggaacagcaacaggcaagacacgagcaagagatgccgcactcaatgccatacagtctcctctacttgatattggtattgaaagagcaactggaattgtatggaatatcactggagggaatgatctaaccttgacagaggtgaatgctgcagctgaagtaatctatgatcttgttgaccctggtgcaaatctgatttttggctctgttatagatccgtcatacactggtcaagtgagcataactctaattgcaactggtttcaaacgccaggaggaaagtgagagccggtcttcacaggctggagaagacagcaaccgcggtcgctcgggctggttttctcccacttcccaggaggaaggtcatgcattgcagatcccggagttcctacagaggaaagggcgtccagggtttccacgagtctgaacacactttggttcaatgtttttcttgtcatagtttggtacgatgtaggtttggtttctgggtctcttagttagcaaggtagagcagatgttcctgaaccgcatactaatctgtgtgcaaacttcgtcgcctgagtacattggctgggctgctttgcttctcaggaacctgcagtaggtctcaatttgctagttattatgattaaaagacatcgctgagaccaaattataacgttccgtgtgaagaattactggctcactgccaatttcctttcctttgcggcatacattgtttcattagtcgttattttggtttcgttcaatgttatgacaccaaaataggattataagggttagtttggaaaccattttctcaataaatttctatttttcgagggaaattagttcattttcctttgaaaaataggaactacttgaaaaaa

SEQ ID NO: 209291 - DNA, 940 bp, Zea Mays
gcaagaaataatgcttttgtgctgatttcagcaagctttcattagagctatattatgggcctcgaggcccatcgccctcggaataaggcgcggacttacagttccgccgtcggcaaggaaggaaaaagagagcagagaaccctagctagagtttggcgagtggtgcggaggcgcggctgctcctgctcgtcgcgacgtcgaatttcagcgccgcccgcgcgatccttggtctcttcgcccgagaggcgcgacaatggctgggaaaggcgggccgaccaacctggagaaggagcagatgtttgggatggcggagaaggagatggagtacagggttgatcttttcaacaggcttacaaagacctgttttgagaagtgcgttgaaaaaaggtataaagaagctgagctcaatatgggtgagaacagttgcattgatcgatgtgtttcaaagtattggcaggtgactaatttagtaggtcagatgcttgggaaccagcctcagatgtgaaccgagatgcactagttccattttgtagcagaatcctattgctctgtttattctttttggttggtattagaatcccgccacctgctattaagtacaccaatacagcaccagacttgttaatgcgtggatcgctctgaagaaaaatcacggtgtcttgctctttccagtgatgtgcattatctttgaatcatgaacagggaacatgcctgtaataaatttatagagctcgagagtgatcctgtttcgaaagcttgttctctttggtacgttggttcgttaaattctggatgtgtgctcctccgagatgattagagtataatatttttttttctttgcgaatcaagagtagtctatgtatatcatccacagtaaggtccctaggatcgttttttgcctgcgaacattggatgatttcagttattatatagtgtcaat

SEQ ID NO: 209292 - DNA, 901 bp, Zea Mays
gcaagaaataatgcttttgtgctgatttcagcaagctttcattagagctatattatgggcctcgaggcccatcgccctcggaataaggcgcggacttacagttccgccgtcggcaaggaaggaaaaagagagcagagaaccctagctagagtttggcgagtggtgcggaggcgcggctgctcctgctcgtcgcgacgtcgaatttcagcgccgcccgcgcgatccttggtctcttcgcccgtgaggagaggcgcgacaatggctgggaaaggcgggccgaccaacctggagaaggagcagatgtttgggatggcggagaaggagatggagtacagggttgatcttttcaacaggcttacaaagacctgttttgagaagtgcgttgaaaaaaggtataaagaagctgagctcaatatgggtgactaatttagtaggtcagatgcttgggaaccagcctcagatgtgaaccgagatgcactagttccattttgtagcagaatcctattgctctgtttattctttttggttggtattagaatcccgccacctgctattaagtacaccaatacagcaccagacttgttaatgcgtggatcgctctgaagaaaaatcacggtgtcttgctctttccagtgatgtgcattatctttgaatcatgaacagggaacatgcctgtaataaatttatagagctcgagagtgatcctgtttcgaaagcttgttctctttggtacgttggttcgttaaattctggatgtgtgctcctccgagatgattagagtataatatttttttttctttgcgaatcaagagtagtctatgtatatcatccacagtaaggtccctaggatcgttttttgcctgcgaacattggatgatttcagttattatatagtgtcaat

SEQ ID NO: 209293 - DNA, 1453 bp, Zea Mays
gcaagaaataatgcttttgtgctgatttcagcaagctttcattagagctatattatgggcctcgaggcccatcgccctcggaataaggcgcggacttacaggtgggccctttgtcagtaagcttgccctcgggccatgtatgatgtatcccgttcgggtgcggcccatgtgagaaggcgcgcgcctggacctcatcggtgtttgcttccgcagttccgccgtcggcaaggaaggaaaaagagagcagagaaccctagctagagtttggcgagtggtgcggaggcgcggctgctcctgctcgtcgcgacgtcgaatttcagcgccgcccgcgcgatccttggtctcttcgcccgagaggcgcgacaatggctgggaaaggcgggccgaccaacctggagaaggagcagatgtttgggatggcggagaaggagatggagtacagggttgatcttttcaacaggcttacaaagacctgttttgagaagtgcgttgaaaaaaggtacatatatgatcagcttattttttgaaaaatctactataattattcctctggcattacgacctttaccacaacggtgccgtccatggatcaatttatttcgtggattggatttcacttgcatgtctacggttcccttgcgtgtgctcgggataggtgttttgtataaatgtttcgccgtattatttgtagtcctgttggcacatccttatttctatgtaacacaaaacattatatgttgttttatatggataatcaccaagtaatttaactgagctgcaatacattacacctcaagcttgtagcttctcatggcatgttaattgatagacaagaaggatctaccatctgtgagattgaactatgattttttttcttcctgtggattcattttatttcaggtataaagaagctgagctcaatatgggtgagaacagttgcattgatcgatgtgtttcaaagtattggcaggtgactaatttagtaggtcagatgcttgggaaccagcctcagatgtgaaccgagatgcactagttccattttgtagcagaatcctattgctctgtttattctttttggttggtattagaatcccgccacctgctattaagtacaccaatacagcaccagacttgttaatgcgtggatcgctctgaagaaaaatcacggtgtcttgctctttccagtgatgtgcattatctttgaatcatgaacagggaacatgcctgtaataaatttatagagctcgagagtgatcctgtttcgaaagcttgttctctttggtacgttggttcgttaaattctggatgtgtgctcctccgagatgattagagtataatatttttttttctttgcgaatcaagagtagtctatgtatatcatccacagtaaggtccctaggatcgttttttgcctgcgaacattggatgatttcagttattatatagtgtcaat

SEQ ID NO: 209294 - DNA, 644 bp, Zea Mays
cgtaatgcaatgtctgaaggcttgaaaacaaataggatcgtcaatttacctatatacgcagaacagaagatattgagattcccatttccatctagcccacgtgcactcacaacccttgtagtggatcctgagttcaaaacatgagaatctgtagcctttcaagctttgagccttctgcaaggaggacggcaacgtgtacagcagttcaccctcgtcaagcgcctataaatagtagccagcctagcaacaacgaaaacaaaacatcagagcttgcaagagctacaacttcagtccagctatctaacaagactctacacataaaaaatcagcactagttccgtttctgaggaagacaatccaaaccaaagatgtctgagtccaggagctctttccgcaacgttaacactgattgcaactggagcaaaaaggagaacaagctgttcgaggaggccctagcccgctatcgcgagggcacacctgaccgctggctcaaggtgtcccgtgccatgggtggcatcaagacagccgatgaagtccgccgtcattatgagatccttaatgaggatgtcacactcattgtatctggcggaattccattccccaactacaacacacagggagcttggaactgagagcaggaccat

SEQ ID NO: 209295 - DNA, 4044 bp, Zea Mays
aaacaaaatagttggccaggtacgggcccaactgcatccggccccggtggcccagcagcctgagccagcgcgcctgtgcatcttcttccagcgtgccgtcgcctgcatcaagcgcggcgcacgcccactcgtcctctcggctctcgtccagacgcccagtcgccctagccataggcccctagccctagcacagcagcacaacagcgccgccccccgcccccggtggcccggccccccgcccgttcacccgcgcaaccgcgccgcgcgacccgcgtccggcggccgcccatcgccagtgccgtgacacgtcactccgacgccgtcgccaccaaatctcctggcaacgcctcacgtcttctagttctaattccagcctcactgctgccatcacctccgcctgctgtgtgtcttccacctcgcgctgccaaagccgacaaaccctagcccaactctccctaccctcgcccatcccactcctttcgtccgattcgtggaggcgacggaggggctaaggcatgacgaccgatgggcagctcagggagtgggtctccgacaagctcatgagcctcttgggctactccaagagcgtcgtcgttcagtacgtcatcaggcttgcgaaggagtgctcttcacccggtgacctcgtgggcaagcttgttgagtttgggttcagctcgtctgcggagacccgcaccttcgcgtcggatgtctacgccaaggttccccgcagggccagcggcatcagtgaagtagtggcaacagattctggaaggaatgtccgtcgacgaacagaagaggaggatgaagaaggtggcatcggcagttctgatgaagagaaagaaatgattagagatcagcaggaaaaggctcagctagaaagaaacatgagagaaagagatgcagctaacacaaggaagttgatggagcgacaattatctaaggaagaacaagaggaacttactaggaaatctcaagcaatggacaacaatgacacatctgatctgagaaaattctcaaggcaagcgtacctgcaaaagcgacgagacaaaaaaattgaggaaattcgtgatgaaattctggaccaccagtacatttttcaggatctgaaactaacagaggcagaagaaaaggagttgagatacaagatgaagatatatgatcttgtcaaggaacatgttgagactcctgatgatgttggtgcgtacaaaatgcctgaagcttatgacatgggcgaaaatgtcaatcaagagaagagattcgctgtggccatgcaacggtacaaagatcctaaggccaatgataaaatgaacccttttgctgaacaggaagcatgggaagaacaccaaataggaaaatcgaaactgcaatttggatccaaagataagaagccgtcttcagatgagtatcagtatgtatttgaagatacgattgattttgttaaatcatcagtcatagaaggaacccagcctgaagatgattcagataaagaagacgttgaagcaaaagatattttgaaaagggagctccaggatgagcgaaagacacttccaattttcaaatttagggatgaactgcttaaggctgtagaagagtatcaggttatcgtcatagtgggtgagactgggtccggtaaaacaacacaaatacctcagttccttcatgagtctggttatactgcaaaaggaaaggttgcatgtactcaacctcgtcgagtagctgccatgagtgttgcagcaagagtatctcaagaaatgggtgttaaacttgggcatgaggttggttactctataagatttgaggattgcacttcagataaaacaattattaagtacatgactgatggaatgcttctaagggagttccttggtgaaccagatttggctagctatagtgttgtcatggttgacgaggctcatgagcgtaccctctccactgatatcttatttggtctagtgaaggatatttctcgttttcgaccagatctgaagttgctcatttctagtgccacccttgatgcagaaaaatttagtgactactttgattcagctcctattttcaagatacctgggaggcgatacccggttgaaattcattatacaaaagctccagaggctgattacatagatgcagcaattgtcactgttttacagatacatgttacccaatcccctggcgatatcctggtgtttctcacaggtcaggaggaaattgaaacagttgatgaaatccttaaacacagaacaaggggcttaggcaccaaaatctcagaattaattatatgtcctatttatgcaaatctgcctaccgagcttcaagctaagatatttgagccaacccctgagggtgcccgtaaggtggttctggccactaatatagcagagacttcattaaccattgatggtataaaatatgttattgatcctggcttttgtaagatcaaatcatacaatccccgcacaggaatggaatctctacttattaatcccatctcaaaagcttcggcaaaccagagggctggaagatctggacgcactggacccggaaaatgcttccgtctatacacgagttacaactacatgcacgacctagaagataatactgttccagagatccaacgaaccaatcttgcgaatgttgtgcttacactcaagagtcttggtattcatgacttggttaactttgacttcatggatccacccccatcagaagccctattaagggctctggaacaactttttgctctcagtgcactcaacagtcgtggggagttgaccaagactggaagaagaatggcagaatttccactggatcctatgttgtcgaagatgatagttgcttcagagaaatataagtgttctgatgagatcatctccattgcctccatgttgtcaattggcaattctatattttatcgtccgaaggacaaacaagttcatgcagataatgcaaggttgaatttccacactggcaatgttggggaccatatagcactactaaatgtgtataattcttggaaagaaacagactattcaactcaatggtgttatgaaaactatatacaggtgcgcagcatgaagagggcaagagatattcgggatcaactagatgggcttatggaaagagttgagattgagatttgctcaaacaccagtgatttagatgctattaaaaaagctataacatcaggtttcttccatcactctgcacggttgcagagggatggtacatataagactgtcaagaaccctcagaccgtgcatatccatcctagttcaggattagcggaggtacgtccgcggtgggtagtgtaccacgaattagttctcacgacgaaagagtttatgcgccaggtgacggaactgaagcctgaatggctggtagagatagcaccacattattaccaactaaaggatgtggaagactccggaacaaagaagttaccgaagggccaaggacgagctgcattgtagctatgatacatgaagtttcgatggatgtattgtgttggactcatcgtaggagcatcataggatgtatataactccttatatcacgaacaggatacaagatgtcacttttcattgccctgcttaggtttcagagtaagctgattgtgaatgtaaattgtgacacgaagacatgcatgtgaaccgctataattgtcacactggagggagcgccggcatgcaactttcgtgtcttccagccgctacgcttgacgatcgttcgcatcctgccgccgtcgcgactattatccaagaaaatgcatatgtgcctttcctcgccggcctcttggatatggatgtatgttgaacaaacgcctatcaagggaaggataaatgagggatgagtatgggattttgaaaaaaagaaatcctgaatctttctgtaaattgggtaagcaaattgagaaaaatggatgggttgggacggaatcgtgagtcttgaatctgaacaactcagggtctttggttgggaccggattatgggccacttgatccgaccaactcgtaaaaaaagtcaggcttgattgtccaaaaaaac

SEQ ID NO: 209296 - DNA, 3975 bp, Zea Mays
cgcgcctgtgcatcttcttccagcgtgccgtcgcctgcatcaagcgcggcgcacgcccactcgtcctctcggctctcgtccagacgcccagtcgccctagccataggcccctagccctagcacagcagcacaacagcgccgccccccgcccccggtggcccggccccccgcccgttcacccgcgcaaccgcgccgcgcgacccgcgtccggcggccgcccatcgccagtgccgtgacacgtcactccgacgccgtcgccaccaaatctcctggcaacgcctcacgtcttctagttctaattccagcctcactgctgccatcacctccgcctgctgtgtgtcttccacctcgcgctgccaaagccgacaaaccctagcccaactctccctaccctcgcccatcccactcctttcgtccgattcgtggaggcgacggaggggctaaggcatgacgaccgatgggcagctcagggagtgggtctccgacaagctcatgagcctcttgggctactccaagagcgtcgtcgttcagtacgtcatcaggcttgcgaaggagtgctcttcacccggtgacctcgtgggcaagcttgttgagtttgggttcagctcgtctgcggagacccgcaccttcgcgtcggatgtctacgccaaggttccccgcagggccagcggcatcagtaagtagtggcaacagattctggaaggaatgtccgtcgacgaacagaagaggaggatgaagaaggtggcatcggcagttctgatgaagagaaagaaatgattagagatcagcaggaaaaggctcagctagaaagaaacatgagagaaagagatgcagctaacacaaggaagttgatggagcgacaattatctaaggaagaacaagaggaacttactaggaaatctcaagcaatggacaacaatgacacatctgatctgagaaaattctcaaggcaagcgtacctgcaaaagcgacgagacaaaaaaattgaggaaattcgtgatgaaattctggaccaccagtacatttttcaggatctgaaactaacagaggcagaagaaaaggagttgagatacaagatgaagatatatgatcttgtcaaggaacatgttgagactcctgatgatgttggtgcgtacaaaatgcctgaagcttatgacatgggcgaaaatgtcaatcaagagaagagattcgctgtggccatgcaacggtacaaagatcctaaggccaatgataaaatgaacccttttgctgaacaggaagcatgggaagaacaccaaataggaaaatcgaaactgcaatttggatccaaagataagaagccgtcttcagatgagtatcagtatgtatttgaagatacgattgattttgttaaatcatcagtcatagaaggaacccagcctgaagatgattcagataaagaagacgttgaagcaaaagatattttgaaaagggagctccaggatgagcgaaagacacttccaattttcaaatttagggatgaactgcttaaggctgtagaagagtatcaggttatcgtcatagtgggtgagactgggtccggtaaaacaacacaaatacctcagttccttcatgagtctggttatactgcaaaaggaaaggttgcatgtactcaacctcgtcgagtagctgccatgagtgttgcagcaagagtatctcaagaaatgggtgttaaacttgggcatgaggttggttactctataagatttgaggattgcacttcagataaaacaattattaagtacatgactgatggaatgcttctaagggagttccttggtgaaccagatttggctagctatagtgttgtcatggttgacgaggctcatgagcgtaccctctccactgatatcttatttggtctagtgaaggatatttctcgttttcgaccagatctgaagttgctcatttctagtgccacccttgatgcagaaaaatttagtgactactttgattcagctcctattttcaagatacctgggaggcgatacccggttgaaattcattatacaaaagctccagaggctgattacatagatgcagcaattgtcactgttttacagatacatgttacccaatcccctggcgatatcctggtgtttctcacaggtcaggaggaaattgaaacagttgatgaaatccttaaacacagaacaaggggcttaggcaccaaaatctcagaattaattatatgtcctatttatgcaaatctgcctaccgagcttcaagctaagatatttgagccaacccctgagggtgcccgtaaggtggttctggccactaatatagcagagacttcattaaccattgatggtataaaatatgttattgatcctggcttttgtaagatcaaatcatacaatccccgcacaggaatggaatctctacttattaatcccatctcaaaagcttcggcaaaccagagggctggaagatctggacgcactggacccggaaaatgcttccgtctatacacgagttacaactacatgcacgacctagaagataatactgttccagagatccaacgaaccaatcttgcgaatgttgtgcttacactcaagagtcttggtattcatgacttggttaactttgacttcatggatccacccccatcagaagccctattaagggctctggaacaactttttgctctcagtgcactcaacagtcgtggggagttgaccaagactggaagaagaatggcagaatttccactggatcctatgttgtcgaagatgatagttgcttcagagaaatataagtgttctgatgagatcatctccattgcctccatgttgtcaattggcaattctatattttatcgtccgaaggacaaacaagttcatgcagataatgcaaggttgaatttccacactggcaatgttggggaccatatagcactactaaatgtgtataattcttggaaagaaacagactattcaactcaatggtgttatgaaaactatatacaggtgcgcagcatgaagagggcaagagatattcgggatcaactagatgggcttatggaaagagttgagattgagatttgctcaaacaccagtgatttagatgctattaaaaaagctataacatcaggtttcttccatcactctgcacggttgcagagggatggtacatataagactgtcaagaaccctcagaccgtgcatatccatcctagttcaggattagcggaggtacgtccgcggtgggtagtgtaccacgaattagttctcacgacgaaagagtttatgcgccaggtgacggaactgaagcctgaatggctggtagagatagcaccacattattaccaactaaaggatgtggaagactccggaacaaagaagttaccgaagggccaaggacgagctgcattgtagctatgatacatgaagtttcgatggatgtattgtgttggactcatcgtaggagcatcataggatgtatataactccttatatcacgaacaggatacaagatgtcacttttcattgccctgcttaggtttcagagtaagctgattgtgaatgtaaattgtgacacgaagacatgcatgtgaaccgctataattgtcacactggagggagcgccggcatgcaactttcgtgtcttccagccgctacgcttgacgatcgttcgcatcctgccgccgtcgcgactattatccaagaaaatgcatatgtgcctttcctcgccggcctcttggatatggatgtatgttgaacaaacgcctatcaagggaaggataaatgagggatgagtatgggattttgaaaaaaagaaatcctgaatctttctgtaaattgggtaagcaaattgagaaaaatggatgggttgggacggaatcgtgagtcttgaatctgaacaactcagggtctttggttgggaccggattatgggccacttgatccgaccaactcgtaaaaaaagtcaggcttgattgtccaaaaaaac

SEQ ID NO: 209297 - DNA, 3265 bp, Zea Mays
tccactgagccgtcctgggttcgacgcaccctctctacaaaatacaggggggaagagaaagaaatgattagagatcagcaggaaaaggctcagctagaaagaaacatgagagaaagagatgcagctaacacaaggaagttgatggagcgacaattatctaaggaagaacaagaggaacttactaggaaatctcaagcaatggacaacaatgacacatctgatctgagaaaattctcaaggcaagcgtacctgcaaaagcgacgagacaaaaaaattgaggaaattcgtgatgaaattctggaccaccagtacatttttcaggatctgaaactaacagaggcagaagaaaaggagttgagatacaagatgaagatatatgatcttgtcaaggaacatgttgagactcctgatgatgttggtgcgtacaaaatgcctgaagcttatgacatgggcgaaaatgtcaatcaagagaagagattcgctgtggccatgcaacggtacaaagatcctaaggccaatgataaaatgaacccttttgctgaacaggaagcatgggaagaacaccaaataggaaaatcgaaactgcaatttggatccaaagataagaagccgtcttcagatgagtatcagtatgtatttgaagatacgattgattttgttaaatcatcagtcatagaaggaacccagcctgaagatgattcagataaagaagacgttgaagcaaaagatattttgaaaagggagctccaggatgagcgaaagacacttccaattttcaaatttagggatgaactgcttaaggctgtagaagagtatcaggttatcgtcatagtgggtgagactgggtccggtaaaacaacacaaatacctcagttccttcatgagtctggttatactgcaaaaggaaaggttgcatgtactcaacctcgtcgagtagctgccatgagtgttgcagcaagagtatctcaagaaatgggtgttaaacttgggcatgaggttggttactctataagatttgaggattgcacttcagataaaacaattattaagtacatgactgatggaatgcttctaagggagttccttggtgaaccagatttggctagctatagtgttgtcatggttgacgaggctcatgagcgtaccctctccactgatatcttatttggtctagtgaaggatatttctcgttttcgaccagatctgaagttgctcatttctagtgccacccttgatgcagaaaaatttagtgactactttgattcagctcctattttcaagatacctgggaggcgatacccggttgaaattcattatacaaaagctccagaggctgattacatagatgcagcaattgtcactgttttacagatacatgttacccaatcccctggcgatatcctggtgtttctcacaggtcaggaggaaattgaaacagttgatgaaatccttaaacacagaacaaggggcttaggcaccaaaatctcagaattaattatatgtcctatttatgcaaatctgcctaccgagcttcaagctaagatatttgagccaacccctgagggtgcccgtaaggtggttctggccactaatatagcagagacttcattaaccattgatggtataaaatatgttattgatcctggcttttgtaagatcaaatcatacaatccccgcacaggaatggaatctctacttattaatcccatctcaaaagcttcggcaaaccagagggctggaagatctggacgcactggacccggaaaatgcttccgtctatacacgagttacaactacatgcacgacctagaagataatactgttccagagatccaacgaaccaatcttgcgaatgttgtgcttacactcaagagtcttggtattcatgacttggttaactttgacttcatggatccacccccatcagaagccctattaagggctctggaacaactttttgctctcagtgcactcaacagtcgtggggagttgaccaagactggaagaagaatggcagaatttccactggatcctatgttgtcgaagatgatagttgcttcagagaaatataagtgttctgatgagatcatctccattgcctccatgttgtcaattggcaattctatattttatcgtccgaaggacaaacaagttcatgcagataatgcaaggttgaatttccacactggcaatgttggggaccatatagcactactaaatgtgtataattcttggaaagaaacagactattcaactcaatggtgttatgaaaactatatacaggtgcgcagcatgaagagggcaagagatattcgggatcaactagatgggcttatggaaagagttgagattgagatttgctcaaacaccagtgatttagatgctattaaaaaagctataacatcaggtttcttccatcactctgcacggttgcagagggatggtacatataagactgtcaagaaccctcagaccgtgcatatccatcctagttcaggattagcggaggtacgtccgcggtgggtagtgtaccacgaattagttctcacgacgaaagagtttatgcgccaggtgacggaactgaagcctgaatggctggtagagatagcaccacattattaccaactaaaggatgtggaagactccggaacaaagaagttaccgaagggccaaggacgagctgcattgtagctatgatacatgaagtttcgatggatgtattgtgttggactcatcgtaggagcatcataggatgtatataactccttatatcacgaacaggatacaagatgtcacttttcattgccctgcttaggtttcagagtaagctgattgtgaatgtaaattgtgacacgaagacatgcatgtgaaccgctataattgtcacactggagggagcgccggcatgcaactttcgtgtcttccagccgctacgcttgacgatcgttcgcatcctgccgccgtcgcgactattatccaagaaaatgcatatgtgcctttcctcgccggcctcttggatatggatgtatgttgaacaaacgcctatcaagggaaggataaatgagggatgagtatgggattttgaaaaaaagaaatcctgaatctttctgtaaattgggtaagcaaattgagaaaaatggatgggttgggacggaatcgtgagtcttgaatctgaacaactcagggtctttggttgggaccggattatgggccacttgatccgaccaactcgtaaaaaaagtcaggcttgattgtccaaaaaaac

SEQ ID NO: 209298 - DNA, 3197 bp, Zea Mays
tgagtatgtggagaggcgcaggaaggagatgggcaagatatgtttaggccaagagatgtttaggctgcagttgatggagcgacaattatctaaggaagaacaagaggaacttactaggaaatctcaagcaatggacaacaatgacacatctgatctgagaaaattctcaaggcaagcgtacctgcaaaagcgacgagacaaaaaaattgaggaaattcgtgatgaaattctggaccaccagtacatttttcaggatctgaaactaacagaggcagaagaaaaggagttgagatacaagatgaagatatatgatcttgtcaaggaacatgttgagactcctgatgatgttggtgcgtacaaaatgcctgaagcttatgacatgggcgaaaatgtcaatcaagagaagagattcgctgtggccatgcaacggtacaaagatcctaaggccaatgataaaatgaacccttttgctgaacaggaagcatgggaagaacaccaaataggaaaatcgaaactgcaatttggatccaaagataagaagccgtcttcagatgagtatcagtatgtatttgaagatacgattgattttgttaaatcatcagtcatagaaggaacccagcctgaagatgattcagataaagaagacgttgaagcaaaagatattttgaaaagggagctccaggatgagcgaaagacacttccaattttcaaatttagggatgaactgcttaaggctgtagaagagtatcaggttatcgtcatagtgggtgagactgggtccggtaaaacaacacaaatacctcagttccttcatgagtctggttatactgcaaaaggaaaggttgcatgtactcaacctcgtcgagtagctgccatgagtgttgcagcaagagtatctcaagaaatgggtgttaaacttgggcatgaggttggttactctataagatttgaggattgcacttcagataaaacaattattaagtacatgactgatggaatgcttctaagggagttccttggtgaaccagatttggctagctatagtgttgtcatggttgacgaggctcatgagcgtaccctctccactgatatcttatttggtctagtgaaggatatttctcgttttcgaccagatctgaagttgctcatttctagtgccacccttgatgcagaaaaatttagtgactactttgattcagctcctattttcaagatacctgggaggcgatacccggttgaaattcattatacaaaagctccagaggctgattacatagatgcagcaattgtcactgttttacagatacatgttacccaatcccctggcgatatcctggtgtttctcacaggtcaggaggaaattgaaacagttgatgaaatccttaaacacagaacaaggggcttaggcaccaaaatctcagaattaattatatgtcctatttatgcaaatctgcctaccgagcttcaagctaagatatttgagccaacccctgagggtgcccgtaaggtggttctggccactaatatagcagagacttcattaaccattgatggtataaaatatgttattgatcctggcttttgtaagatcaaatcatacaatccccgcacaggaatggaatctctacttattaatcccatctcaaaagcttcggcaaaccagagggctggaagatctggacgcactggacccggaaaatgcttccgtctatacacgagttacaactacatgcacgacctagaagataatactgttccagagatccaacgaaccaatcttgcgaatgttgtgcttacactcaagagtcttggtattcatgacttggttaactttgacttcatggatccacccccatcagaagccctattaagggctctggaacaactttttgctctcagtgcactcaacagtcgtggggagttgaccaagactggaagaagaatggcagaatttccactggatcctatgttgtcgaagatgatagttgcttcagagaaatataagtgttctgatgagatcatctccattgcctccatgttgtcaattggcaattctatattttatcgtccgaaggacaaacaagttcatgcagataatgcaaggttgaatttccacactggcaatgttggggaccatatagcactactaaatgtgtataattcttggaaagaaacagactattcaactcaatggtgttatgaaaactatatacaggtgcgcagcatgaagagggcaagagatattcgggatcaactagatgggcttatggaaagagttgagattgagatttgctcaaacaccagtgatttagatgctattaaaaaagctataacatcaggtttcttccatcactctgcacggttgcagagggatggtacatataagactgtcaagaaccctcagaccgtgcatatccatcctagttcaggattagcggaggtacgtccgcggtgggtagtgtaccacgaattagttctcacgacgaaagagtttatgcgccaggtgacggaactgaagcctgaatggctggtagagatagcaccacattattaccaactaaaggatgtggaagactccggaacaaagaagttaccgaagggccaaggacgagctgcattgtagctatgatacatgaagtttcgatggatgtattgtgttggactcatcgtaggagcatcataggatgtatataactccttatatcacgaacaggatacaagatgtcacttttcattgccctgcttaggtttcagagtaagctgattgtgaatgtaaattgtgacacgaagacatgcatgtgaaccgctataattgtcacactggagggagcgccggcatgcaactttcgtgtcttccagccgctacgcttgacgatcgttcgcatcctgccgccgtcgcgactattatccaagaaaatgcatatgtgcctttcctcgccggcctcttggatatggatgtatgttgaacaaacgcctatcaagggaaggataaatgagggatgagtatgggattttgaaaaaaagaaatcctgaatctttctgtaaattgggtaagcaaattgagaaaaatggatgggttgggacggaatcgtgagtcttgaatctgaacaactcagggtctttggttgggaccggattatgggccacttgatccgaccaactcgtaaaaaaagtcaggcttgattgtccaaaaaaac

SEQ ID NO: 209299 - DNA, 3066 bp, Zea Mays
aagcaatggacaacaatgacacatctgatctgagaaaattctcaaggcaagcgtacctgcaaaagcgacgagacaaaaaaattgaggaaattcgtgatgaaattctggaccaccagtacatttttcaggatctgaaactaacagaggcagaagaaaaggagttgagatacaagatgaagatatatgatcttgtcaaggaacatgttgagactcctgatgatgttggtgcgtacaaaatgcctgaagcttatgacatgggcgaaaatgtcaatcaagagaagagattcgctgtggccatgcaacgagatcctaaggccaatgataaaatgaacccttttgctgaacaggaagcatgggaagaacaccaaataggaaaatcgaaactgcaatttggatccaaagataagaagccgtcttcagatgagtatcagtatgtatttgaagatacgattgattttgttaaatcatcagtcatagaaggaacccagcctgaagatgattcagataaagaagacgttgaagcaaaagatattttgaaaagggagctccaggatgagcgaaagacacttccaattttcaaatttagggatgaactgcttaaggctgtagaagagtatcaggttatcgtcatagtgggtgagactgggtccggtaaaacaacacaaatacctcagttccttcatgagtctggttatactgcaaaaggaaaggttgcatgtactcaacctcgtcgagtagctgccatgagtgttgcagcaagagtatctcaagaaatgggtgttaaacttgggcatgaggttggttactctataagatttgaggattgcacttcagataaaacaattattaagtacatgactgatggaatgcttctaagggagttccttggtgaaccagatttggctagctatagtgttgtcatggttgacgaggctcatgagcgtaccctctccactgatatcttatttggtctagtgaaggatatttctcgttttcgaccagatctgaagttgctcatttctagtgccacccttgatgcagaaaaatttagtgactactttgattcagctcctattttcaagatacctgggaggcgatacccggttgaaattcattatacaaaagctccagaggctgattacatagatgcagcaattgtcactgttttacagatacatgttacccaatcccctggcgatatcctggtgtttctcacaggtcaggaggaaattgaaacagttgatgaaatccttaaacacagaacaaggggcttaggcaccaaaatctcagaattaattatatgtcctatttatgcaaatctgcctaccgagcttcaagctaagatatttgagccaacccctgagggtgcccgtaaggtggttctggccactaatatagcagagacttcattaaccattgatggtataaaatatgttattgatcctggcttttgtaagatcaaatcatacaatccccgcacaggaatggaatctctacttattaatcccatctcaaaagcttcggcaaaccagagggctggaagatctggacgcactggacccggaaaatgcttccgtctatacacgagttacaactacatgcacgacctagaagataatactgttccagagatccaacgaaccaatcttgcgaatgttgtgcttacactcaagagtcttggtattcatgacttggttaactttgacttcatggatccacccccatcagaagccctattaagggctctggaacaactttttgctctcagtgcactcaacagtcgtggggagttgaccaagactggaagaagaatggcagaatttccactggatcctatgttgtcgaagatgatagttgcttcagagaaatataagtgttctgatgagatcatctccattgcctccatgttgtcaattggcaattctatattttatcgtccgaaggacaaacaagttcatgcagataatgcaaggttgaatttccacactggcaatgttggggaccatatagcactactaaatgtgtataattcttggaaagaaacagactattcaactcaatggtgttatgaaaactatatacaggtgcgcagcatgaagagggcaagagatattcgggatcaactagatgggcttatggaaagagttgagattgagatttgctcaaacaccagtgatttagatgctattaaaaaagctataacatcaggtttcttccatcactctgcacggttgcagagggatggtacatataagactgtcaagaaccctcagaccgtgcatatccatcctagttcaggattagcggaggtacgtccgcggtgggtagtgtaccacgaattagttctcacgacgaaagagtttatgcgccaggtgacggaactgaagcctgaatggctggtagagatagcaccacattattaccaactaaaggatgtggaagactccggaacaaagaagttaccgaagggccaaggacgagctgcattgtagctatgatacatgaagtttcgatggatgtattgtgttggactcatcgtaggagcatcataggatgtatataactccttatatcacgaacaggatacaagatgtcacttttcattgccctgcttaggtttcagagtaagctgattgtgaatgtaaattgtgacacgaagacatgcatgtgaaccgctataattgtcacactggagggagcgccggcatgcaactttcgtgtcttccagccgctacgcttgacgatcgttcgcatcctgccgccgtcgcgactattatccaagaaaatgcatatgtgcctttcctcgccggcctcttggatatggatgtatgttgaacaaacgcctatcaagggaaggataaatgagggatgagtatgggattttgaaaaaaagaaatcctgaatctttctgtaaattgggtaagcaaattgagaaaaatggatgggttgggacggaatcgtgagtcttgaatctgaacaactcagggtctttggttgggaccggattatgggccacttgatccgaccaactcgtaaaaaaagtcaggcttgattgtccaaaaaaac

SEQ ID NO: 209300 - DNA, 1528 bp, Zea Mays
ggggaactttcttgtcgcacatatttgagggacgccaatccttgtttgtgggtcgcgaaaaaatgcgagcaaggaaggggattctgttggacatgctggttctatgattgaagggagtgatccggtcacaggccatataatctcgacaaccattggagggaagaatggagagcctaaaaggactatcagctacatggcagagagagttgtgggaactggatcatttggaatcgtcttccaggcaaaatgtctggagactggtgagactgttgcgattaagaaggttttgcaggacaagcgctacaagaacagggagctacaaatcatgcgatccatggatcactgcaatgttgtttccttgaagcattgcttcttctctaccacaagcagagatgaacttttccttaacttagtgatggagtttgttcccgagtcattatatcgggtgttgaaacattacagcaatatgaaccagaggatgccactcatttatgtcaaattatatacctaccagatatttcgaggcttagcctatattcacacagtacctggagtttgccacagggatgtgaaaccacaaaatcttttggttgatccactgactcaccaagtgaagatatgtgattttgggagtgccaaaatgttggtcaaaggtgaagcaaacatatcatatatatgttcacgttattaccgtgctccagagctcatatttggggcaactgagtacacaacatcaattgatatttggtcagctggatgtgttcttgctgagctgcttcttggccagcctctcttccctggtgaaagtgctgtggatcagcttgttgagataataaaggttcttggtaccccaacgcgcgaggaaatccgatgtatgaatccaaactacaccgagtttagatttcctcagatcaaagctcacccatggcacaagattttccacaagcggatgcctccagaagctatagatctcgcttcacgcttgctccagtattcaccaaatctaagatgcactgctcttgaagcgtgtgcacatccattctttgacgatttgcgagaaccacatgcgaggttgccaaatggacggccatttcctccactgttcaactttaaacaggaactagcaaatgcctccccagagctcatcaacaggttgatcccagaccatgctaggcggcatcttgggctcacattattgcccgctactggaccataggcgaaggctctatggtggtgcttcgttgtgcggaaggcaacctgcattcaaggtgtagaatctgacaattattggaaggtcaaacatgagctggcgcgtaaggagaggtggtttcaaagtgagcaggtgaagctatatggattcgcatgggtctgttcgagactattcactccactttcaacttcgccacccaaataaaaaacacggttctacgaactctgcttctgctctagaaaaagggtaaaggtcaaaggtaagtctagcctttttatagagcacctaaaagaatacttaagataatctagtttttag

SEQ ID NO: 209301 - DNA, 1436 bp, Zea Mays
aggaaatccaccagaatacggattggattgggttgcggcatccattccatccgcgttcctattcgcaaccgccgtcgctttcgcccggtcggcccacccaatcccgtccctatcgctctccatcgtctctctcccatcagcacgcagctgtacccgtacgcaactgcgacaggtccacatcgcggcggcccactcacccccagcgactgccgactgctgttccatggcggacggcgacggcgcggcggcgacggggaagctcgcggagctccccagcggcgccgagaaggggctccccaggaggggcaaggcttcttctgggaggacattaaacaccgcacaaattccgcttgttgcgagccatccagatgtgtatgagccatgtgatgattcctttgcccttgttgatgcactactctcagacaaggcacaactcttgacactacagccaaggttatgtatggaggtagggtctggtagtggttatgtcatcacctcgcttgcaatcatgctcaggcagttaggctctggagcccagtacctagcaactgacatcaaccaacatgctgccgagacaactcaagcgacccttgaagctcatggggtgcatgcagatgtgattgttactgacatcatgtctggtcttgataaacgccttgctggtatggttgatgtggcagttgttaaccctccttatgtgccaactcctgtggaagaagtcggatgtagaggcattgcttcgtcctgggcaggcggtttgaatggccgccaagtgattgacaggatccttcctgctgtgcgtgagatgctatcagaaagggggtggctgtacatggtggccctcgaagataatgatccttcagacatatgccatctgatgagcgagatggggtatgcatcccgcgttatcttgaagaggtgtactgaggaggagagcctttatgttctcaagttctggcgagacccacacgctgttacaagtgtgtcgccgaaatcttcaggctctgaatcatggttttctcagttgcatttcaaatccctttggcacaagggctcgtagcagttcatgccctcatcattttggcagtttggcgtcttcatcagctccaaaacatagcaagagatcttctgcaaatctgagatggcagtatgtttagatgtgtttggataaaatggttactgttggtttctgaccgtctcaggcacagtgaaagaatcaagaatcagcctagcttgattggtttaaggcgcagagcaaacatgtccttagaccagaaagtactgaaccttattaatttggtagcttaaatcgttaccttatgttctcttggtgtgtgtggtgtgtcaatgtttttaaggttctcttggtgtgtgtgtgtgtgtcattgtttttaaggagcacacatccagaatttaacgaaccaacgtaccaaaga

SEQ ID NO: 209302 - DNA, 2815 bp, Zea Mays
aatgtatttccatggaaccgaacgcgtgctgcgcctcctgtacggcgcggaggtaggtcaagccgcggttgggacgcggtgtggcgtgggcgagccgaaccaagcggcgatcgatcgaaacgaggcgtcgcgtggcagccggagatgtcgcagaagaggcagccggaggagggcgacgtcccgcggcgcgccgccgatgccggcggcggcggcggaggagacgagcccggtgggagctcgtcgcgctcctctctgccccagcgccacggcgagccgaagcggcagaggatcgcccttcgcgatgtgatcacggaggtgatgcggaacaccagcatcgagaagtttctaatcgcgctcgagcccctcatcaggagagtggtgagaccgccttttttatcttttactatctgccccatttctcacttcagtccttcttgaatggaaattcataggattggatagtgatctgatgtgagccctctaggttgtttgcctttcctcttgttggatacataacgatacatagtgctgttgtaatcccatctgcatgtgtggctgattggcactctgatattggttttggcaagagcaagttcttctttccctcccaaactactatctgagaagctaaggcatttatctgtatcgtattaatagctctataggctttgctgtcatgattgtatccataatgattccagccttacaaaataaggcttggcttcactgtttccgatgtgttcagccattccaattcagtgataattttacagtgggctacatcatatgttctccttgaaccatttgcttattttagccatctactgctaccagtggggtttgatagtctattcatttctaggtaaaagaagaaattgagtcggcttttgcaaaccatgcctctatgatggcaaggagtgtcacagacagtgttccatctgtgtcaaagaatttgcagctgcagttcatgaccagactttctcttccaatatttactggatccaagattgaaggagagggctccttaagtataactattgctctagtcgacgctttgacaagacaaattgtagcaccaggcaaagagttccagataaaggtcgagattgtagttctggagggggattttgaaagtggagaagatgatgactggacagctcaggagtttaacaataacattgttaaagaaagagaaggcaaaaggcccttgatttctggggatgcattcattgccctcgtcgatggcattggaacagtaggggaactttcattcacagataactccagctggacacggagccgaaagttcaggctaggagcaagaacagaggatggttctttcaatggtgtaagagtacgggaagcaaaaactgaatcatttgtggttaaggaccatcgaggagaattgtacaagaagcaccacccaccatttcttgaagatgaagtctggcgcctagagaaaattggcaaggaaggtgcttttcacaagcgtttgaatagggagaacatttgcactgtcaaagattttctcaccttgttaaatcttgatgcttctaggcttcgaaagatattaggtggtggcatgtcaacaaagatgtgggaggccactgtggaacatgcaaaaacatgtgttctaactgacaaagtgcatcactactatcctgatggtctaaacaaagctggtgttgtattcaatgtagttggagaagtaagagggttaatatctgataaatatgtttttgttgatgactttactgaaaaggagaaggccgaagcacgtgcagcagtgaagcaagcatatgaacactggaaggatgtccatacttgtgacaatgaaacgcttgtggaaaacccttcacatccattcaatttgggatctccatctttgcatgaaaatcagtataaccagttgcccacacaagtttctactgatggttttagtttgagcaattcggccatactatcacccaacattttctcaatggagccatcgagtgctttagacccttgtagtatattggagactgaagaaagcagtgctaatcaatttcagtcggtgttgcccccagttggtggccatgaagtgccccgagaacctcagacgctggataagttctccaactcgttggtatatgatgactgcagcgcccatccctcattcagtgaaagctattacagcactgtagatccaagcatgtccttcgacacacaagatcttggagctgcactgaaaggcttcattgcaaccatatcgaagcctaaggcggcatatagaggatggagaacattgtcttatgtgctaggatggattttctataccaagagaattgttgcaaggagaaagaaacatgggaaataagtgaacacaagtctttgtgtagttaaatgcgaatataagcttagagaatgagagattatgtacattagtttgtttcttgtcacagctggtaagctctgctggtttcttcagctgtacatgggctgtcagctatggttcgctatgcggctgtaaataatcaaatgaagtttgtacagggtgagggatgcgcatagcatttctgatgttttggatggatgccggagcttgctttttgatgcggcccgtgtattatctatgtagtagtatgcagtatgctgcttaattctgcagtattttcgacatttggaatctatatgtcgcatggtaacaagtttaattctgcttattttcgtacacagataatactgcagaattaccatgccgcaaactgatttttatgtagacagtaatgtgtttatggatatggttgacacttaaataaaaagctgggcagcg

SEQ ID NO: 209303 - DNA, 1637 bp, Zea Mays
attggatttttaaaattttaatgcccaagctatccttttactttgttgcctttttgctctgctagactcattctaggttcaagaacgatttggcgtagtggtacttaattcaacaatttcatgaaaaataaatgaattctttcttgtcctctactgtctagacttagttctagttgaggaagactagttgaggtggaaagtatgatcatgcacccaatcttcaccgagtgtacaagaagcaccacccaccatttcttgaagatgaagtctggcgcctagagaaaattggcaaggaaggtgcttttcacaagcgtttgaatagggagaacatttgcactgtcaaagattttctcaccttgttaaatcttgatgcttctaggcttcgaaagatattaggtggtggcatgtcaacaaagatgtgggaggccactgtggaacatgcaaaaacatgtgttctaactgacaaagtgcatcactactatcctgatggtctaaacaaagctggtgttgtattcaatgtagttggagaagtaagagggttaatatctgataaatatgtttttgttgatgactttactgaaaaggagaaggccgaagcacgtgcagcagtgaagcaagcatatgaacactggaaggatgtccatacttgtgacaatgaaacgcttgtggaaaacccttcacatccattcaatttgggatctccatctttgcatgaaaatcagtataaccagttgcccacacaagtttctactgatggttttagtttgagcaattcggccatactatcacccaacattttctcaatggagccatcgagtgctttagacccttgtagtatattggagactgaagaaagcagtgctaatcaatttcagtcggtgttgcccccagttggtggccatgaagtgccccgagaacctcagacgctggataagttctccaactcgttggtatatgatgactgcagcgcccatccctcattcagtgaaagctattacagcactgtagatccaagcatgtccttcgacacacaagatcttggagctgcactgaaaggcttcattgcaaccatatcgaagcctaaggcggcatatagaggatggagaacattgtcttatgtgctaggatggattttctataccaagagaattgttgcaaggagaaagaaacatgggaaataagtgaacacaagtctttgtgtagttaaatgcgaatataagcttagagaatgagagattatgtacattagtttgtttcttgtcacagctggtaagctctgctggtttcttcagctgtacatgggctgtcagctatggttcgctatgcggctgtaaataatcaaatgaagtttgtacagggtgagggatgcgcatagcatttctgatgttttggatggatgccggagcttgctttttgatgcggcccgtgtattatctatgtagtagtatgcagtatgctgcttaattctgcagtattttcgacatttggaatctatatgtcgcatggtaacaagtttaattctgcttattttcgtacacagataatactgcagaattaccatgccgcaaactgatttttatgtagacagtaatgtgtttatggatatggttgacacttaaataaaaagctgggcagcg

SEQ ID NO: 209304 - DNA, 2779 bp, Zea Mays
gccacaccatgacgaccaacgacccacggggcctcgggcacatttggtccaaggcaaggcctacattcatccagcacagcctacacggcccagtctctccggagaccggagcgacgagtccgcgagaccgccaccgccacccagcaagccgagcggcgccaattctgcgctgccatcgtcttcctccgtcacacccggctcgcaaaccctagctcgccccggccccacctccggccccgttcgtcggtgctatgtcgaagcggccgaagctcgagggtttcagcatcccgcggcccacctcctacaacttcgagcgctcgcagtccgtgcagcggctctaccgtccgaccgatgacccagacctcgacgacatcgccttctccgacgacgccccctcagatgcccaagccagcaccgcggtagaaggaaaggccgagaatgaggaggagatggacccgctcgacgccttcatggccgagatccaggaggagatccgtgcgccgcccccgccgcccaagcccgaggcgcttcgccgcacggattccgacgatgacgaggatgaccccgtcgagagcttcctgcgggccaagaaggacgctggcctcacgctggccgccgacgtcatgcgcgctggttacgactccgatgaggaggtctacgccgctgccaaggccgtcgacgccggcatgatggaatacgactctgatgacaaccccatagtcatcgacaagaagaaaatagagcccataccagcactcgatcactcgaccattgagtatgacgccttcacaaaagatttctacgaggagaagccatcgatttcaggtatgagtgaccaagaggtaacagattatatgaaaagtttgtcaattcgtgtttctggttttgatgtgccgaggccaataaaaaactttgaggattgtgggtttcatgtacctctaatgaatgctattgccaaacaagcttatgaaaaaccaactacaattcagtgccaggctttacctattgtactttcagggagagatatcattggtattgcaaaaactggctctggtaaaactgcagcttttgtgctccctatgattgttcatattatggatcagcctgagcttgagaaagaagaaggtccaataggagtcatttgtgctccaacaagagaattggcacatcagatatatctcgaagctaagaagtttgcaaagccttacaaccttcgagttgctgctatatatggtggtgtttccaaatttgaccagtttaaagaactgaaagcaggttgtgaaatagtcattgcaactccagggagattaatagacttgctgaagatgaaggcattgaagatgttcagggcaacttatctggttcttgatgaagctgatcgaatgttcgatcttggatttgagccacaaatacgatccattgttggtcaaattagaccagatcgacaaactttacttttttctgcaacaatgccatacaaagtagagcgtttggcaagagaaatattaactgatcctattagagttacagttggtcaagttggcggtgctaatgaagacattaaacaagttgttaatgtactcccttctgatgttgagaaaatgccttggcttttggggaaattgcctggaatgattgatgatggagatgttcttgtatttgcatctaaaaaggctagagtggacgagatagagaaagagttgaatcagagaggattcagaattgctgcgcttcatggcgacaaggatcaagcttctcgtatggagaccctgcagaagttcaaatctgggacatttcatgttctggttgcaactgatgttgctgcacgaggtcttgacatcaaatcgattaaaacagttgtcaactttgatattgcaaaagagatggatatgcatattcaccgaattggaagaactggtcgtgctggcgataaagatggcactgcatatactctgattacacagaaggaggcacattttgctggtgaactggttcacagtttgattgctgctggccaggatgtacccaatgaactcatggatctggctatgaaggatggaagattcagagcaaaacgagactccaggaaaggtgggaagaaaggtggcaaaggaaaaggtggtgttggcggtgctgggcgcgggcgcggtgtgcgtggagttgattttggcctcggcataggttacaatgccgaatctggttcacaagtgcctgctgcaagatctgctgctgtaaattctctgaagacagggatgttgcaacgatttaagagcagctttgtctctggatcttcaaatacaccaagcagcagtgcaccttcctttgtaagaccagcactccgtggctttgtgtctggcggcaccattggaggagacacacggcctgcacaggcagcccccactttcatccctgcatcccggcctgcacagcctgcccccgcggtccctgcatcccagcctgcaggaaataacaacgaaaatgggaacccgaatccagaaagttcacgggatcagttcagggagagaaaacgaccatcaggttgggatcgctagtccctgctaactgaggctaatgtcaggacatttcagggtagtggagtgggcgatggtatactttgagttgcagtgcagtaattttgtttgggcccaaacaatggcggtggcatattattagtgccaggtgacttttttttgtcttgtattttgttccttcgggatgaacaaccgttgaagaagtttcgtccaatattcagcgacttgacggaagatgtgtatagaac

SEQ ID NO: 209305 - DNA, 2657 bp, Zea Mays
gccaccgccacccagcaagccgagcggcgccaattctgcgctgccatcgtcttcctccgtcacacccggctcgcaaaccctagctcgccccggccccacctccggccccgttcgtcggtgctatgtcgaagcggccgaagctcgagggtttcagcatcccgcggcccacctcctacaacttcgagcgctcgcagtccgtgcagcggctctaccgtccgaccgatgacccagacctcgacgacatcgccttctccgacgacgccccctcagatgcccaagccagcaccgcggtagaaggaaaggccgagaatgaggaggagatggacccgctcgacgccttcatggccgagatccaggaggagatccgtgcgccgcccccgccgcccaagcccgaggcgcttcgccgcacggattccgacgatgacgaggatgaccccgtcgagagcttcctgcgggccaagaaggacgctggcctcacgctggccgccgacgtcatgcgcgctggttacgactccgatgaggaggtctacgccgctgccaaggccgtcgacgccggcatgatggaatacgactctgatgacaaccccatagtcatcgacaagaagaaaatagagcccataccagcactcgatcactcgaccattgagtatgacgccttcacaaaagatttctacgaggagaagccatcgatttcaggtatgagtgaccaagaggtaacagattatatgaaaagtttgtcaattcgtgtttctggttttgatgtgccgaggccaataaaaaactttgaggattgtgggtttcatgtacctctaatgaatgctattgccaaacaagcttatgaaaaaccaactacaattcagtgccaggctttacctattgtactttcagggagagatatcattggtattgcaaaaactggctctggtaaaactgcagcttttgtgctccctatgattgttcatattatggatcagcctgagcttgagaaagaagaaggtccaataggagtcatttgtgctccaacaagagaattggcacatcagatatatctcgaagctaagaagtttgcaaagccttacaaccttcgagttgctgctatatatggtggtgtttccaaatttgaccagtttaaagaactgaaagcaggttgtgaaatagtcattgcaactccagggagattaatagacttgctgaagatgaaggcattgaagatgttcagggcaacttatctggttcttgatgaagctgatcgaatgttcgatcttggatttgagccacaaatacgatccattgttggtcaaattagaccagatcgacaaactttacttttttctgcaacaatgccatacaaagtagagcgtttggcaagagaaatattaactgatcctattagagttacagttggtcaagttggcggtgctaatgaagacattaaacaagttgttaatgtactcccttctgatgttgagaaaatgccttggcttttggggaaattgcctggaatgattgatgatggagatgttcttgtatttgcatctaaaaaggctagagtggacgagatagagaaagagttgaatcagagaggattcagaattgctgcgcttcatggcgacaaggatcaagcttctcgtatggagaccctgcagaagttcaaatctgggacatttcatgttctggttgcaactgatgttgctgcacgaggtcttgacatcaaatcgattaaaacagttgtcaactttgatattgcaaaagagatggatatgcatattcaccgaattggaagaactggtcgtgctggcgataaagatggcactgcatatactctgattacacagaaggaggcacattttgctggtgaactggttcacagtttgattgctgctggccaggatgtacccaatgaactcatggatctggctatgaaggatggaagattcagagcaaaacgagactccaggaaaggtgggaagaaaggtggcaaaggaaaaggtggtgttggcggtgctgggcgcgggcgcggtgtgcgtggagttgattttggcctcggcataggttacaatgccgaatctggttcacaagtgcctgctgcaagatctgctgctgtaaattctctgaagacagggatgttgcaacgatttaagagcagctttgtctctggatcttcaaatacaccaagcagcagtgcaccttcctttgtaagaccagcactccgtggctttgtgtctggcggcaccattggaggagacacacggcctgcacaggcagcccccactttcatccctgcatcccggcctgcacagcctgcccccgcggtccctgcatcccagcctgcaggaaataacaacgaaaatgggaacccgaatccagaaaggtagtagttcacgggatcagttcagggagagaaaacgaccatcaggttgggatcgctagtccctgctaactgaggctaatgtcaggacatttcagggtagtggagtgggcgatggtatactttgagttgcagtgcagtaattttgtttgggcccaaacaatggcggtggcatattattagtgccaggtgacttttttttgtcttgtattttgttccttcgggatgaacaaccgttgaagaagtttcgtccaatattcagcgacttgacggaagatgtgtatagaac

SEQ ID NO: 209306 - DNA, 2543 bp, Zea Mays
gttccattacagtctacaacaacaacaaccaagtcattctcgtgaccaaaaattgcttcacctgctcccgtatgcatgatactcgggagattttccgggcagaagaggaaatcctgacaagtagtgcgttccttgctcacaggccctcgttgtgtcatgtaactgcaaatggctcgccaaactagcgttacagaagctgacctggagttcatgctaattgatgaaaatgcaaagccgaagcccctgccttattcacttctcgaaaagatcacaaatggtttctccggggcacatattattgggtatggtggatctgcagatgtttatgagggattcatcgggaatcacaaaatcgctgtgaagaggttgcgcataccatatcagcacgagaaggaattcagtcaagagattgaatgcctgatgaaggtgaagcacataaatgtcgttaggtttataggatattgttccgacacgcaagggcaggcggaaaagtatgaagataatcatgtcatggcagacagccaagaacggttaatttgttttgaatttctaccagcatgtcttgataaatacatcaaagatccatcatgttcacttgaatggagacagcgctatcaaataatcaacggagtttgtcagggcttacatcaacttcatgagcatgaaattcttcacttggatctgaatccgagaaatatacttctagacgatgacatggtcccaaagatttctgattttggcatctccaagtgcttgaaaaaaaaccaaggccacttttatactgaaactataagtggaacaccgatatatatgtcaccggaacggggcaaacatggtccaatcacaacgaagtctgatttgtttagtcttggtgtcacagttatcgagataatgacagggaacaaggagaacattgatcaagccactgttgaagatgtatttgctagctgcatcaaaattttcaatgataaatcattgacagctgcacaagtgcggcagataatggtatgtgctgagatagggattaagtgccgcaacagtgaaccagacaagagaccatcaaatacaaaggaaataatcgataagcttgaagaggaagcaaggacagaggaatctcaagagtctggcaagctacttaaggtcctaccaaccctactcctgtttgatttgcatcccgggaaattgatcccatgctcactgcagctaacaaacgacacggatgaacacatggcatataagcttagtataacagagagtgtggactggtcaaagtacttcacgaccaagctgccgctatatggcattgtgcaggcgcgatccacttacactgtcattctgacagtgttgttggagtgtgatgctccggtcattaacagatcttgttatatgaccctgcagagctgtacactggcatatgagtacatctggaagttcaataacacacttgagtttgaggattttcttgaggttaagaaaacagagaatgcggtgaaggaagtgaaactgaaagcatttttgtgtgaggaaggacgatcaatttctaagcaaacgaggccgcgcgtcaagctcttgtccatagtgaaaccacaaacacctctgttgtcattggatgcacacccgaccaagccctgggtcataactggtcatgcctttggacatgttcgcatttggaaccatgagacacagaagctactgtattcgtttaaactatctctgggaccagtttattctgtcaaatttattgcacggaagcaatggttcgtctccagctctgcagaaggcctcatacatgtctacagtatggaaacaaaaatgcagaaggtcaagagttacagagctcatgacggcgtcagcatatcgctggccgtgcatccaaccctaccatatgtgctgtcatggccttgttcgggcccccacgagaagaagctatggaactgggaaaagggatgggactgcacacaaacatttgagagggagtacgttgcaaggaattttgtatgtcaagttgcttttgacccaaaggagaccaacagatttgctagcgcttcgaactatagggttaaggtttggagcgttgatcttcccaaatgtaactataatctgcctggtttttttaacgaagtgaacttcctggaattcttcacacgtgatgatcaacagtatttgattattactgtctctcatgataagactgcaaaaatatgggacatgcggaacaagaaatatgtttatgatagtatggaacaaaatttgatgtctcccgtgtcttctgtcttctcacatcccaatctgccgatactacttacacgttcaattgatggcacttctcatttctggagtcccaaagatttcaggtttgaggcagtccttgactgtcgttatggaggacatgtatggggcattgcatgtttgatgggatcaaaaagaaggtttgtaattggacaagaaactgcattaacaatcctggatgttggtgaccaagaatgccaggacatgagacaagaaggcacaagttctgaggctgtgatcatgtggaaatatgg

SEQ ID NO: 209307 - DNA, 3526 bp, Zea Mays
gtcacggctgtttatgcaaaagtttgagagggaaggtaatgagttaagacgtgtaattgaagataaccaaaagggaagccatcctgtggataaggatttgcacacttctagacataagcatgtacatcagaagctgtggaaacagaatctgagtcaccgtcactcaggcaatcaggatttggagaaatcagcagaccagaattgtctaaataaagatgtggagatcgaggaaggagaattgattgaagaggaccataataatatcatttataaaagcaagcttaagcaggaaaatgttgtactgaaatcagttattgaaacaagttcagcagagcagttacaggtgaataatgcaacgtcgaaggatgctacctgcaacaacagagctacaagagaatctgatgagaaacacattcttgaggctgctaaatgtttctctgtgtttatgtattcaagtttatctcttcatactctgaatgccatcatctccagagttctttttattattatgcagcaattgtgtttttccccgattaagccagtcacatacaagttgcagtctgcagttagttgttgccttacccactctgtcaggctaatatatctgtctgagtcagagagaagaacggacatttgccctctcgtcagaaggcgaacacgcgagcagctccattgccaagagaatttggagaacgctgagacgacacgatcgtgcccactgcccacgagaggagttgccgcctgtcaaaggctggaagcggggacttgtggggaagatgggaagccgccttcaactcctgcagacagaataacagaaatatcgaacgacgtacacactccagctccgacaccgtcatccgtcaagtcgtcaactgacagtgcactcggcggtggttcgaacgccgaaccgacgtggcgcgctgacgacctccaaccgtgccctcatcccagcctcccgcttccgtccctgcaaggtccaagcccggtacggcaccgcatccgagagggcagacccgtcagtccaggcccctcgtccttcactcctccttcgcctctcaaaggcgcgcctcgctccaccattcccactggcgatttgcaacagacaagctccactagagctcggccggcatccatggcgatgcggctcctgtccccgtccacgccgcccccacgcttcccgagccccggccagaaggcacccgcctccatctccgcatcgtcttcctcgtacttctctgtccgcttgcgccgcgcgcgcgcggcggctgcagcggctgcaggcgcggccgcggcgggcgggtccgaccggcgcagcggacgcttcgagggggaggcgatgagcggggcattcgacaggggcctcgcggagatcgcgaggaaggtgccgctctttgagcccacagcggacggggagctcgccgctgcggctggcgagcggccgttgcctatcaatctcgagctctggctctaccgcgtcaaagtgcacaccagaaagttcgagttccctgaagcagaaaaacttctggacaagtgtatctcattctggcctgaagacggacgtccttatgtggcgctggggaagctgtatagcaagcagtcaaggtatgacaaagctagagcggtgtacgaaagggggtgccaagcaacgcaaggcgaaaacccatacatttggcagtgctgggcagtcctagaaagcaagggtggaaatattcgaagggcacgcgagctatttgatgccgctactgtggctgatgcaaagcatattgctgcttggcacgggtgggcaattttagaaataaagcaaggaaacataaaaaaggcacggactttgttcgagcaagccagtcaatccaatccaaaaagttgtgcaagctggctagcttgggctcaggtagaaatgcgtgcaggaaacaataccatggcaagaaagctctttgagaaagctgtccaggctagtcctaaaaaccgattttcatggcatgtatgggcactatttgaggcaaatgaaggtaacattgacagggcaaggaagttgcttaagattggacatgctgtaaatcctagggaccctgtaattctacagtcactcgcgctactggaatacaacttttcatctgcgaatgttgctcgtgtgttattcagaaaagcgtctcagattgatccaagacatcagccagtttggatagcttgggggtggatggaatggaaagaaagaaatgcaagaacagcaagagctctctatcaaagagctttgtcagtcaattcaacaaatgaatgtgctgctcgttgtcttcaggcttggggagtcctagaacagcgtgctggtaactacacggccgctagacgattgttgaggtcttcactgagtataaactcccaaagtgaggtgacatggatgacatgggcagcacttgaggaggaacagggggatccagttcgagctgaagaaattcggaacctttactttcagcagcgtactgaagttgtggatgatgcatcctgggtcataggcttcctcgacatcatcgaccctgccctagacagcgtgaagaggctactaaacctggatcagccttctagaccggcgaggcaagatgatgttaaaagcacaacagaaccgtgtcctcccactgccaagtcttcagaaacttctgcgggcaatgatgctcgtaacaacgggagcgaagcaatggggactctaacaagtgatttcgatttggatgctttcatcaagaagaggctggccctcgacccatcggagctggatgccgtgctcgagggctctgacccgaggggtgttgtttctcagaggaggaaacagcggctgcccaggaagccactccctcttctccctgtcccgtaaattttccagatcggtctgtctcatttccattccaccggtaaaatccataagggctagtttgtttgagactccatttttttccaagtgttaaaaataaaaatcccttgaaaaaaatgaggttatcaaactagccctaaatccctaactgtagcagcctgcaatacgtgaatatgtgtgaggactaaggagatgacgtcccctgccgctgccatagcaatcaccacacctgttaattgtcattccagccacgtgtatgtaattctgccaccatttgttagtaaagtctagctctgtacataaattagactctttttgtctacataatatcgccggactaagttatcgagaagtattttgacaatggtagtgccattacttcaacaccttagagcatccaagaaaatatgtaaaaggttcccaaaaccatttttgacggcgaaacaccatcttcattcactccaacagtacctctttccgtccccgcaaattttggcgacccgcaaaccagggctggcgttccgtagatatgcgcgaggaaaatactcccccgatcgcctgcgcgcgaatcatggagagttctcatgtcctgctttctttatggttcccgcgtcttccttttggttcccgcgtccttcctacttcgtgagtttctgcgaggcggtg

SEQ ID NO: 209308 - DNA, 6725 bp, Zea Mays
cggcaatctgggcacccactgccactagcctgaatgcccccacaagttctagggttttaggtccaaggtttttgtgcaaccttcgtccgcgcgccaccaatttcttagcaattagtacctcacacgtgctccctctgctgctgcgccgctctatggctgacccattggacgcggccgccgccttcggtgtatccaccaacgacaacaatgtcgacgacgtcgaggacctttacgcggacctcgacgagcaggtcgccgccgcgctcgctgccgcaggggagagtggcggctcaaacgcgagggattccgaccccctcaccgacggcgagggggagttcccggagcccgacgagaacgaggcggtggatttgggcgacgggaccgagggctacagcagcagcgatgatgagagcgatgatggccttcgcatcgtgctgaacgaggacaccagcgcgccactgccgccgccccctgtggggcgcggcgagggatgcgtggctgaggatgaggagggagatgatacgagcaaccgtgtgaaggtttcatctgttaacgatggcgggtgggcaacggttggtgggctccagtgcaaggggtttgttgagaaaacgacattacccatcatggggcaaatcgatcggcatgtgtttcggcgtgattataattttttcttgtcaagaaacagcacaattttcgacatagacattgaagcgtttcaactgaagccttggagacagcaaggagcggatcttactgactactttaattttagtctggatgaagaaggctggagaaagtattggtgtagcatgaagcaattaaggttaggggctagatcacttgtaaatgaaacatcaggattggagcaggaatcatacaaattgaaatctgcgaaagcaatgtccaacgtagcaaatgattctggatctgaaggaagaaatgacattggcaagccaaaaggtagagcaatccatgttgaaggcagtgcgtgcgaacgtgttccttcagcagacttgtggcgtccaatacaaagggattcagatgttgtgattcaagtaaacatgacactttcaccatcaaatcagtccacttcggatgacagctcaaagttaaatcacaagggtgtggctactgaaagggtgtttgataaggaagtttatgatggaggttcctcagagggtgttgggagcaaactggacagaagagattcttattttgcacgtgaccaatctcctagccctgattattctgatgtactttctggagaatcaaaagaaaatcactattttaagagatccaatagacattcagatttcagggacttctttgaagccaccaaacttcaggatgagcatgtcaaatctgatttttattgctatccaagtaagccagacagagaaaatagtgaaagctgcagacgtggttataccccttctactgatgatagaaacatggcatctaaacttctgtggatgggtgaagctcctttcactgggcgaggcaagtctggtgatctttttttgggtcacaacagcgaccgtgacttcaaatctcgacataaagcaagaaaaggacagaggagacagagtttagatgacagaaggaatgctatatttgttgaaaaagaaaaaccaacagatagctatcatagtacgtgtgataggaagttcgtgaagagaagatctagctcatcttccctgaggaccaactatcacaattccgtttgcaatcaatcttatgagcagcgttattcacctcttgaaaaaaaagctctgaaaaacgatgagcattactttagcgatgagtctaattaccaccataggcagtctttgtcatgtgacatcaatgaaggagatattgacaagtgcttctcttcagcgaaggagtggcaacgagatggtgaccatatataccattcaatggtaaaaactgatatgcctgatgctaatgatggacgcatgtacagagataggtatagtccggaaaagaaaatagccagacatgaccatagcatggatgttgaattttcccattacactgattacagattttgcgagtggcggagtctggaggtaagaggcagatacagagataaaggaaaatttgccaaaagcaatgatgggcatttcagacatgctaaccatctcgagttgtattctggcctcaacaattttgagagggacaaacctgctactggcttccctgttatgagctcaagaaacagatgcatcgataacaaagaagtctgcaatgctaagatgacacaaaataattgccatgggtatcatcaaaagaacaagcaacatgattcatcattttgtattggcaacattcctcgatatgctttgcgcactgatacttatgctgaaaagggccattttgttctgccaattaagaggaagctttattctgatctgggttccatggaccaaaggactcttgctgatttgccacttctgaaaggaagattgatgcatggccaatccattgccagtgacaggaggatttatgctttgaagctgcataagtcgacaaagaaaattaatacagaagccatttgtagttccagtgatatgagaaatattaatactctttcaaacatttgtgttggcagaagacatgagctggataatgctgataacatccacttgaatgatagaaaaataaagtttgagagggaaggtaatgagttaagacgtgtaattgaagataaccaaaagggaagccatcctgtggataaggatttgcacacttctagacataagcatgtacatcagaagctgtggaaacagaatctgagtcaccgtcactcaggcaatcaggatttggagaaatcagcagaccagaattgtctaaataaagatgtggagatcgaggaaggagaattgattgaagaggaccataataatatcatttataaaagcaagcttaagcaggaaaatgttgtactgaaatcagttattgaaacaagttcagcagagcagttacaggtgaataatgcaacgtcgaaggatgctacctgcaacaacagagctacaagagaatctgatgagaaacacattcttgaggtaatggaaaagatgcaaaaaaggagggaaaggttcaaagaggctattgcaccaaaaaaagaagtcggtgacaagaaagacctatcggctttagcatgcagtacagatttcatccagaatcaacggcctgctaggaaacggcggtggggtggtaattgttggatgctggaaatgccttgagagtttgtccgtgatggtttcttcaacaaggtgttctgcttatgttgctcaaaacattttactgttatgtttacttattctgatggctgggttggggaaacaaaatatagaaagcatattcttcaggcacttttatagatatagtatcttgcatagtttaagagtaaaaaggttcgacttcaaatgtaacgtgtttgtggggttctttcaaaccactggagatgatttactatcccctaagatgagatttaaatggtttcctttctgcaggctgctaaatgtttctctgtgtttatgtattcaagtttatctcttcatactctgaatgccatcatctccagagttctttttattattatgcagcaattgtgtttttccccgattaagccagtcacatacaagttgcagtctgcagttagttgttgccttacccactctgtcaggctaatatatctgtctgagtcagagagaagaacggacatttgccctctcgtcagaaggcgaacacgcgagcagctccattgccaagagaatttggagaacgctgagacgacacgatcgtgcccactgcccacgagaggagttgccgcctgtcaaaggctggaagcggggacttgtggggaagatgggaagccgccttcaactcctgcagacagaataacagaaatatcgaacgacgtacacactccagctccgacaccgtcatccgtcaagtcgtcaactgacagtgcactcggcggtggttcgaacgccgaaccgacgtggcgcgctgacgacctccaaccgtgccctcatcccagcctcccgcttccgtccctgcaaggtccaagcccggtacggcaccgcatccgagagggcagacccgtcagtccaggcccctcgtccttcactcctccttcgcctctcaaaggcgcgcctcgctccaccattcccactggcgatttgcaacagacaagctccactagagctcggccggcatccatggcgatgcggctcctgtccccgtccacgccgcccccacgcttcccgagccccggccagaaggcacccgcctccatctccgcatcgtcttcctcgtacttctctgtccgcttgcgccgcgcgcgcgcggcggctgcagcggctgcaggcgcggccgcggcgggcgggtccgaccggcgcagcggacgcttcgagggggaggcgatgagcggggcattcgacaggggcctcgcggagatcgcgaggaaggtgccgctctttgagcccacagcggacggggagctcgccgctgcggctggcgagcggccgttgcctatcaatctcgagctctggctctaccgcgtcaaagtgcacaccagaaagttcgagttccctgaagcagaaaaacttctggacaagtgtatctcattctggcctgaagacggacgtccttatgtggcgctggggaagctgtatagcaagcagtcaaggtatgacaaagctagagcggtgtacgaaagggggtgccaagcaacgcaaggcgaaaacccatacatttggcagtgctgggcagtcctagaaagcaagggtggaaatattcgaagggcacgcgagctatttgatgccgctactgtggctgatgcaaagcatattgctgcttggcacgggtgggcaattttagaaataaagcaaggaaacataaaaaaggcacggaacctacttgggaaagccctgaaatattgtggaggaaatgagtatatttaccaaactcttgctttgcttgaagctaaagcagagcgctttgaacaggcacggactttgttcgagcaagccagtcaatccaatccaaaaagttgtgcaagctggctagcttgggctcaggtagaaatgcgtgcaggaaacaataccatggcaagaaagctctttgagaaagctgtccaggctagtcctaaaaaccgattttcatggcatgtatgggcactatttgaggcaaatgaaggtaacattgacagggcaaggaagttgcttaagattggacatgctgtaaatcctagggaccctgtaattctacagtcactcgcgctactggaatacaacttttcatctgcgaatgttgctcgtgtgttattcagaaaagcgtctcagattgatccaagacatcagccagtttggatagcttgggggtggatggaatggaaagaaagaaatgcaagaacagcaagagctctctatcaaagagctttgtcagtcaattcaacaaatgaatgtgctgctcgttgtcttcaggcttggggagtcctagaacagcgtgctggtaactacacggccgctagacgattgttgaggtcttcactgagtataaactcccaaagtgaggtgacatggatgacatgggcagcacttgaggaggaacagggggatccagttcgagctgaagaaattcggaacctttactttcagcagcgtactgaagttgtggatgatgcatcctgggtcataggcttcctcgacatcatcgaccctgccctagacagcgtgaagaggctactaaacctggatcagccttctagaccggcgaggcaagatgatgttaaaagcacaacagaaccgtgtcctcccactgccaagtcttcagaaacttctgcgggcaatgatgctcgtaacaacgggagcgaagcaatggggactctaacaagtgatttcgatttggatgctttcatcaagaagaggctggccctcgacccatcggagctggatgccgtgctcgagggctctgacccgaggggtgttgtttctcagaggaggaaacagcggctgcccaggaagccactccctcttctccctgtcccgtaaattttccagatcggtctgtctcatttccattccaccggtaaaatccataagggctagtttgtttgagactccatttttttccaagtgttaaaaataaaaatcccttgaaaaaaatgaggttatcaaactagccctaaatccctaactgtagcagcctgcaatacgtgaatatgtgtgaggactaaggagatgacgtcccctgccgctgccatagcaatcaccacacctgttaattgtcattccagccacgtgtatgtaattctgccaccatttgttagtaaagtctagctctgtacataaattagactctttttgtctacataatatcgccggactaagttatcgagaagtattttgacaatggtagtgccattacttcaacaccttagagcatccaagaaaatatgtaaaaggttcccaaaaccatttttgacggcgaaacaccatcttcattcactccaacagtacctctttccgtccccgcaaattttggcgacccgcaaaccagggctggcgttccgtagatatgcgcgaggaaaatactcccccgatcgcctgcgcgcgaatcatggagagttctcatgtcctgctttctttatggttcccgcgtcttccttttggttcccgcgtccttcctacttcgtgagtttctgcgaggcggtg

SEQ ID NO: 209309 - DNA, 2846 bp, Zea Mays
ggtttgttgagaaaacgacattacccatcatggggcaaatcgatcggcatgtgtttcggcgtgattataattttttcttgtcaagaaacagcacaattttcgacatagacattgaagcgtttcaactgaagccttggagacagcaaggagcggatcttactgactactttaattttagtctggatgaagaaggctggagaaagtattggtgtagcatgcttagtacaccactttttgtgcagaagcaattaaggttaggggctagatcacttgtaaatgaaacatcaggattggagcaggaatcatacaaattgaaatctgcgaaagcaatgtccaacgtagcaaatgattctggatctgaaggaagaaatgacattggcaagccaaaaggtagagcaatccatgttgaaggcagtgcgtgcgaacgtgttccttcagcagacttgtggcgtccaatacaaagggattcagatgttgtgattcaagtaaacatgacactttcaccatcaaatcagtccacttcggatgacagctcaaagttaaatcacaagggtgtggctactgaaagggtgtttgataaggaagtttatgatggaggttcctcagagggtgttgggagcaaactggacagaagagattcttattttgcacgtgaccaatctcctagccctgattattctgatgtactttctggagaatcaaaagaaaatcactattttaagagatccaatagacattcagatttcagggacttctttgaagccaccaaacttcaggatgagcatgtcaaatctgatttttattgctatccaagtaagccagacagagaaaatagtgaaagctgcagacgtggttataccccttctactgatgatagaaacatggcatctaaacttctgtggatgggtgaagctcctttcactgggcgaggcaagtctggtgatctttttttgggtcacaacagcgaccgtgacttcaaatctcgacataaagcaagaaaaggacagaggagacagagtttagatgacagaaggaatgctatatttgttgaaaaagaaaaaccaacagatagctatcatagtacgtgtgataggaagttcgtgaagagaagatctagctcatcttccctgaggaccaactatcacaattccgtttgcaatcaatcttatgagcagcgttattcacctcttgaaaaaaaagctctgaaaaacgatgagcattactttagcgatgagtctaattaccaccataggcagtctttgtcatgtgacatcaatgaaggagatattgacaagtgcttctcttcagcgaaggagtggcaacgagatggtgaccatatataccattcaatggtaaaaactgatatgcctgatgctaatgatggacgcatgtacagagataggtatagtccggaaaagaaaatagccagacatgaccatagcatggatgttgaattttcccattacactgattacagattttgcgagtggcggagtctggaggtaagaggcagatacagagataaaggaaaatttgccaaaagcaatgatgggcatttcagacatgctaaccatctcgagttgtattctggcctcaacaattttgagagggacaaacctgctactggcttccctgttatgagctcaagaaacagatgcatcgataacaaagaagtctgcaatgctaagatgacacaaaataattgccatgggtatcatcaaaagaacaagcaacatgattcatcattttgtattggcaacattcctcgatatgctttgcgcactgatacttatgctgaaaagggccattttgttctgccaattaagaggaagctttattctgatctgggttccatggaccaaaggactcttgctgatttgccacttctgaaaggaagattgatgcatggccaatccattgccagtgacaggaggatttatgctttgaagctgcataagtcgacaaagaaaattaatacagaagccatttgtagttccagtgatatgagaaatattaatactctttcaaacatttgtgttggcagaagacatgagctggataatgctgataacatccacttgaatgatagaaaaataaagtttgagagggaaggtaatgagttaagacgtgtaattgaagataaccaaaagggaagccatcctgtggataaggatttgcacacttctagacataagcatgtacatcagaagctgtggaaacagaatctgagtcaccgtcactcaggcaatcaggatttggagaaatcagcagaccagaattgtctaaataaagatgtggagatcgaggaaggagaattgattgaagaggaccataataatatcatttataaaagcaagcttaagcaggaaaatgttgtactgaaatcagttattgaaacaagttcagcagagcagttacaggtgaataatgcaacgtcgaaggatgctacctgcaacaacagagctacaagagaatctgatgagaaacacattcttgaggtaatggaaaagatgcaaaaaaggagggaaaggttcaaagaggctattgcaccaaaaaaagaagtcggtgacaagaaagacctatcggctttagcatgcagtacagatttcatccagaatcaacggcctgctaggaaacggcggtggggtggtaattgttggatgctggaaatgccttgagagtttgtccgtgatggtttcttcaacaaggctgctaaatgtttctctgtgtttatgtattcaagtttatctcttcatactctgaatgccatcatctccagagttctttttattattatgcagcaattgtgtttttccccgattaagttgcgtgtttgcagtatggtt

SEQ ID NO: 209310 - DNA, 4748 bp, Zea Mays
gctgcccgtagaaggtcctgaggccctgacagttagattttgcaaaagtcattggagtgcctccctcacccccccccccccccccccccatcgtcttccatcctctacacagacaaacaacacctaaagcaagcggccaggccacgtagtgcacaagagcaacagcaagaaccaagcccttgctttcagttcagtaaaaccagatccgaagctacctaccgtccatggacaggatggtaaatgggtaaccagcagcagacaggagcacaacgcaaggccctcttgcgctttcgtatgctttccatttttcttgtgcttgcccctccttgcaagaagcacccttttcgctttgaatcttccaccaaggccgccaaagctaggcccgttcaaacgaaaaggatctgcaccgagtttcaatagcttcctttcctcacgcttctccgtgtaggatgctatgcatgctaacacccaatgctttgcccgctagctttggtgcagaacacaaagaaggggggtggagggtgaatcttgaagcattggagagggtttctggatggaatccaacggccgggggtggtttcctggtcatggtccaaggatggcattttaccagcgccaaagctgaaagatcaatttattcagtggtgagcacttagatgcagaaaacaagatgaataattgtaaagcgacgctaagatccctgcttgcgaagtgggcaagggagcccacaagatcgtcctactagtcctagctgcaagaaagaaaatgacgatgcacgggttaaagtaacaatacagttggtttcaaaaatggcacggctatttcttcttctggtcatagtttcttgcgagagttatctactagtaaagacaacgcacaagtacagaacaaaccaactttaccaaatattgcgttgcagttgcagctaaccacagataatttaatctgaaacaagtaatgtaaaattgatactgctacaacttagagcatgccatctaatctacttaggaaaacgactcgtcgtggcatgtatgagtcttacgtctcttttattcttaatataatgatgcgcacctgtgcgttagagaaaaaaaataactgtccatatccatctaggtaattgatacaagaaaaaactgcaaattatggtggaaaacatcagtttttagagtgagcaaaagtagctctacattcaattcttagtttcccaacatgtgctttgtattcccatgaaaactcataagtagctttaatgagaacaactgcataattgtctgaagttttatgaatgaatcggcagcttttttccccccctctattgtctgttccttcttgaagttgatttgtcgtgatgctattttcagtcttaaagagtagtttagactgagaaccgtaccaccttaagaaaaactgtagctggtgggcaaacggaaagaagttcaacaaaaggaaaaggtaaaaaaagagaaagtacagtatgttcaaacggacctccgtacccttgcttctgtgaaaagcgagcggtctgttcggccttggcttgtccacacctgcaaatatgcaaccagatcatctgataaaaccataataacttcaattggggtgaaatatcgtctggaatgtaatgtttccctgccttgaaaaagagagcaagcaaacttcattgactcttgatcggtctcagtggaagttcgtctgcattaaatagattgtcacataggaatttttgttgacatgacaatatattttaagaaaagagaagaaatgatgaaactcttttgctaggattatcaactccttttgagtcataaaattaaatgcctatgaaagtatagaatgaaactttctattgatggtgcatgttcctaagctaacaaaatattatcatcaagtgctcgcaagaaaaaacaaaatatattttcaggcaggaaacaagaccagagcaaagcattccttcttggcgtttgagaaatggaagcagcgaagaaccctcggggatggtgaagcggaacagtggtttgtcctggagcatctgcactgaactggacgcccccgtgcgatgttagtcgcttgtttcattggtgccagctaagtagcgatggctgaagaagccagaccacgcttcccaccttccctaaaagccatggctactcggctaggcattccatcgagcagatgggcggcgctcctatatgaacagaggcgcacaatgtaggatcggcaatttgcatcggcgaggctgcggtggctgagaacaatcgcagcaaatggaactgggatcggagcgatggatatcgtcgatgtagattcctgcgccgaggaatttgcgtgggaattcggaaatgcagaggccggactggaggcccagctgcagagcagacgcgttttttgtgcggaagaagccgcaccgcatgtaaacgccctctccatctacccgcccacgtgtccgattccgatctgacggaccggatggaagcaccggaactgccggcccagccggtcgactttgaaggcgaaaacgcggaagagaaagagaggacagaggagcccgcttcaggcttcaggcttcaggcggacacatccctcgcctcaatagctccgccgctggcgattagtgaagagagctccgaggtggtatcccttgtatcgcatagattccggactctagtcgtcgcggttctcgcaaggtccgcggatccgcgccccgctctggatctccgcttgatttgttgttctggaaggtatggcacgaaacttgaccgacaacaggaccagaaatacactagttatgattgtgatttttggtctctgttccttcttctatctcttgggtgtttggcagaaaagtggttctggaggaggagacgggatacagacttgggtcaatgaacagaccaaatgtgcacaacttccaaatctgagttttgagacccaccatagtgcatccaaccttctgaatgatactgataattccaaaattgaaccattcaagccatgtgatgagcaatacactgattacactccttgtgaggagcaaagtcgtgcaatgaccttccctagagataacatgatctatcgggagaggcattgtccaccggataaggagaagctttattgcctgatcccagcaccaaagggctatgttgcacctttccgatggccaaagagccgtgattttgttcattatgctaatgtaccacacaagagtcttactgttgagaaggctatccagaactgggtgcactatgagggcaatgttttcaggtttcctggtggcggaacacagtttcctcagggtgcagataaatatatagaccagcttgcttctgtcatcccaatagctgaaggaaaagtgagaactgcactggatactggttgtggggttgccagtttgggagcttacctgtttaagaaaaatgtgttgaccatttcatttgcaccacgggataatcatgaggcacaagtacagtttgcattggagagaggtgtccctgcatatattggtgtccttggatcaataaagctgccatttccttctcgtgcctttgacatggcccattgctcgagatgtttgattccatggagtggaaatgatggtatgtacatgatggaagttgacagagtattaaggcctggcggatattgggtgctgtcaggcccgcccattggctggaagatttattatgaggggtggcaacattctaaggaagatcttcagaatgagcaaagaaaaatagaacaattcgcacaacttctttgttggaagaagatatctgagaaggatggtattgccatatggagaaagagattaaatgacaagtcttgctccatgaaacaatataatccaaaaggtgtaaaatgtggtttgacaagtgacagtgatgtatggtacaagaagatggaagtttgtatagaccccctacccaatgttaatagtgtatctaaggttgccggtggtcaattagagccttttcccaagaggctctatgcagtacctcctcgtataacccttggttctgtgcctggtttctcagttcagtcatatgaagaggacaataaactttggcagaaatatgttgaggcttacaagaataccaataatttgcttgatactggaagatatcgcaatataatggacatgaatgctgggttctctacttatccaaggacatatgaccttatacattctaatggcatcttcagcttgtaccaaaacaaatgtcagtttgaagatatactcctggaaatggacagaatcttacgcccggagggtgcagtcataattcgtgacaaggttgatgttcttgtaaaagtggagaaaatagccaatgccatgaggtggaagacaagattggctgatcatgaggtcacagagatgcagaagacatgccaaaaggatcaattgaccttgcactagtgactcatatctgatcggacagatgcagctgcttataattggaaccctgcagcagtccaggaagttatgaactagcagtggacttacagttttgtataggatactcatttacctctacacgcacctcttttttttgttgttgtatctcagaatctcatcaaatggattgcatgtggacctataaggtctttttcggtgttaaatattgcataattcaccatatgatgattcgtgtggtaggtttatttgtaataaactcgaaggaataattgtgatggtgtatagaacaaaggacacaagatttaaatatatccatgcagccaaatcgttg

SEQ ID NO: 209311 - DNA, 4990 bp, Zea Mays
gctgcccgtagaaggtcctgaggccctgacagttagattttgcaaaagtcattggagtgcctccctcacccccccccccccccccccccatcgtcttccatcctctacacagacaaacaacacctaaagcaagcggccaggccacgtagtgcacaagagcaacagcaagaaccaagcccttgctttcagttcagtaaaaccagatccgaagctacctaccgtccatggacaggatggtaaatgggtaaccagcagcagacaggagcacaacgcaaggccctcttgcgctttcgtatgctttccatttttcttgtgcttgcccctccttgcaagaagcacccttttcgctttgaatcttccaccaaggccgccaaagctaggcccgttcaaacgaaaaggatctgcaccgagtttcaatagcttcctttcctcacgcttctccgtgtaggatgctatgcatgctaacacccaatgctttgcccgctagctttggtgcagaacacaaagaaggggggtggagggtgaatcttgaagcattggagagggtttctggatggaatccaacggccgggggtggtttcctggtcatggtccaaggatggcattttaccagcgccaaagctgaaagatcaatttattcagtggtgagcacttagatgcagaaaacaagatgaataattgtaaagcgacgctaagatccctgcttgcgaagtgggcaagggagcccacaagatcgtcctactagtcctagctgcaagaaagaaaatgacgatgcacgggttaaagtaacaatacagttggtttcaaaaatggcacggctatttcttcttctggtcatagtttcttgcgagagttatctactagtaaagacaacgcacaagtacagaacaaaccaactttaccaaatattgcgttgcagttgcagctaaccacagataatttaatctgaaacaagtaatgtaaaattgatactgctacaacttagagcatgccatctaatctacttaggaaaacgactcgtcgtggcatgtatgagtcttacgtctcttttattcttaatataatgatgcgcacctgtgcgttagagaaaaaaaataactgtccatatccatctaggtaattgatacaagaaaaaactgcaaattatggtggaaaacatcagtttttagagtgagcaaaagtagctctacattcaattcttagtttcccaacatgtgctttgtattcccatgaaaactcataagtagctttaatgagaacaactgcataattgtctgaagttttatgaatgaatcggcagcttttttccccccctctattgtctgttccttcttgaagttgatttgtcgtgatgctattttcagtcttaaagagtagtttagactgagaaccgtaccaccttaagaaaaactgtagctggtgggcaaacggaaagaagttcaacaaaaggaaaaggtaaaaaaagagaaagtacagtatgttcaaacggacctccgtacccttgcttctgtgaaaagcgagcggtctgttcggccttggcttgtccacacctgcaaatatgcaaccagatcatctgataaaaccataataacttcaattggggtgaaatatcgtctggaatgtaatgtttccctgccttgaaaaagagagcaagcaaacttcattgactcttgatcggtctcagtggaagttcgtctgcattaaatagattgtcacataggaatttttgttgacatgacaatatattttaagaaaagagaagaaatgatgaaactcttttgctaggattatcaactccttttgagtcataaaattaaatgcctatgaaagtatagaatgaaactttctattgatggtgcatgttcctaagctaacaaaatattatcatcaagtgctcgcaagaaaaaacaaaatatattttcaggcaggaaacaagaccagagcaaagcattccttcttggcgtttgagaaatggaagcagcgaagaaccctcggggatggtgaagcggaacagtggtttgtcctggagcatctgcactgaactggacgcccccgtgcgatgttagtcgcttgtttcattggtgccagctaagtagcgatggctgaagaagccagaccacgcttcccaccttccctaaaagccatggctactcggctaggcattccatcgagcagatgggcggcgctcctatatgaacagaggcgcacaatgtaggatcggcaatttgcatcggcgaggctgcggtggctgagaacaatcgcagcaaatggaactgggatcggagcgatggatatcgtcgatgtagattcctgcgccgaggaatttgcgtgggaattcggaaatgcagaggccggactggaggcccagctgcagagcagacgcgttttttgtgcggaagaagccgcaccgcatgtaaacgccctctccatctacccgcccacgtgtccgattccgatctgacggaccggatggaagcaccggaactgccggcccagccggtcgactttgaaggcgaaaacgcggaagagaaagagaggacagaggagcccgcttcaggcttcaggcttcaggcggacacatccctcgcctcaatagctccgccgctggcgattagtgaagagagctccgaggtggtatcccttgtatcgcatagattccggactctagtcgtcgcggttctcgcaaggtccgcggatccgcgccccgctctggatctccgcttgatttgttgttctggaaggtatggcacgaaacttgaccgacaacaggaccagaaatacactagttatgattgtgatttttggtctctgttccttcttctatctcttgggtgtttggcagaaaagtggttctggaggaggagacgggatacagacttgggtcaatgaacagaccaaatgtgcacaacttccaaatctgagttttgagacccaccatagtgcatccaaccttctgaatgatactgataattccaaaattgaaccattcaagccatgtgatgagcaatacactgattacactccttgtgaggagcaaagtcgtgcaatgaccttccctagagataacatgatctatcgggagaggcattgtccaccggataaggagaagctttattgcctgatcccagcaccaaagggctatgttgcacctttccgatggccaaagagccgtgattttgttcattatgctaatgtaccacacaagagtcttactgttgagaaggctatccagaactgggtgcactatgagggcaatgttttcaggtttcctggtggcggaacacagtttcctcagggtgcagataaatatatagaccagcttgcttctgtcatcccaatagctgaaggaaaagttgccagtttgggagcttacctgtttaagaaaaatgtgttgaccatttcatttgcaccacgggataatcatgaggcacaagtacagtttgcattggagagaggtgtccctgcatatattggtgtccttggatcaataaagctgccatttccttctcgtgcctttgacatggcccattgctcgagatgtttgattccatggagtggaaatgatggtatgtacatgatggaagttgacagagtattaaggcctggcggatattgggtgctgtcaggcccgcccattggctggaagatttattatgaggggtggcaacattctaaggaagatcttcagaatgagcaaagaaaaatagaacaattcgcacaacttctttgttggaagaagatatctgagaaggatggtattgccatatggagaaagagattaaatgacaagtcttgctccatgaaacaatataatccaaaaggtgtaaaatgtggtttgacaagtgacagtgatgtatggtacaagaagatggaagtttgtatagaccccctacccaatgttaatagtgtatctaaggttgccggtggtcaattagagccttttcccaagaggctctatgcagtacctcctcgtataacccttggttctgtgcctggtttctcagttcagtcatatgaagaggacaataaactttggcagaaatatgttgaggcttacaagaataccaataatttgcttgatactggaagatatcgcaatataatggacatgaatgctgggttctctacttatccaaggacatatgaccttatacattctaatggcatcttcagcttgtaccaaaacaaatgtcagtttgaagatatactcctggaaatggacagaatcttacgcccggagggtgcagtcataattcgtgacaaggttgatgttcttgtaaaagtggagaaaatagccaatgccatgaggtggaagacaagattggctgatcatgagggtggccctcttgtacctgagaagatactcttcgcggtcaagcaatactggaccgttgcaaaaacaagcagctaacattattcgtattttatttttttctccagtcacaggtaacttggtccctggatgtgtttattggggggaaaatctgccggtttgaaaatcatcatcccatgtttgttactgaaaatagaaaacaagcttacaatcaccctggaggatggtaagttatgcgggacctagttgtgaacttgtgatttgcttattccactgttgcagagatgcagaagacatgccaaaaggatcaattgaccttgcactagtgactcatatctgatcggacagatgcagctgcttataattggaaccctgcagcagtccaggaagttatgaactagcagtggacttacagttttgtataggatactcatttacctctacacgcacctcttttttttgttgttgtatctcagaatctcatcaaatggattgcatgtggacctataaggtctttttcggtgttaaatattgcataattcaccatatgatgattcgtgtggtaggtttatttgtaataaactcgaaggaataattgtgatggtgtatagaacaaaggacacaagatttaaatatatccatgcagccaaatcgttg

SEQ ID NO: 209312 - DNA, 1944 bp, Zea Mays
tttttttctccacgaacaacatgtcagcctcccaaatggccataggaaattctctcaagagaggtcttttcacacagggaaacgaactgacgtggaaatcacctggcgaggttaatttccatgggttaattagcaagtagctactaaactagcccttacatgttggtcaggtacttgagacgagatcttctgcggagcccacttctgatcggttagtttgtaacacgtaaccaagcgtgacgcgctctcactcactcactatggcgtggcgcgagcttgcataaatagtcaccgaatcgaccgcgcaattcttttcttcggatcgaatcgaacgccgacccgagtaaggcgatcgcgcggcggctgaccttccccgccgcccaccgtcgaagacatggacaccgagtaccgcgccttgcagcaggggagcccctcgccgtggcgcacggcggacggcgtgtcgtcgtggggacccgcgcagcaccagaagcgacagcgatgccagggttcttcaagcgatcaagctggttccagctcaagtagttctctgcaaatttcagaacctgaaccacaacaaaaccaagaagaagattactatgtggaggatgattgtgatgcctatgatgaagatgattatgactttgatgaagctgaatttaacctgcaccttgctgataaatttgatgatttggatcttcctccaggcgtggaggctaatgtaccatggctgcaaaaaattccacccaaggaagtagtcaagcagccacctatatcaattactgcagacgagaatgctaataaatatgacaagttcaaacagtttgatactgttcagacattctctgaccatcactatgctaagaattctcatgaagagccaaccagagcctggtcaaagagagttcaacatgactggaaacttttggagaatgatctaccagcatatatttacgtccgggttgctgaagatagaatggatcttcttagggctgccattattgggcccaagggaacaccctaccatgatgggcttttcttctttgatgttcacattccctctgcttatccttctggccctccggactatgttatactcgcttcggaggcccccagagcactttgcagaccttgttgctggccactttcgggtgcatgggcacactattctcgcagcatgcaaacactacatggcgggtaatgatattggctcagtagtgccagaggaggaggaagagtcagcatcccgcagtgcaccaaaggcaaagccaggagtgatcaggacaatccctctgaacagacgctacgcaggctcatttgatactagcttgaaggtgctgtacgaagatcttctgatggaattcaatgtgaagggtgctgacacgaggaagttcatgattgagaagttgaagaaggaccaacctgcaggcacctgagaaaagcttggacagcttaagatagtgtttggttgaagagtcaagtagaacgaagccgttctgttccagttttgttgttgtttggttacaaagtaagtagaacgaaatatctccaattagagaatattctcctcagatccggaaccatttcgctccaaaaaatcaaccgaacggagccgctccgttctcatcccgctctcacagtcacgctccattccgttcactctgcaaccaaacacagaacagagcggctccgttccagattaccaaatacagaatagagcggctccgttcctaaaatcagggatggaacggctccgttctacttggctcctcaaccaaacactacctaagaggaagtagaggtagagatgacgagtctctggaagtaaatagtaggaaatggcatatcgttttttttgtgtgaaacccttcatcttttgctgacattatttgtgcttgttgtcgaacagtaataaagaggtcatttatctagtatcaccgtaagcag

SEQ ID NO: 209313 - DNA, 969 bp, Zea Mays
cgcttccagaccagaacactcccctttcccctcctctcctagggtttcacagtgacgcttcctcaccaccgccgtcgcagagatgcagtccctcgtgcccttcagtacggcttcgtccgcaaggcctatggcgtccggaccggcgagacgctgtgcccggggatctcgtgcgaggagagcgccatccacaagggggtgatttattcattggagtttactgcatttaggttgctcaagattcagttttgcttagaccatcagataaactctactagcacatactctgacttcagattggacatgagagagagactgcaaatttgtctgatgcaaaaaaatcatcgataagtcaaaccttcagataaagtcagtcatggcattggatcatctaaaaattatatttatgttcaagctaagaaggaggctcatgtcaaagaggcacttcctatatttcttgacataatgtttcatcatgttcttggtgtaatattgtcattgtcatttgttcttgtctttggagagggatcatgtctgggctcacactggggctcatgtcgctcggcctcgtcgagctggtgatcctccaatgtagcgacataggcatctcaagagaccattaatattatgaagaggtcgatggaagaaaataacaacctccaactattaaacttcaatcgagaacaagtgcctccagcttatgtctgcttgaccactatatgatctacaaccttatggctactatagaagatagttatagtagctctgaatgtgaagttatacgatcattttcaattatccttaatatttatcactttgagtttaagttataagattggctttggattttaagttaaaggatttgaagatatatgtattgaagttatatgcttctttaatgaatgaaatatttgtgttcaacagattcatacaatattattgttggtgtaacattccatgatgatatgaatt

SEQ ID NO: 209314 - DNA, 586 bp, Zea Mays
tcgttagctcagggattaatctgccccacgcggcctgggtggggacttacttcctgcggaactactacaacctgctgcaacaaacccccgatgtcgtccaccagttctacagcgaagccagcaccatggtccgcgtcgacgacctcaccggcaacaatactgcaacaaggagctgtcgttcagccattgccaagccgagagcagaagcagaagagaaactgagaagaacccagcttagatcagactgaagaactagatgcggtggacgccttcaagacctgctgacatgagggctgctagtcagagctgctgtttttggcctgttctttgacatgagggtacccaaaaactctagttgctcgtgggtgtcaactttttattatatgttgttatgtttgtgcaaaatcaactgaaatgtgaagtcaagtggtgatgctgtgaactgagtttagtgttgtccacttagtttgtatgatcactggaatactagttgtattcatctacggaatatggaattgtgtgctcattcctctgttctagtatcttttgcaattttcaataaaattattctctgcacatctgtgac

SEQ ID NO: 209315 - DNA, 703 bp, Zea Mays
ttcgtcttcagatctagggttctctcgtgctctgttctcatcttctgctcgctggtgtcccctctctctcacccatggcttcggcggcggcggcaactcaggtggggacttacttcctgcggaactactacaacctgctgcaacaaacccccgatgtcgtccaccagttctacagcgaagccagcaccatggtccgcgtcgacgacctcaccggcaacaatactgcaacaaggagctgtcgttcagccattgccaagccgagagcaggtgatggcgctggcaccttgctcgaattgatggtgatgcacgacctgccttggtaagcagaagagaaactgagaagaacccagcttagatcagactgaagaactagatgcggtggacgccttcaagacctgctgacatgagggctgctagtcagagctgctgtttttggcctgttctttgacatgagggtacccaaaaactctagttgctcgtgggtgtcaactttttattatatgttgttatgtttgtgcaaaatcaactgaaatgtgaagtcaagtggtgatgctgtgaactgagtttagtgttgtccacttagtttgtatgatcactggaatactagttgtattcatctacggaatatggaattgtgtgctcattcctctgttctagtatcttttgcaattttcaataaaattattctctgcacatctgtgac

SEQ ID NO: 209316 - DNA, 701 bp, Zea Mays
ttcgtcttcagatctagggttctctcgtgctctgttctcatcttctgctcgctggtgtcccctctctctcacccatggcttcggcggcggcggcaactcaggtggggacttacttcctgcggaactactacaacctgctgcaacaaacccccgatgtcgtccaccagttctacagcgaagccagcaccatggtccgcgtcgacgacctcaccggcaacaatactgcaacaaggagctgtcgttcagccattgccaagccgagagcaggtgatggcgctggcaccttgctcgaattgatggtgatgcacgacctgccttgaagcagaagagaaactgagaagaacccagcttagatcagactgaagaactagatgcggtggacgccttcaagacctgctgacatgagggctgctagtcagagctgctgtttttggcctgttctttgacatgagggtacccaaaaactctagttgctcgtgggtgtcaactttttattatatgttgttatgtttgtgcaaaatcaactgaaatgtgaagtcaagtggtgatgctgtgaactgagtttagtgttgtccacttagtttgtatgatcactggaatactagttgtattcatctacggaatatggaattgtgtgctcattcctctgttctagtatcttttgcaattttcaataaaattattctctgcacatctgtgac

SEQ ID NO: 209317 - DNA, 779 bp, Zea Mays
ctccactcttgatccgtcggctatgggcctgtggctgctgcgtaacacagtggcatcgcagggtcagcagatcattagaaaacgacgtctcgccgttcttcgtcttcagatctagggttctctcgtgctctgttctcatcttctgctcgctggtgtcccctctctctcacccatggcttcggcggcggcggcaactcaggtggggacttacttcctgcggaactactacaacctgctgcaacaaacccccgatgtcgtccaccagttctacagcgaagccagcaccatggtccgcgtcgacgacctcaccggcaacaatactgcaacaaggagctgtcgttcagccattgccaagccgagagcaggtgatggcgctggcaccttgctcgaattgatgaagcagaagagaaactgagaagaacccagcttagatcagactgaagaactagatgcggtggacgccttcaagacctgctgacatgagggctgctagtcagagctgctgtttttggcctgttctttgacatgagggtacccaaaaactctagttgctcgtgggtgtcaactttttattatatgttgttatgtttgtgcaaaatcaactgaaatgtgaagtcaagtggtgatgctgtgaactgagtttagtgttgtccacttagtttgtatgatcactggaatactagttgtattcatctacggaatatggaattgtgtgctcattcctctgttctagtatcttttgcaattttcaataaaattattctctgcacatctgtgac

SEQ ID NO: 209318 - DNA, 756 bp, Zea Mays
atcgagtccctccactcttgatccgtcggctatgggcctgtggctgctgcgtaacacagtggcatcgcagggtcagcagatcattagaaaacgacgtctcgccgttcttcgtcttcagatctagggttctctcgtgctctgttctcatcttctgctcgctggtgtcccctctctctcacccatggcttcggcggcggcggcaactcaggtggggacttacttcctgcggaactactacaacctgctgcaacaaacccccgatgtcgtccaccagttctacagcgaagccagcaccatggtccgcgtcgacgacctcaccggcaacaatactgcaacaaggagctgtcgttcagccattgccaagccgagagcagaagcagaagagaaactgagaagaacccagcttagatcagactgaagaactagatgcggtggacgccttcaagacctgctgacatgagggctgctagtcagagctgctgtttttggcctgttctttgacatgagggtacccaaaaactctagttgctcgtgggtgtcaactttttattatatgttgttatgtttgtgcaaaatcaactgaaatgtgaagtcaagtggtgatgctgtgaactgagtttagtgttgtccacttagtttgtatgatcactggaatactagttgtattcatctacggaatatggaattgtgtgctcattcctctgttctagtatcttttgcaattttcaataaaattattctctgcacatctgtgac

SEQ ID NO: 209319 - DNA, 1157 bp, Zea Mays
aaaaaattatgtgctattgctcaatagcgttttatacgaagatgcaaacaaggttgcttgcagtttgtgattctcaagcctattttggttgttatcacttttatactttacgcgaaaggaaaatacaaagatggcaacttcagtgtcaaccaatcctatctctacataactatcatatatacaatctcatactcgatggctttgtatgcccttgcattgttctatgcggcttgcagagatctacttcggccatataatcctgtcccaaaattcatcatgataaaatcagtggtgtttctcacatattggcagggtgtcctggttttccttgctgcaaaatctcgatttatcaagaatgctgataaggctgctgatcttcagaactttgtgttgtgtgttgagatgctaatagcagccattggtcacttatttgccttcccctacaaggaatatgcaggtccgaatgcccgcccttcaggtggtttcagagaaagccttcttcatgctttgaaattcaatgatttctaccatgacactgttcaccagtttgctcctacatacaatgaatatgtgctctacaatcacaatgagggagacaatgcagaaacgaaatttccctcagggagcactgccacaagtgggcagggtgtggagttggctggcattaccgttgtggcttcaaacagtccagtgacatcaagtgtatcatgcaaccaggcagatcaggaagagacaatgacaaccccaatcaaggacaaagtcgatcctggagggctttatgatctcacagaattgcttgatgtggatttgtctagctacccagacaaggttcctgcaatcaccgatgtaagaaaacaatgaccaagcttgatgagatgtactattagtagggttgcaaacttgcaattggggggaaattgtgattttgtcgaagagttgccatagttaacatttgtaaaaatgtgtgtattacttggtctgattttcccccattcaatggggtttattcattgtcaaaagctgctgccacatggcctccctcacccctgctctttactaactgtaaattgttgctcaaggtgaactttaggtgtcaaggggactccatactaatacaatattctgggtttctgatggagtattttccgattttactc

SEQ ID NO: 209320 - DNA, 3851 bp, Zea Mays
gcttgcgcagttgcgcctgcctcgggcactcgccgtctcttgccgcgggcgcacgactttttccccaacaaccgatcgcccacgcaaacctctcctcaactcgatcaaaccggggacggaaaaggcccaccaaaatcccccaaaatttcgtacctcctcagccccagcaatctcgaatcccgatgctcacagcctccaccgaatccctggcggtcgtcatcagcgcatgagctttcttcgctcgctagcggactccttctcatcgctgctcttctcgtcgggaggcggggcggtgtccatggacgcggcgggggcggccccgtcgccggcggcggtggtgggggagcgcgtggcggtgaagctcagggggtacttcgacctcgccaaagaggagatcgacaaggccgtgcgcgctgaggagtgggggctccccgacgaggccaccgcgcactaccgcaacgcgatgcgggtcatgctcgaggccaaggccgcgcgcgtccccgatgccgtctcctccagcgagagggggcaggtcagggtgtaccaggagaagatcgccaagtggcaggcccaggtcgaggagcggctcagagtgcttggtcagagaagcggtgaaggggccactgctgcagaagtgcccaagaaggttgctgcaaacaatcctatcattaggactgcaaaaacagcgtcaaatagcatccaaagatctcccttgcaaaatagccctaccttcaacaggggtggccaagcatctacacatcagaagatagggagcggagcttccagaccagttcagaaggctggtggaaactatgatgacaagcttgttgaaatgattaatacaacaattgtggacagaagcccttctgttaaatgggatgacgttgctggtcttgacaaagcaaagcaagcactcatggaaatggttattttgccttctaaacgaagggatttgttcaccggacttcggagacctgctaggggtttgcttctctttggcccacctgggaatggaaaaacaatgcttgccaaagctgttgcatcagaatctgaagcaacattttttaatgtttcggcttcttcattgacatcaaagtgggtaggagaagctgaaaaacttgtcaggacacttttcatggttgcaattgatagacaaccatctgttatttttatggacgagattgatagtgtcatgtctacaaggttagctaatgagaatgactctagcaggcgtctgaaatctgaatttcttatccagtttgatggggtgtcctcaaacccagatgatctagtaattgttataggggctactaataaacctcaagaattggatgatgctgttcttcgaaggctggtaaaaagaatatatgtgccactacctgatccaaatgtacgaaggttacttctgaaaaatcagctcaaaggacaatcattcaaactgtcgaaccatgattttgaaagacttgctgtggagaccgaagggtattctggaagtgacctgagagccttgtgtgaagaagctgcaatgatgccaataagagagctcggtccacaaaatattcttactatcaaagcaaatcagctgcgacctttgaggtacgaggacttcaagaacgcgatgacggtgatcaggccaagcttgcagaagagcaaatgggacgagctggagaactggaacgaggaattcggttcgagctgacggagacgcgcgctgcctgatgatgatgatcaagcggccctatttccagatgtacatgatttatgtctcacacacacatggtggcttacacacacacacgcgcccatcggccatcgatgcgtcctcagtctggacagcgcgtcttcaacagaagcagaagcaatccttgatatacctgatggctatgattgatgagcctctgtacccaattgctgtactgattgatgagcttaagaatgaggacatccagttgcgtctaaactccattagaagactttcgacaattgcacgggctcttggagaagaaagaaccaggaaggagctgattccctttcttagtgaaaacaatgacgatgaagatgaggtgcttcttgcaatggctgaggaattgggtgtgttcattccttatgttgggggtgtagaacatgctcatgttttgcttccccctttggaaacattgtgtacagtagaagaaacttgtgtccgtgataaggcagttgaatctctgtgccgtattggtgcacaaatgaaggaaactgacatagtcgactggttcattccagtagtaaagaggctagcagctggtgagtggtttacagctcgtgtatcatcctgtggtcttttccacatagcctatccaagtgcattggaccaattgaaaacagaattaaggactatctatggtcagttatgtcaggatgacatgcctatggtcagaagagctgctgcatcaaatcttggaaagtttgcagccacagttgaacagaatcatttgaagacagaaataatgtcaatatttgatgacttaacccaagatgatcaagattcagtgcgtttgttggctgttgaaggttgtgctgctcttggtaaattgttggagccacaagattgtgtagctcacattcttccagtcattgtcaatttctcccagagctgatttggtgcctgcatatgttcgtctccttcgcgataatgaggctgaagtgcgaatagcggctgctggaaaagtaactaagttctgccgcatattaaatccacagctttcaatccaacatattcttccgtgcgttaaggaattgtcatcagattcatcccagcatgttcgttcagctttagcctcagtcattatgggaatggctcctgtactgggaaaggatgctaccatggaacagcttcttccaatttttctctctttgctgaaggatgaatttccagatgttcggcttaacataatcagcaagcttgatcaggttaatcaggttattggcattgactttttatcccaaacactgctaccagccattgtagaacttgcagaggataggcactggagagtccggcttgcaataattgagtacatcccattgctggcgagtcagttaggtgttgggttttttgatgacaagctgggggcactctgcatgcaatggttggaagataaggtcttctcaatcagagatgctgccgccaacaacttgaagcgccttgcggaagagttcggtccagagtgggcaatgcagcatataattcctcaggtgctggagaagatcaacaatccgcactatttgtaccgcatgacgattctgcaggctatctccttgctagctcccgtcatgggtgcagagatcacttgtcaaaagctgcttccagtcgtcattaattcttcaaaggacagggttcctaacatcaagttcaacgttgcaaaagtactaaagtcacttgtaccgatcctcgatcaatctgtcgtggagaagaccgtgaaaccatgccttgttgagctcagcgaggaccctgacgtcgatgtgaggtactacgcgaaccaggcgctgcaggcgtgcgatcaaatgatggtgtcgagctaactagccgtgtgcccgagtacttagagttcgatgcctcatagtccaattttggattacctgtaatttgttgggccttttagattgaagagttttccgtctagcctcggtggacagatcgacgctgcccatgctgataaatggacggtcctgatccattgttcgttgtgttattaatgttgtataattgagcaggacacaacacgtacgttactctctgtgtctgtgtgtgtttgcatggcattgtctcgcaggtagttgagcaaccacgtaataattctttccagcgcatg

SEQ ID NO: 209321 - DNA, 2423 bp, Zea Mays
gcttgcgcagttgcgcctgcctcgggcactcgccgtctcttgccgcgggcgcacgactttttccccaacaaccgatcgcccacgcaaacctctcctcaactcgatcaaaccggggacggaaaaggcccaccaaaatcccccaaaatttcgtacctcctcagccccagcaatctcgaatcccgatgctcacagcctccaccgaatccctggcggtcgtcatcagcgcatgagctttcttcgctcgctagcggactccttctcatcgctgctcttctcgtcgggaggcggggcggtgtccatggacgcggcgggggcggccccgtcgccggcggcggtggtgggggagcgcgtggcggtgaagctcagggggtacttcgacctcgccaaagaggagatcgacaaggccgtgcgcgctgaggagtgggggctccccgacgaggccaccgcgcactaccgcaacgcgatgcgggtcatgctcgaggccaaggccgcgcgcgtccccgatgccgtctcctccagcgagagggggcaggtcagggtgtaccaggagaagatcgccaagtggcaggcccaggtcgaggagcggctcagagtgcttggtcagagaagcggtgaaggggccactgctgcagaagtgcccaagaaggttgctgcaaacaatcctatcattaggactgcaaaaacagcgtcaaatagcatccaaagatctcccttgcaaaatagccctaccttcaacaggggtggccaagcatctacacatcagaagatagggagcggagcttccagaccagttcagaaggctggtggaaactatgatgacaagcttgttgaaatgattaatacaacaattgtggacagaagcccttctgttaaatgggatgacgttgctggtcttgacaaagcaaagcaagcactcatggaaatggttattttgccttctaaacgaagggatttgttcaccggacttcggagacctgctaggggtttgcttctctttggcccacctgggaatggaaaaacaatgcttgccaaagctgttgcatcagaatctgaagcaacattttttaatgtttcggcttcttcattgacatcaaagtgggtaggagaagctgaaaaacttgtcaggacacttttcatggttgcaattgatagacaaccatctgttatttttatggacgagattgatagtgtcatgtctacaaggttagctaatgagaatgactctagcaggcgtctgaaatctgaatttcttatccagtttgatggggtgtcctcaaacccagatgatctagtaattgttataggggctactaataaacctcaagaattggatgatgctgttcttcgaaggctggtaaaaagaatatatgtgccactacctgatccaaatgtacgaaggttacttctgaaaaatcagctcaaaggacaatcattcaaactgtcgaaccatgattttgaaagacttgctgtggagaccgaagggtattctggaagtgacctgagagccttgtgtgaagaagctgcaatgatgccaataagagagctcggtccacaaaatattcttactatcaaagcaaatcagccattgtagaacttgcagaggataggcactggagagtccggcttgcaataattgagtacatcccattgctggcgagtcagttaggtgttgggttttttgatgacaagctgggggcactctgcatgcaatggttggaagataaggtcttctcaatcagagatgctgccgccaacaacttgaagcgccttgcggaagagttcggtccagagtgggcaatgcagcatataattcctcaggtgctggagaagatcaacaatccgcactatttgtaccgcatgacgattctgcaggctatctccttgctagctcccgtcatgggtgcagagatcacttgtcaaaagctgcttccagtcgtcattaattcttcaaaggacagggttcctaacatcaagttcaacgttgcaaaagtactaaagtcacttgtaccgatcctcgatcaatctaccgtgaaaccatgccttgttgagctcagcgaggaccctgacgtcgatgtgaggtactacgcgaaccaggcgctgcaggcgtgcgatcaaatgatggtgtcgagctaactagccgtgtgcccgagtacttagagttcgatgcctcatagtccaattttggattacctgtaatttgttgggccttttagattgaagagttttccgtctagcctcggtggacagatcgacgctgcccatgctgataaatggacggtcctgatccattgttcgttgtgttattaatgttgtataattgagcaggacacaacacgtacgttactctctgtgtctgtgtgtgtttgcatggcattgtctcgcaggtagttgagcaaccacgtaataattctttccagcgcatg

SEQ ID NO: 209322 - DNA, 2352 bp, Zea Mays
ctaccgcaccaactcttttaacccccttcctctccagggaacgagaccagaatcccccgtcgacgcgcacgcgcagagctccgcatccgcaccggccgccggcggcgtggatggggaagctctccgccctgaagcgggaagcggtcggagtggactaggcgctcggtgacttcctagtttagaagcggtaggtggaggcgatgcggggcggggcgatgaaggccctgcggcgatccagcacctcctcggcgccatcgccaagggtgccgtcttccccgcggtcttattcgtggatccaccgccggtcgcttctcgttacctcgccggcctcgccggcgacgtcctctgtgtctgaatcggcgaatttgcccgcggagggttcggattcagcgccagcgtcagtggtggcagcttcctcgtcgccctcgctggctgcttcgtctccgaacatggaatgtacatttcattctaggggtggaattaaatctccgtggtctcgaagaaaaaggaaacgggcgcttacttgtcaacactggaatcgtctattttcagcaaatgggaagcttcgtgatgggggaagaaagtttctaaagaaggttcgcagtggggggattgaaccgggcataagggctgaagtttggccatttctgcttggagtgaaagaatatgaaaaattgaggcgacagtgccaccgcatcctgcattgtaatagagaaaatggtctgaatgttataaatgagttcatgaacgaggacttttctgatggggctgaaggttcagagtcaccatattcaaatggtgttagtaagagggtttgtgtgatgcccaaagaattgaaatctttaggcagtaaggcagaagaatcagagagttctaactgggatgctgtgaaatgcatagatgaagacataacctctgttgatccatgtttggtagaatcagaatcttctgaatctgagtcttcctatgaagaggaccctgatagaacacctgtctctaccaatatggaagagaactgtggtcccaaaccaaaatttgcccggaccgcttcatctaagtcggagattattatttcagacagaactcctgaggattttgccacatggcagcgcattatacgtgtagatgctattcgagcaaatacagaatgggttctgtttgcccgtaaccaggctgaagtctctaaagagaaagcgctgcagtctgcaatatctgtcgggttgaaagattttgaccatttagagccttacatgatctatcatgctgcacgattagttgcactgcttgaggcatatgcactttatgatccagagatcgggtactgtcaaggaatgagtgatctcttgtcaccaataattgcagtcatggaggaagatcatgaagcgttctggtgctttgtgggtttcatgaggaaagccagacacaacttcaggcttgacgaggttgggataaaaagacagctgaaaaccgtctcgcagatcatcaagcgcaaggattcacacctctacaggcacctgcagaaacttcaggcggaagactgcttctttctgtaccgaatggtggtggttctcttcaggagggagctcacttttgagcagactatgtgtctgtgggaggtcatgtgggctgaccaggccgcgatacgagctgggattggaaggtccacttgggcaaggataaggcttcatgccccgccaaccgacgacttgctgctctacgccatcgcagcctgcgtcttgcagaagaggaagctgataatcgagaagtacagcagcatggatgagatactgcgggagtgtaatagcatggccgggcagctagatgtctggaagctcctagatgatgcccaccacttggttgttgaccttcatgacaaaatctgatgcgactgccttcctcagctatgtttttgggtagagtatgcagacatgaacacattttccgaggtgtatttagtaagctgttgtgtactgttcatcacccggaataaaaaaaaactttcatgggagtacatgtagagaaccttgtagcttcaagtgaggacgaagttgtcttccactttggttaagctgataaaccattggatagcgcaatggtttattcaagccatccatagttaaaacttcatggaaaattttgttcttgcttctaatgtctgtccttggcagaaacaacattttccatgaagttttttacaggaaagttaagttcccagattttgggtgtaatgtgtagtaataatgaaatcacagcagtttctttcatcatgtgtagtaatgtactccctctgttttattttagttgtagctggatagtgcaaaattgaactatcaagcgacaactaaaaagaaa

SEQ ID NO: 209323 - DNA, 342 bp, Zea Mays
gctcaacctccacgcctctgttctaaaggacctcaacaaccatccataagagaaacgccaagaaagaagatacaactgtctatagaaacaataaacaatttttcttctcggactgctcaatctgaagagctcgaaagaacacaaacaaatcactctctctagtcactatggtgttgtgtggaatttggagaggatttgatctctttggtgtgtctagagttgaatgctagagctcttgtagtagttgggaagtggaaaacttggatgcaatgaatggtggggtggttgggatatttatatccccaaccaccaaaagtggccgttgggaggttgtctgttcga

SEQ ID NO: 209324 - DNA, 3448 bp, Zea Mays
ccgcaggcacccctttgcacagcagctccgaagccacaccacagttatttattactgttttttcgttgcctccaatccaatagagttgaccgaaccacgcgccgcccgctgacatggacgacgtagtaccagcgacagcgaagcagaccgtcgttctgtaccccggcggcggcgccgggcacgtcgcgccgatgacgcagctcgccaaggtcttcgtccgccacggctacgacgtcaccatggtgctcctggagccgcccatcaagtcgaacgcctccggcgccagcttcgtcgagagcttcgccgcctccaacccgtccatcaccttccacctcctcccgccgatccctccccccgacctcgccagctccaccaagcaccctttcctcgtcgtgctggagttgctgggccagtacaacgacaagctcgagagcttcctccgcaccatcccgcgcgagcgcctgcactcccttgtcatcgacatgttctgcaccgacgccatcgacgtggccgcgaaggtgggcgtccccgtctacacgttcttcgcggcgaacgccggagccctggccgtcttaacacagacggtggcgctgcttgacggccggcaaacgggcctcaaggagctcggggacacgcccatcgagttccttggcgtgccgccgatcccggcgtcgcacatcatcagggagatgctcgaggacgcggaggacgaggtgcgcacggcaatggcgaagatctggaagcgcgacacggacacccggggcgtcctcatcaataccttctactcgctggaggcccaggccctgcaggcgttcagtgacccgctgtgcgtccctggcaaagtgttgcctcctgtttaccccatcgggccgttggttggcaagggcgggagcgggacggacggaggagaggcggcggagaggccgcatgagtgcctcgcctggctcgacgcgcagccggagcgcagcgtcgtgttcctctgctgggggagcaggggcttgctgtcagaggagcagcttaaggagatagccgctggcctagagaagtccgggcaacggttcctgtgggtggtgcgcacgccggccagcagcgacgacccgaaacgattctggctgccacgcccggagccggaccttgacgcccttctgccggaggggttcttggagcggaccaaggaccgcggcctcgtcatcaagtcgtgggcgccgcaggtggacgtgctcagcaaccccgctgttggcgcgtttgtcacccactgcgggtggaactcgtcgcttgaggccatcacagcgggtgtgccgatgctgtgctggccacagggcgcagagcagaagatcaacaaggtacttatgaccgaggccatgggcatcgggctggagctggaggggtacaacacaggtttcatcaaggctgaggagatagagacgaaggtgaggcttgtgctggagtccgaggaggggagggagattaggacacgggcggcagaggtgaagaaagaagcacacgcggcgttggaggacgggggatcatcgaaggcagcatttctccaattcttgtcagatgtcaagaatattaattaggtcgggaagtgatcaatctttaaccgcccgatacaacgtaacacaaactattcaataaaatattagtatacatattgcttaggaaaaaaaatcccataaacaagtaataaagaaaacatgtgtgtagcaacaatatctatatctatactacttattaaggtagcaaggataatctgcctccccgccgttctgccttccaacgatctcaactgtccatccacgcctctgttttcgtcccgtcggatgctgccaacgcccgcgcgcatcccctggtcgtcagccccacccatccgtgcgagcgagcaacccattgcagccaccaccgccctacctactcacctcctcggcgcgaacagccgccgaacccttatcgctcgcccctcgcccgtgccagcaacccccgccaccgccgccgccctgcctctcgtccacccctccgccgcgagatgtcgccggcccctcaccatcctctatccacagcgcgcggggcgtagcccccctctagcgccgctcaagggtgaagggcccatccgcaccctgatgttggccacctccaccatgctctgatgcccatccttcgtcatgaccccctccagttccattactgacggacggtcctcttcataggcaaggtagagatggaggacagcaaaacactaacacccgagccatgccaccaccaatctattcctccaaacccttctgtacatgtgcgctacacatacatgaggctcctcctcctcgtcaaccccacatgatgaggcgtacttcagatgcagcgtgctcaagtgtaggagattgtcaatatcatcttgttgaatcgatgtgggggaggatgtctacttggtgaaacatccaaaaaagggactttgtcctttattttgaatcctttatcattctgttattagtacattggggatgcattatgattgtaataaaatatgttcacatttgttcttaaggtgagccacaagattcaggaatatcattgtagattgtttttgaattaggccacctatcctaatttttcgagtttgcatgggcctgcgatgcattacggaggcatttggaggtagcatttatctttataccaggtcagtagtttttaatggcctctgcttttgttactcaaacatttatgacatgaaaatgcaggaaaggttattcgtgcaccttctggaatgacgcatgagaaaatctctccagttcattatgatgaggaattaggaaattccttattcaatggcttgccaaaatgtcgtgcggtactacaagcagaacgccgatgaaacatggttcgacgtctcgctgaatagcctgcttcccggctcagtcctcaattgccagcgccaggtgtcaggatgtctcatccagaaaaagcctaatggctactcaaagatacgaaatggccaaggactgctgacgatgatgacgacatggccaccatcgccgccctctggacctcaacaaccatccataagagaaacgccaagaaagaagatacaactgtctatagaaacaataaacaatttttcttctcggactgctcaatctgtgcataatgtgcctgacgctacacaacaacgaggggaactacctgggaagcggccagaccaacctcgccaagtgcgctgcctgcgaggccaaagacgcgcccgcacaaccgttgcccaacaaggtcaagatcgcccccaagtctggtgcatgaaaaaacataatctctccactccccttttatctgcaaaactgatgttctaaactagaatcatcaattactatatgtgtctcctgatttatttctacagttgtttggactttgtgtggtccaatcagacagaagtatgctattatgcttgttcagagtgtta

SEQ ID NO: 209325 - DNA, 3124 bp, Zea Mays
ccgcaggcacccctttgcacagcagctccgaagccacaccacagttatttattactgttttttcgttgcctccaatccaatagagttgaccgaaccacgcgccgcccgctgacatggacgacgtagtaccagcgacagcgaagcagaccgtcgttctgtaccccggcggcggcgccgggcacgtcgcgccgatgacgcagctcgccaaggtcttcgtccgccacggctacgacgtcaccatggtgctcctggagccgcccatcaagtcgaacgcctccggcgccagcttcgtcgagagcttcgccgcctccaacccgtccatcaccttccacctcctcccgccgatccctccccccgacctcgccagctccaccaagcaccctttcctcgtcgtgctggagttgctgggccagtacaacgacaagctcgagagcttcctccgcaccatcccgcgcgagcgcctgcactcccttgtcatcgacatgttctgcaccgacgccatcgacgtggccgcgaaggtgggcgtccccgtctacacgttcttcgcggcgaacgccggagccctggccgtcttaacacagacggtggcgctgcttgacggccggcaaacgggcctcaaggagctcggggacacgcccatcgagttccttggcgtgccgccgatcccggcgtcgcacatcatcagggagatgctcgaggacgcggaggacgaggtgcgcacggcaatggcgaagatctggaagcgcgacacggacacccggggcgtcctcatcaataccttctactcgctggaggcccaggccctgcaggcgttcagtgacccgctgtgcgtccctggcaaagtgttgcctcctgtttaccccatcgggccgttggttggcaagggcgggagcgggacggacggaggagaggcggcggagaggccgcatgagtgcctcgcctggctcgacgcgcagccggagcgcagcgtcgtgttcctctgctgggggagcaggggcttgctgtcagaggagcagcttaaggagatagccgctggcctagagaagtccgggcaacggttcctgtgggtggtgcgcacgccggccagcagcgacgacccgaaacgattctggctgccacgcccggagccggaccttgacgcccttctgccggaggggttcttggagcggaccaaggaccgcggcctcgtcatcaagtcgtgggcgccgcaggtggacgtgctcagcaaccccgctgttggcgcgtttgtcacccactgcgggtggaactcgtcgcttgaggccatcacagcgggtgtgccgatgctgtgctggccacagggcgcagagcagaagatcaacaaggtacttatgaccgaggccatgggcatcgggctggagctggaggggtacaacacaggtttcatcaaggctgaggagatagagacgaaggtgaggcttgtgctggagtccgaggaggggagggagattaggacacgggcggcagaggtgaagaaagaagcacacgcggcgttggaggacgggggatcatcgaaggcagcatttctccaattcttgtcagatgtcaagaatattaattaggtcgggaagtgatcaatctttaaccgcccgatacaacgtaacacaaactattcaataaaatattagtatacatattgcttaggaaaaaaaatcccataaacaagtaataaagaaaacatgtgtgtagcaacaatatctatatctatactacttattaaggtagcaaggataatctgcctccccgccgttctgccttccaacgatctcaactgtccatccacgcctctgttttcgtcccgtcggatgctgccaacgcccgcgcgcatcccctggtcgtcagccccacccatccgtgcgagcgagcaacccattgcagccaccaccgccctacctactcacctcctcggcgcgaacagccgccgaacccttatcgctcgcccctcgcccgtgccagcaacccccgccaccgccgccgccctgcctctcgtccacccctccgccgcgagatgtcgccggcccctcaccatcctctatccacagcgcgcggggcgtagcccccctctagcgccgctcaagggtgaagggcccatccgcaccctgatgttggccacctccaccatgctctgatgcccatccttcgtcatgaccccctccagttccattactgacggacggtcctcttcataggcaagatgaggcgtacttcagatgcagcgtgctcaagtgtaggagattgtcaatatcatcttgttgaatcgatgtgggggaggatgtctacttggtgagccacaagattcaggaatatcattgtagattgtttttgaattaggccacctatcctaatttttcgagtttgcatgggcctgcgatgcattacggaggcatttggaggaaaggttattcgtgcaccttctggaatgacgcatgagaaaatctctccagttcattatgatgaggaattaggaaattccttattcaatggcttgccaaaatgtcgtgcggtactacaagcagaacgccgatgaaacatggttcgacgtctcgctgaatagcctgcttcccggctcagtcctcaattgccagcgccaggtgtcaggatgtctcatccagaaaaagcctaatggctactcaaagatacgaaatggccaaggactgctgacgatgatgacgacatggccaccatcgccgccctctggacctcaacaaccatccataagagaaacgccaagaaagaagatacaactgtctatagaaacaataaacaatttttcttctcggactgctcaatctgtgcataatgtgcctgacgctacacaacaacgaggggaactacctgggaagcggccagaccaacctcgccaagtgcgctgcctgcgaggccaaagacgcgcccgcacaaccgttgcccaacaaggtcaagatcgcccccaagtctggtgcatgaaaaaacataatctctccactccccttttatctgcaaaactgatgttctaaactagaatcatcaattactatatgtgtctcctgatttatttctacagttgtttggactttgtgtggtccaatcagacagaagtatgctattatgcttgttcagagtgtta

SEQ ID NO: 209326 - DNA, 3154 bp, Zea Mays
ccgcaggcacccctttgcacagcagctccgaagccacaccacagttatttattactgttttttcgttgcctccaatccaatagagttgaccgaaccacgcgccgcccgctgacatggacgacgtagtaccagcgacagcgaagcagaccgtcgttctgtaccccggcggcggcgccgggcacgtcgcgccgatgacgcagctcgccaaggtcttcgtccgccacggctacgacgtcaccatggtgctcctggagccgcccatcaagtcgaacgcctccggcgccagcttcgtcgagagcttcgccgcctccaacccgtccatcaccttccacctcctcccgccgatccctccccccgacctcgccagctccaccaagcaccctttcctcgtcgtgctggagttgctgggccagtacaacgacaagctcgagagcttcctccgcaccatcccgcgcgagcgcctgcactcccttgtcatcgacatgttctgcaccgacgccatcgacgtggccgcgaaggtgggcgtccccgtctacacgttcttcgcggcgaacgccggagccctggccgtcttaacacagacggtggcgctgcttgacggccggcaaacgggcctcaaggagctcggggacacgcccatcgagttccttggcgtgccgccgatcccggcgtcgcacatcatcagggagatgctcgaggacgcggaggacgaggtgcgcacggcaatggcgaagatctggaagcgcgacacggacacccggggcgtcctcatcaataccttctactcgctggaggcccaggccctgcaggcgttcagtgacccgctgtgcgtccctggcaaagtgttgcctcctgtttaccccatcgggccgttggttggcaagggcgggagcgggacggacggaggagaggcggcggagaggccgcatgagtgcctcgcctggctcgacgcgcagccggagcgcagcgtcgtgttcctctgctgggggagcaggggcttgctgtcagaggagcagcttaaggagatagccgctggcctagagaagtccgggcaacggttcctgtgggtggtgcgcacgccggccagcagcgacgacccgaaacgattctggctgccacgcccggagccggaccttgacgcccttctgccggaggggttcttggagcggaccaaggaccgcggcctcgtcatcaagtcgtgggcgccgcaggtggacgtgctcagcaaccccgctgttggcgcgtttgtcacccactgcgggtggaactcgtcgcttgaggccatcacagcgggtgtgccgatgctgtgctggccacagggcgcagagcagaagatcaacaaggtacttatgaccgaggccatgggcatcgggctggagctggaggggtacaacacaggtttcatcaaggctgaggagatagagacgaaggtgaggcttgtgctggagtccgaggaggggagggagattaggacacgggcggcagaggtgaagaaagaagcacacgcggcgttggaggacgggggatcatcgaaggcagcatttctccaattcttgtcagatgtcaagaatattaattaggtcgggaagtgatcaatctttaaccgcccgatacaacgtaacacaaactattcaataaaatattagtatacatattgcttaggaaaaaaaatcccataaacaagtaataaagaaaacatgtgtgtagcaacaatatctatatctatactacttattaaggtagcaaggataatctgcctccccgccgttctgccttccaacgatctcaactgtccatccacgcctctgttttcgtcccgtcggatgctgccaacgcccgcgcgcatcccctggtcgtcagccccacccatccgtgcgagcgagcaacccattgcagccaccaccgccctacctactcacctcctcggcgcgaacagccgccgaacccttatcgctcgcccctcgcccgtgccagcaacccccgccaccgccgccgccctgcctctcgtccacccctccgccgcgagatgtcgccggcccctcaccatcctctatccacagcgcgcggggcgtagcccccctctagcgccgctcaagggtgaagggcccatccgcaccctgatgttggccacctccaccatgctctgatgcccatccttcgtcatgaccccctccagttccattactgacggacggtcctcttcataggcaaggtagagatggaggacagcaaaacactaacacccgagccatgccaccaccaatctattcctccaaacccttctgtacatgtgcgctacacatacatgaggctcctcctcctcgtcaaccccacatgatgaggcgtacttcagatgcagcgtgctcaagtgtaggagattgtcaatatcatcttgttgaatcgatgtgggggaggatgtctacttggtgagccacaagattcaggaatatcattgtagattgtttttgaattaggccacctatcctaatttttcgagtttgcatgggcctgcgatgcattacggaggcatttggaggaaaggttattcgtgcaccttctggaatgacgcatgagaaaatctctccagttcattatgatgaggaattaggaaattccttattcaatggcttgccaaaatgtcgtgcggtactacaagcagaacgccgatgaaacatggttcgacgtctcgctgaatagcctgcttcccggctcagtcctcaattgccagcgccaggtgtcaggatgtctcatccagaaaaagcctaatggctactcaaagatacgaaatggccaaggactgctgacgatgatgacgacatggccaccatcgccgccctctggacctcaacaaccatccataagagaaacgccaagaaagaagatacaactgtctatagaaacaataaacaatttttcttctcggactgctcaatctgaagagctcgaaagaacacaaacaaatcactctctctagtcactatggtgttgtgtggaatttggagaggatttgatctctttggtgtgtctagagttgaatgctagagctcttgtagtagttgggaagtggaaaacttggatgcaatgaatggtggggtggttgggatatttatatccccaaccaccaaaagtggccgttgggaggttgtctgttcga

SEQ ID NO: 209327 - DNA, 3029 bp, Zea Mays
ccgcaggcacccctttgcacagcagctccgaagccacaccacagttatttattactgttttttcgttgcctccaatccaatagagttgaccgaaccacgcgccgcccgctgacatggacgacgtagtaccagcgacagcgaagcagaccgtcgttctgtaccccggcggcggcgccgggcacgtcgcgccgatgacgcagctcgccaaggtcttcgtccgccacggctacgacgtcaccatggtgctcctggagccgcccatcaagtcgaacgcctccggcgccagcttcgtcgagagcttcgccgcctccaacccgtccatcaccttccacctcctcccgccgatccctccccccgacctcgccagctccaccaagcaccctttcctcgtcgtgctggagttgctgggccagtacaacgacaagctcgagagcttcctccgcaccatcccgcgcgagcgcctgcactcccttgtcatcgacatgttctgcaccgacgccatcgacgtggccgcgaaggtgggcgtccccgtctacacgttcttcgcggcgaacgccggagccctggccgtcttaacacagacggtggcgctgcttgacggccggcaaacgggcctcaaggagctcggggacacgcccatcgagttccttggcgtgccgccgatcccggcgtcgcacatcatcagggagatgctcgaggacgcggaggacgaggtgcgcacggcaatggcgaagatctggaagcgcgacacggacacccggggcgtcctcatcaataccttctactcgctggaggcccaggccctgcaggcgttcagtgacccgctgtgcgtccctggcaaagtgttgcctcctgtttaccccatcgggccgttggttggcaagggcgggagcgggacggacggaggagaggcggcggagaggccgcatgagtgcctcgcctggctcgacgcgcagccggagcgcagcgtcgtgttcctctgctgggggagcaggggcttgctgtcagaggagcagcttaaggagatagccgctggcctagagaagtccgggcaacggttcctgtgggtggtgcgcacgccggccagcagcgacgacccgaaacgattctggctgccacgcccggagccggaccttgacgcccttctgccggaggggttcttggagcggaccaaggaccgcggcctcgtcatcaagtcgtgggcgccgcaggtggacgtgctcagcaaccccgctgttggcgcgtttgtcacccactgcgggtggaactcgtcgcttgaggccatcacagcgggtgtgccgatgctgtgctggccacagggcgcagagcagaagatcaacaaggtacttatgaccgaggccatgggcatcgggctggagctggaggggtacaacacaggtttcatcaaggctgaggagatagagacgaaggtgaggcttgtgctggagtccgaggaggggagggagattaggacacgggcggcagaggtgaagaaagaagcacacgcggcgttggaggacgggggatcatcgaaggcagcatttctccaattcttgtcagatgtcaagaatattaattaggtcgggaagtgatcaatctttaaccgcccgatacaacgtaacacaaactattcaataaaatattagtatacatattgcttaggaaaaaaaatcccataaacaagtaataaagaaaacatgtgtgtagcaacaatatctatatctatactacttattaaggtagcaaggataatctgcctccccgccgttctgccttccaacgatctcaactgtccatccacgcctctgttttcgtcccgtcggatgctgccaacgcccgcgcgcatcccctggtcgtcagccccacccatccgtgcgagcgagcaacccattgcagccaccaccgccctacctactcacctcctcggcgcgaacagccgccgaacccttatcgctcgcccctcgcccgtgccagcaacccccgccaccgccgccgccctgcctctcgtccacccctccgccgcgagatgtcgccggcccctcaccatcctctatccacagcgcgcggggcgtagcccccctctagcgccgctcaagggtgaagggcccatccgcaccctgatgttggccacctccaccatgctctgatgcccatccttcgtcatgaccccctccagttccattactgacggacggtcctcttcataggcaagatgaggcgtacttcagatgcagcgtgctcaagtgtaggagattgtcaatatcatcttgttgaatcgatgtgggggaggatgtctacttggtgagccacaagattcaggaatatcattgtagattgtttttgaattaggccacctatcctaatttttcgagtttgcatgggcctgcgatgcattacggaggcatttggaggaaaggttattcgtgcaccttctggaatgacgcatgagaaaatctctccagttcattatgatgaggaattaggaaattccttattcaatggcttgccaaaatgtcgtgcggtactacaagcagaacgccgatgaaacatggttcgacgtctcgctgaatagcctgcttcccggctcagtcctcaattgccagcgccaggtgtcaggatgtctcatccagaaaaagcctaatggctactcaaagatacgaaatggccaaggactgctgacgatgatgacgacatggccaccatcgccgccctctggacctcaacaaccatccataagagaaacgccaagaaagaagatacaactgtctatagaaacaataaacaatttttcttctcggactgctcaatctgaagagctcgaaagaacacaaacaaatcactctctctagtcactatggtgttgtgtggaatttggagaggatttgatctctttggtgtgtctagagttgaatgctagagctcttgtagtagttgggaagtggaaaacttggatgcaatgaatggtggggtggttgggatatttatatccccaaccaccaaaagtggccgttgggaggttgtctgttcga

SEQ ID NO: 209328 - DNA, 1961 bp, Zea Mays
ccgcaggcacccctttgcacagcagctccgaagccacaccacagttatttattactgttttttcgttgcctccaatccaatagagttgaccgaaccacgcgccgcccgctgacatggacgacgtagtaccagcgacagcgaagcagaccgtcgttctgtaccccggcggcggcgccgggcacgtcgcgccgatgacgcagctcgccaaggtcttcgtccgccacggctacgacgtcaccatggtgctcctggagccgcccatcaagtcgaacgcctccggcgccagcttcgtcgagagcttcgccgcctccaacccgtccatcaccttccacctcctcccgccgatccctccccccgacctcgccagctccaccaagcaccctttcctcgtcgtgctggagttgctgggccagtacaacgacaagctcgagagcttcctccgcaccatcccgcgcgagcgcctgcactcccttgtcatcgacatgttctgcaccgacgccatcgacgtggccgcgaaggtgggcgtccccgtctacacgttcttcgcggcgaacgccggagccctggccgtcttaacacagacggtggcgctgcttgacggccggcaaacgggcctcaaggagctcggggacacgcccatcgagttccttggcgtgccgccgatcccggcgtcgcacatcatcagggagatgctcgaggacgcggaggacgaggtgcgcacggcaatggcgaagatctggaagcgcgacacggacacccggggcgtcctcatcaataccttctactcgctggaggcccaggccctgcaggcgttcagtgacccgctgtgcgtccctggcaaagtgttgcctcctgtttaccccatcgggccgttggttggcaagggcgggagcgggacggacggaggagaggcggcggagaggccgcatgagtgcctcgcctggctcgacgcgcagccggagcgcagcgtcgtgttcctctgctgggggagcaggggcttgctgtcagaggagcagcttaaggagatagccgctggcctagagaagtccgggcaacggttcctgtgggtggtgcgcacgccggccagcagcgacgacccgaaacgattctggctgccacgcccggagccggaccttgacgcccttctgccggaggggttcttggagcggaccaaggaccgcggcctcgtcatcaagtcgtgggcgccgcaggtggacgtgctcagcaaccccgctgttggcgcgtttgtcacccactgcgggtggaactcgtcgcttgaggccatcacagcgggtgtgccgatgctgtgctggccacagggcgcagagcagaagatcaacaaggaaaggttattcgtgcaccttctggaatgacgcatgagaaaatctctccagttcattatgatgaggaattaggaaattccttattcaatggcttgccaaaatgtcgtgcggtactacaagcagaacgccgatgaaacatggttcgacgtctcgctgaatagcctgcttcccggctcagtcctcaattgccagcgccaggtgtcaggatgtctcatccagaaaaagcctaatggctactcaaagatacgaaatggccaaggactgctgacgatgatgacgacatggccaccatcgccgccctctggacctcaacaaccatccataagagaaacgccaagaaagaagatacaactgtctatagaaacaataaacaatttttcttctcggactgctcaatctgaagagctcgaaagaacacaaacaaatcactctctctagtcactatggtgttgtgtggaatttggagaggatttgatctctttggtgtgtctagagttgaatgctagagctcttgtagtagttgggaagtggaaaacttggatgcaatgaatggtggggtggttgggatatttatatccccaaccaccaaaagtggccgttgggaggttgtctgttcga

SEQ ID NO: 209329 - DNA, 1231 bp, Zea Mays
gtcccgccatctctaaccctcccaactttagcagcgaaattcatccaaaagaaactcctgataaatataaaaaggaggggaaaaagaaaaacacttgcagcggcatccaccaccggagctcccatcatcggtctatccctccgtgtcaaccccctcctcagaagttctaattgcagttcagcccctggccggtccgccgggccaccggaaggagccgctcgccggaggaagccccccatctccttgccctgcggcgggtttatggggttctcgctgtaccccatgaagacgtccacgcggttgctctggagcactagcttcttccgccataagctcagctcctcctcctgcttcctctgagcccgccccacccgcgtcgatcacctcggcggcggcccgctgttgctgcgcggtcctagcacccgttcgagtgtgtgtgtttgtgttctttgagtttcaagattgggttttgttgcgttattggggagacgaagggactaaggcgcagtgagcggacaagaatcagcatggatccgagcgcggtcagtttcgactctggcggcacgcggcggggcggcggcgcgcagatgctgctcttcggcggcggaggcagcgccaacagcaacggcttcttccgaggtgttccgatggcggtcctgggcatggacgacgcgacgcgcgtgggcaagcggcccttcttcacgacacacgaggagctcctagaggaggagtactacgacgagcaggcgccggagaagaagcgccgactgacggcggagcaggtgcagctgctggagcggagcttcgaagaagagaacaagctggagccggagcgcaagaccgagctggctcgccgcctggggatggcgccccgccaggtagctgtttggttccagaaccgccgcgcgcgctggaagaccaagcaactcgagaccgactatgaccgcctcaaggctgcttacgacgcactcgccgccgaccaccagggcctcctggccgacaacgataacctccgggcacaggtcatcgtctgaagttcgatgtcatggtgcgatgaaaagactgcaagtgcaagcatatccgtaggaaactaggaactagagttaaaactggggaataatgtaaatgagttcatgatcatcgttgtttggatgttttgaaatgccatgtatgtcaaattagtgtcatcaatgttatcaacattactgaaacgtgggctttaagatgagca

SEQ ID NO: 209330 - DNA, 2278 bp, Zea Mays
cccgtcgcattctgcagcgccagctcgctcctcgccccgcccccttctctcagcggcgacgcctcgggcgttcctaccctgccccctctccggacccccacgccgtcggcgaagcagccgggcaagagcccgatccagaccccgcgagcaatccttgatatacctgatggctatgattgatgagcctctgtacccaattgctgtactgattgatgagcttaagaatgaggacatccagttgcgtctaaactccattagaagactttcgacaattgcacgggctcttggagaagaaagaaccaggaaggagctgattccctttcttagtgaaaacaatgacgatgaagatgaggtgcttcttgcaatggctgaggaattgggtgtgttcattccttatgttgggggtgtagaacatgctcatgttttgcttccccctttggaaacattgtgtacagtagaagaaacttgtgtccgtgataaggcagttgaatctctgtgccgtattggtgcacaaatgaaggaaactgacatagtcgactggttcattccagtagtaaaggctagcagctggtgagtggtttacagctcgtgtatcatcctgtggtcttttccacatagcctatccaagtgcattggaccaattgaaaacagaattaaggactatctatggtcagttatgtcaggatgacatgcctatggtcagaagagctgctgcatcaaatcttggaaagtttgcagccacagttgaacagaatcatttgaagacagaaataatgtcaatatttgatgacttaacccaagatgatcaagattcagtgcgtttgttggctgttgaaggttgtgctgctcttggtaaattgttggagccacaagattgtgtagctcacattcttccagtcattgtcaatttctcccaggataaatcatggcgtgttcgttatatggtcgccaatcagttatatgagctctgtgaggctgttggccctgagcccacaagagctgatttggtgcctgcatatgttcgtctccttcgcgataatgaggctgaagtgcgaatagcggctgctggaaaagtaactaagttctgccgcatattaaatccacagctttcaatccaacatattcttccgtgcgttaaggaattgtcatcagattcatcccagcatgttcgttcagctttagcctcagtcattatgggaatggctcctgtactgggaaaggatgctaccatggaacagcttcttccaatttttctctctttgctgaaggatgaatttccagatgttcggcttaacataatcagcaagcttgatcaggttaatcagccattgtagaacttgcagaggataggcactggagagtccggcttgcaataattgagtacatcccattgctggcgagtcagttaggtgttgggttttttgatgacaagctgggggcactctgcatgcaatggttggaagataaggtcttctcaatcagagatgctgccgccaacaacttgaagcgccttgcggaagagttcggtccagagtgggcaatgcagcatataattcctcaggtgctggagaagatcaacaatccgcactatttgtaccgcatgacgattctgcaggctatctccttgctagctcccgtcatgggtgcagagatcacttgtcaaaagctgcttccagtcgtcattaattcttcaaaggacagggttcctaacatcaagttcaacgttgcaaaagtactaaagtcacttgtaccgatcctcgatcaatctgtgagttcatccggttattttgcaagttgttaccgttttgaaaagcgctgcgtttgtatttccgcgttattggggaatatcgtgaatgcttacttcgcaggtcgtggagaagaccgtgaaaccatgccttgttgagctcagcgaggaccctgacgtcgatgtgaggtactacgcgaaccaggcgctgcaggcgtgcgatcaaatgatggtgtcgagctaactagccgtgtgcccgagtacttagagttcgatgcctcatagtccaattttggattacctgtaatttgttgggccttttagattgaagagttttccgtctagcctcggtggacagatcgacgctgcccatgctgataaatggacggtcctgatccattgttcgttgtgttattaatgttgtataattgagcaggacacaacacgtacgttactctctgtgtctgtgtgtgtttgcatggcattgtctcgcaggtagttgagcaaccacgtaataattctttccagcgcatg

SEQ ID NO: 209331 - DNA, 1797 bp, Zea Mays
cccgtcgcattctgcagcgccagctcgctcctcgccccgcccccttctctcagcggcgacgcctcgggcgttcctaccctgccccctctccggacccccacgccgtcggcgaagcagccgggcaagagcccgatccagaccccgcgagaggctagcagctggtgagtggtttacagctcgtgtatcatcctgtggtcttttccacatagcctatccaagtgcattggaccaattgaaaacagaattaaggactatctatggtcagttatgtcaggatgacatgcctatggtcagaagagctgctgcatcaaatcttggaaagtttgcagccacagttgaacagaatcatttgaagacagaaataatgtcaatatttgatgacttaacccaagatgatcaagattcagtgcgtttgttggctgttgaaggttgtgctgctcttggtaaattgttggagccacaagattgtgtagctcacattcttccagtcattgtcaatttctcccaggataaatcatggcgtgttcgttatatggtcgccaatcagttatatgagctctgtgaggctgttggccctgagcccacaagagctgatttggtgcctgcatatgttcgtctccttcgcgataatgaggctgaagtgcgaatagcggctgctggaaaagtaactaagttctgccgcatattaaatccacagctttcaatccaacatattcttccgtgcgttaaggaattgtcatcagattcatcccagcatgttcgttcagctttagcctcagtcattatgggaatggctcctgtactgggaaaggatgctaccatggaacagcttcttccaatttttctctctttgctgaaggatgaatttccagatgttcggcttaacataatcagcaagcttgatcaggttaatcaggttattggcattgactttttatcccaaacactgctaccagccattgtagaacttgcagaggataggcactggagagtccggcttgcaataattgagtacatcccattgctggcgagtcagttaggtgttgggttttttgatgacaagctgggggcactctgcatgcaatggttggaagataaggtcttctcaatcagagatgctgccgccaacaacttgaagcgccttgcggaagagttcggtccagagtgggcaatgcagcatataattcctcaggtgctggagaagatcaacaatccgcactatttgtaccgcatgacgattctgcaggctatctccttgctagctcccgtcatgggtgcagagatcacttgtcaaaagctgcttccagtcgtcattaattcttcaaaggacagggttcctaacatcaagttcaacgttgcaaaagtactaaagtcacttgtaccgatcctcgatcaatctaccgtgaaaccatgccttgttgagctcagcgaggaccctgacgtcgatgtgaggtactacgcgaaccaggcgctgcaggcgtgcgatcaaatgatggtgtcgagctaactagccgtgtgcccgagtacttagagttcgatgcctcatagtccaattttggattacctgtaatttgttgggccttttagattgaagagttttccgtctagcctcggtggacagatcgacgctgcccatgctgataaatggacggtcctgatccattgttcgttgtgttattaatgttgtataattgagcaggacacaacacgtacgttactctctgtgtctgtgtgtgtttgcatggcattgtctcgcaggtagttgagcaaccacgtaataattctttccagcgcatg

SEQ ID NO: 209332 - DNA, 2062 bp, Zea Mays
cccgtcgcattctgcagcgccagctcgctcctcgccccgcccccttctctcagcggcgacgcctcgggcgttcctaccctgccccctctccggacccccacgccgtcggcgaagcagccgggcaagagcccgatccagaccccgcgagcaatccttgatatacctgatggctatgattgatgagcctctgtacccaattgctgtactgattgatgagcttaagaatgaggacatccagttgcgtctaaactccattagaagactttcgacaattgcacgggctcttggagaagaaagaaccaggaaggagctgattccctttcttagtgaaaacaatgacgatgaagatgagaagaaacttgtgtccgtgataaggcagttgaatctctgtgccgtattggtgcacaaatgaaggaaactgacatagtcgactggttcattccagtagtaaagaggctagcagctggtgagtggtttacagctcgtgtatcatcctgtggtcttttccacatagcctatccaagtgcattggaccaattgaaaacagaattaaggactatctatggtcagttatgtcaggatgacatgcctatggtcagaagagctgctgcatcaaatcttggaaagtttgcagccacagttgaacagaatcatttgaagacagaaataatgtcaatatttgatgacttaacccaagatgatcaagattcagtgcgtttgttggctgttgaaggttgtgctgctcttggtaaattgttggagccacaagattgtgtagctcacattcttccagtcattgtcaatttctcccaggataaatcatggcgtgttcgttatatggtcgccaatcagttatatgagctctgtgaggctgttggccctgagcccacaagagctgatttggtgcctgcatatgttcgtctccttcgcgataatgaggctgaagtgcgaatagcggctgctggaaaagtaactaagttctgccgcatattaaatccacagctttcaatccaacatattcttccgtgcgttaaggaattgtcatcagattcatcccagcatgttcgttcagctttagcctcagtcattatgggaatggctcctgtactgggaaaggatgctaccatggaacagcttcttccaatttttctctctttgctgaaggatgaatttccagatgttcggcttaacataatcagcaagcttgatcaggttaatcagccattgtagaacttgcagaggataggcactggagagtccggcttgcaataattgagtacatcccattgctggcgagtcagttaggtgttgggttttttgatgacaagctgggggcactctgcatgcaatggttggaagataaggtcttctcaatcagagatgctgccgccaacaacttgaagcgccttgcggaagagttcggtccagagtgggcaatgcagcatataattcctcaggtgctggagaagatcaacaatccgcactatttgtaccgcatgacgattctgcaggctatctccttgctagctcccgtcatgggtgcagagatcacttgtcaaaagctgcttccagtcgtcattaattcttcaaaggacagggttcctaacatcaagttcaacgttgcaaaagtactaaagtcacttgtaccgatcctcgatcaatctaccgtgaaaccatgccttgttgagctcagcgaggaccctgacgtcgatgtgaggtactacgcgaaccaggcgctgcaggcgtgcgatcaaatgatggtgtcgagctaactagccgtgtgcccgagtacttagagttcgatgcctcatagtccaattttggattacctgtaatttgttgggccttttagattgaagagttttccgtctagcctcggtggacagatcgacgctgcccatgctgataaatggacggtcctgatccattgttcgttgtgttattaatgttgtataattgagcaggacacaacacgtacgttactctctgtgtctgtgtgtgtttgcatggcattgtctcgcaggtagttgagcaaccacgtaataattctttccagcgcatg

SEQ ID NO: 209333 - DNA, 2105 bp, Zea Mays
ccgaatgcgagagccgggccgagaaaccttcccctacggcagtggaccggtgcttctctcgcattcggcctccccttcccaccctcaacagcgaagagcacacatggataccgccgtcttctcccccgccgatctcttccacggagtcgacgacagcgacgacgaccgagatgagatgcaaatctgctccgatggggagaagccggtggcgttggagtatcaggagagagtccacgacttccctgacatggtatgacttccacgattcggccgtcttggctcgcatatgtaggaacggtgctcctctggaatccggaaaggcccgggtcttgaagcacagtattatctaggtttcttgccttctcgggtttcagtttggattttcctaatattagagaatggatgaacaagtaatacctagatgggcagaaacgagtaaagaatattttggtatttcgacgtgctgtgttctttttccactgaggcacttacattatgttatgcaaaacgcagcagctatggttcagtttagtaatcctccaattgttaaactacggacagcttagcttccccatgaagtatgttgcgccaaactctgcaaagtataataatgaataagaaacagagtggttgttaattcagtacgaagcatacttactatcatgatcctgtaatgggcagaggaagatttttatatcgttaaatatttgggctggactaattgatgttcatatttggttaggggcttagcatacttttcaaaagtatatgtatctggctatctgttgcttgctcaatatgctgctacattcttggatgcacttgaattttagcctacgttagagttcatggtgctgtgtcagtaaatccacatgcttaaattaaaatggagtggctatttcagttctactatatcaaaggttgcttggcttataactattgttcaacaaaagtgatgtgagtttattgatttcattttcattatggtcatttcttattgcattattatatttttctcaatctaggttgagccattacgcagtgaaagctgctgacttgtgaccacaaggtcctgtgtctgagttgtggaagcctcttgcaaatgcagggaaaggccgtgtactatagacctaataggtctgaccctttcctggaccccacacaagtggggctgccctaagttgtgttttttctttaatatctatctttttgttcaccattcaaaaatcgacatacagaaactgagtgtaagggagttctcatgtcatgagcttaacgccaacctgttgtggccggggacattttcatttgctacttggctggttaagaaccggtcaattttggatggacgacgagtcctggaattaggaaggagcgcttgcgatctttcttaggaaggcatttgaggtgaacattacaacctctgattatgatgacggcgaaattgaaaagaatatatcttacaattgcagagcgaatgccttagatgtgttacctcatattagacacacgtggggagatccatttccagtttgcacaccaaattgggacattgtcattgcaagtgatatcctactctatgtcaaacagtatgacaacttggtcaagacagtgtcctttcttttgaatgagtacaagcagaaggatcacaaatctggctgcataaccatcactgacaaatcagggacacaaatatctgcaaaaccaccggtgtttctaatgagctggcgcagaagaatcggcaagggtcatcaatcactcttcttcgacgggtgtgagaagacgggcctgcaagtgcagcacctgggtgatcttgtgtaccttattagcaataaacaagaggcggattttgtggaaacgaagtcagacggtggcagtagtgaggggatgattttttgagtaggttttgttaagtcatattttgttcaatttcccccaaacacttgattttttgtttctctgattctatttgggatattctgtttgattctgttgcaagattgtttatgcactgaggtggtttataatggcttaagcatgcagcccagcgaggtgatctatgcaggcttaagcgtgctgctctcagtatctgcttttggctttct

SEQ ID NO: 209334 - DNA, 1658 bp, Zea Mays
gccgggccgagaaaccttcccctacggcagtggaccggtgcttctctcgcattcggcctccccttcccaccctcaacagcgaagagcacacatggataccgccgtcttctcccccgccgatctcttccacggagtcgacgacagcgacgacgaccgagatgagatgcaaatctgctccgatggggagaagccggtggcgttggagtatcaggagagagtccacgacttccctgacatggttgagccattacgcagtgaaagctgctgacttgtgaccacaaggtcctgtgtctgagttgtggaagcctcttgcaaatgcagggaaaggccgtgtactatagacctaataggtctgaccctttcctggaccccacacaagtggggctgccctaagttgtgttttttctttaatatctatctttttgttcaccattcaaaaatcgacatacagaaactgagtgtaagggagttctcatgtcatgagcttaacgccaacctgttgtggccggggacattttcatttgctacttggctggttaagaaccggtcaattttggatggacgacgagtcctggaattaggaaggtatggatgttatgctctaactctaatgacatggaagaattttttgtctttcttttctaaccaattcagttcgaatggtcactttatatctgactaaaagttttacaattactcttgttatttccctgtcgggctcagtaagtaactcaaaatatggaccatccttctcttggatttttcttctttgctactagcattgacttgaggcatcttttgtgtttttttgtcattctatcaagactttatccaatgtagtcacaagaacatgatgtgtattctacaacttaaatgtttattcctttttgtttattcatgtttttctgcatacatagtgggacaggagcgcttgcgatctttcttaggaaggcatttgaggtgaacattacaacctctgattatgatgacggcgaaattgaaaagaatatatcttacaattgcagagcgaatgccttagatgtgttacctcatattagacacacgtggggagatccatttccagtttgcacaccaaattgggacattgtcattgcaagtgatatcctactctatgtcaaacagtatgacaacttggtcaagacagtgtcctttcttttgaatgagtacaagcagaaggatcacaaatctggctgcataaccatcactgacaaatcagggacacaaatatctgcaaaaccaccggtgtttctaatgagctggcgcagaagaatcggcaagggtcatcaatcactcttcttcgacgggtgtgagaagacgggcctgcaagtgcagcacctgggtgatcttgtgtaccttattagcaataaacaagaggcggattttgtggaaacgaagtcagacggtggcagtagtgaggggatgattttttgagtaggttttgttaagtcatattttgttcaatttcccccaaacacttgattttttgtttctctgattctatttgggatattctgtttgattctgttgcaagattgtttatgcactgaggtggtttataatggcttaagcatgcagcccagcgaggtgatctatgcaggcttaagcgtgctgctctcagtatctgcttttggctttct

SEQ ID NO: 209335 - DNA, 966 bp, Zea Mays
gcttctctcgcattcggcctccccttcccaccctcaacagcgaagagcacacatggataccgccgtcttctcccccgccgatctcttccacggagtcgacgacagcgacgacgaccgagatgagatgcaaatctgctccgatggggagaagccggtggcgttggagtatcaggagagagtccacgacttccctgacatgaaactgagtgtaagggagttctcatgtcatgagcttaacgccaacctgttgtggccggggacattttcatttgctacttggctggttaagaaccggtcaattttggatggacgacgagtcctggaattaggaagagcgaatgccttagatgtgttacctcatattagacacacgtggggagatccatttccagtttgcacaccaaattgggacattgtcattgcaagtgatatcctactctatgtcaaacagtatgacaacttggtcaagacagtgtcctttcttttgaatgagtacaagcagaaggatcacaaatctggctgcataaccatcactgacaaatcagggacacaaatatctgcaaaaccaccggtgtttctaatgagctggcgcagaagaatcggcaagggtcatcaatcactcttcttcgacgggtgtgagaagacgggcctgcaagtgcagcacctgggtgatcttgtgtaccttattagcaataaacaagaggcggattttgtggaaacgaagtcagacggtggcagtagtgaggggatgattttttgagtaggttttgttaagtcatattttgttcaatttcccccaaacacttgattttttgtttctctgattctatttgggatattctgtttgattctgttgcaagattgtttatgcactgaggtggtttataatggcttaagcatgcagcccagcgaggtgatctatgcaggcttaagcgtgctgctctcagtatctgcttttggctttct

SEQ ID NO: 209336 - DNA, 1460 bp, Zea Mays
attatgaggtccagttttgcttttgggaactagaattcgacgccgctgtggactggtcatggcgtgctaccgcgcatccacggcgccgacggcccaccgaggtctaggaaaaatagaatggttggtatggtagggtaggtgaaccggtgaagattagagggactgagggagagggaccgtgacaccgtgtctagccagccaacctgctgctctagcccacctgcatggcggtgtcagcgccggtcactctctgcccctcggattctcgctccctctcttccgcgctcgtttcttcccgatccaacaagccttcttcacttgatgctgttcggtcacggcggttgaatttgggagattcagcttaactgcagtgcacaccacctgtttgatagaatgcctccttcgtgattccatctgttccctgcccgtctgaagtacgtcatttgtttcctaacagctatgccaacgcagatctccacaaggcagtctcttcggtttgctttaccttcgaacaatgcacgtccaatatcgactgcagcaagaatgacatgttttgctaagaagcaacatattgctgccgtgcccttatgtactttggaggccaaaagctaaagagatatccagagtggccaaatcttacggggctgaatcagtgggtgtgtttgtggatgatgatagtagtactatcttgacagcatctgattcatgcaacctcgatcttatccagcttcatggagatagctcccgagaactacttcctctgctttggaagaacaacaggattatatatgtgctaaatgctgatgaggatggtaaacttatcaatgctcctccaagtgaggaatatgttcttgattggtttttggtggacagtgcaaaaggtggaagtggcaaagggttcaactgggaaaaattccaaatgccaactgttaaaagcaagaacgggtggttattagcaggaggccttcatgcagataatgttcacgaagccgcttctgctctaaagccaaatggcctggatgttagcagtggcatatgttttcctgacggtttacggaaagacccgaagagaatgtgttccttcatgagcagtgtaaaaactttgaatctcctctaacatactagtgctttattggtcgtagtttcttggtgcagtatgtggaaactgaataaatggcagtcctaataaaaataaaaataaaaataaaatgaccatcataggtaagctgtccagaacagaggcattgtcgatctttggcatcaaccagtaaaattcatgcaatgagcagctatatcattttcagcttctcgttaaggcagttcgacacatgtctgtttactgacgtgttgaatgagacatttgattggaatgtgaagagacaactgagtttttgttttgaaattgtctgctcattaggagtactagtgttatactgctagccttttggcgggcatgcatg

SEQ ID NO: 209337 - DNA, 1560 bp, Zea Mays
gggaactagaattcgacgccgctgtggactggtcatggcgtgctaccgcgcatccacggcgccgacggcccaccgaggtctaggaaaaatagaatggttggtatggtagggtaggtgaaccggtgaagattagagggactgagggagagggaccgtgacaccgtgtctagccagccaacctgctgctctagcccacctgcatggcggtgtcagcgccggtcactctctgcccctcggattctcgctccctctcttccgcgctcgtttcttcccgatccaacaagccttcttcacttgatgctgttcggtcacggcggttgaatttgggagattcagcttaactgcagtgcacaccacctgtttgatagaatgcctccttcgtgattccatctgttccctgcccgtctgaagtacgtcatttgtttcctaacagctatgccaacgcagatctccacaaggcagtctcttcggtttgctttaccttcgaacaatgcacgtccaatatcgactgcagcaagaatgacatgttttgctaagaagcaacatattgctgccgtgcccttatgtactttggaggccaaaaggtatgaacctatagtcaaaatgtgtggcattacatctgccttcgatgctgagatggctttgaaggctggagctaaattaattgggatgattctttggcccaagtccaaacgctctatcccattgtctgaagctaaagagatatccagagtggccaaatcttacggggctgaatcagtgggtgtgtttgtggatgatgatagtagtactatcttgacagcatctgattcatgcaacctcgatcttatccagcttcatggagatagctcccgagaactacttcctctgctttggaagaacaacaggattatatatgtgctaaatgctgatgaggatggtaaacttatcaatgctcctccaagtgaggaatatgttcttgattggtttttggtggacagtgcaaaagtggcaaagggttcaactgggaaaaattccaaatgccaactgttaaaagcaagaacgggtggttattagcaggaggccttcatgcagataatgttcacgaagccgcttctgctctaaagccaaatggcctggatgttagcagtggcatatgttttcctgacggtttacggaaagacccgaagagaatgtgttccttcatgagcagtgtaaaaactttgaatctcctctaacatactagtgctttattggtcgtagtttcttggtgcagtatgtggaaactgaataaatggcagtcctaataaaaataaaaataaaaataaaatgaccatcataggtaagctgtccagaacagaggcattgtcgatctttggcatcaaccagtaaaattcatgcaatgagcagctatatcattttcagcttctcgttaaggcagttcgacacatgtctgtttactgacgtgttgaatgagacatttgattggaatgtgaagagacaactgagtttttgttttgaaattgtctgctcattaggagtactagtgttatactgctagccttttggcgggcatgcatg

SEQ ID NO: 209338 - DNA, 2589 bp, Zea Mays
atcaccctcggtatacccctctctcccgcgttcttcattcctaggtcagacggacgcgcatccccgcaagcacgttcccgtgctctcgcagctcgcttctccagaggcgactagggtttgaaggctaccgagagggtgctactgggccaactcctccgaccgcccgcaggcgaaggagctctccgccttcccgccctcgtgtcatccttcccatcgcgacccgcgaggccacgagcccacgagctccagctcttgttattcggaagggttctggatttgggagccaagcgactggcgcagcggcagagcccggcggacacgctcccccctgtcgcccattctcttcctccccgagcggcacccccgcgtgttgccgcttgtagcatcggggagaaaaatacagaggaaggacatgagggatccatttgatgcaccggttgatctcattaatgtggaccataatggtggctatcaactatccaggactggtgcggtttctgctggggaccatggtttacaaaatggtggacccaaatcccttgctccaaactccgacactgtagtcaggcatcaactccagggtgcatccttgcacaaagacttagctcttgaagatcctaatactcgtatcatggatcccgagaccaaggaactttactttagatcacaatcacaagaggacgagatcttgttgcttcgcaagaaaattgctgaggcgtctctcaaggagctgagtttgctgagtgaaaaacacattctggagaggaggctcacagacttgaggatggctgttgacgagaagcaggaagaagctatatctggtgctttgaaacaattgaaccagaagaaaacccatctcgaggacaatatgcgactggcaaatgaactaaaagttgaggaagaagagctatacttttttacttcttcattgcttagcatgctagcagaatacaacatccgcccacctcaaataaatgcatctaccattacaattggcacaaagcgcttgtaccaacagatgcattggaagctcaaatctttaaatgtgatatgcctcaacctggaaacatttataactccagtcatcagcaacagcaagtaaccctaccaagaaatgaagcttccccatcttataatatggtttcaaataagaatgctcttcaacaatatgctcaaggtccaagtgaccgacatattgagcaaatgtaccatggatccagttttcagcaggatactggaggtactactccctctaattattttgaagaaggaagagtagacggtggctcacagttatacccatctgatggtgatgctttacctggtattgagggatttcaaattgctggtgaacctagaccaggatgtcaattaacagcatgcggtttccctacaaatggtactaccctttgcaatttccagtgggttcgccatcttgaaaatggtatcaaacagtctatcgaaggtgccacgatgtatgactatgtggttactgcagatgatgttggtactcttcttgctgtagactgtacgcctatggatgacaacggccgccagggtgatttggtgacagaatttgctaataatgggaataagataacatgtgatccagagatgcagagtcatatcgatgcatgtatttctaaagggagagctgaatttgaagtttttgtcctgcaggcttattctcctgaggaatgggaactggctacattggtgctcacacgacctaattatcagattaagttcaaacagaccggtaatgttgtaattgacgagaagtactcacaaagtctacagacaaaaattccaaatgggcgcacaactcagtttgttttaataactgcgggtacaactcttccatttaacacacagggaatatcagagccaaacaatgaggattacgatgttaggttacgtgatctaatcgtattagtcatgagaacttttcagaaaaaggctctagatgctaaaaggaaaggaaaggcttagaattcatgtaaatcttttacaaaagtagaaccgtagaagattttcctatttctgattgttttgtgcagtatttgataatttttgtccttgaggtggaatgagcttctcgatagagcaggaatttcaagagttacctggtgggcacataaatggttagaggaacgtaggatcgattcttatcctaattcttttttccttcgcattgcttactctaagttaagccatgtcactgcggtctttgtaaattctaagcagccagtgctgcaaataaacctatgagatgttcgctgcagctcttggatgacttaacatgcccatatgattgttgattttgtttatcatgttgatcaccatgctgctacttacactatgttcacaaagaatagcggtatgggttctcaatatggccataacccattccttttgcgtttccattaacggtgcttcaaccatacagcacaccgcatgaaagaactagcctgaatagcaatttccaaacgtatgctccgtttgggcttcagcttgcaaatgagcggcaaccactacgaatttcccagatccagaaaaaagggaagaagttaaaaaaaaaagaataaa

SEQ ID NO: 209339 - DNA, 2565 bp, Zea Mays
atcaccctcggtatacccctctctcccgcgttcttcattcctaggtcagacggacgcgcatccccgcaagcacgttcccgtgctctcgcagctcgcttctccagaggcgactagggtttgaaggctaccgagagggtgctactgggccaactcctccgaccgcccgcaggcgaaggagctctccgccttcccgccctcgtgtcatccttcccatcgcgacccgcgaggccacgagcccacgagctccagctcttgttattcggaagggttctggatttgggagccaagcgactggcgcagcggcagagcccggcggacacgctcccccctgtcgcccattctcttcctccccgagcggcacccccgcgtgttgccgcttgtagcatcggggagaaaaatacagaggaaggacatgagggatccatttgatgcaccggttgatctcattaatgtggaccataatggtggctatcaactatccaggactggtgcggtttctgctggggaccatggtttacaaaatggtggacccaaatcccttgctccaaactccgacactgtagtcaggcatcaactccagggtgcatccttgcacaaagacttagctcttgaagatcctaatactcgtatcatggatcccgagaccaaggaactttactttagatcacaatcacaagaggacgagatcttgttgcttcgcaagaaaattgctgaggcgtctctcaaggagctgagtttgctgagtgaaaaacacattctggagaggaggctcacagacttgaggatggctgttgacgagaagcaggaagaagctatatctggtgctttgaaacaattgaaccagaagaaaacccatctcgaggacaatatgcgactggcaaatgaactaaaagttgaggaagaagagctatacttttttacttcttcattgcttagcatgctagcagaatacaacatccgcccacctcaaataaatgcatctaccattacaattggcacaaagcgcttgtaccaacagatgcattggaagctcaaatctttaaatgtgatatgcctcaacctggaaacatttataactccagtcatcagcaacagcaagtaaccctaccaagaaatgaagcttccccatcttataatatggtttcaaataagaatgctcttcaacaatatgctcaaggtccaagtgaccgacatattgagcaaatggatactggaggtactactccctctaattattttgaagaaggaagagtagacggtggctcacagttatacccatctgatggtgatgctttacctggtattgagggatttcaaattgctggtgaacctagaccaggatgtcaattaacagcatgcggtttccctacaaatggtactaccctttgcaatttccagtgggttcgccatcttgaaaatggtatcaaacagtctatcgaaggtgccacgatgtatgactatgtggttactgcagatgatgttggtactcttcttgctgtagactgtacgcctatggatgacaacggccgccagggtgatttggtgacagaatttgctaataatgggaataagataacatgtgatccagagatgcagagtcatatcgatgcatgtatttctaaagggagagctgaatttgaagtttttgtcctgcaggcttattctcctgaggaatgggaactggctacattggtgctcacacgacctaattatcagattaagttcaaacagaccggtaatgttgtaattgacgagaagtactcacaaagtctacagacaaaaattccaaatgggcgcacaactcagtttgttttaataactgcgggtacaactcttccatttaacacacagggaatatcagagccaaacaatgaggattacgatgttaggttacgtgatctaatcgtattagtcatgagaacttttcagaaaaaggctctagatgctaaaaggaaaggaaaggcttagaattcatgtaaatcttttacaaaagtagaaccgtagaagattttcctatttctgattgttttgtgcagtatttgataatttttgtccttgaggtggaatgagcttctcgatagagcaggaatttcaagagttacctggtgggcacataaatggttagaggaacgtaggatcgattcttatcctaattcttttttccttcgcattgcttactctaagttaagccatgtcactgcggtctttgtaaattctaagcagccagtgctgcaaataaacctatgagatgttcgctgcagctcttggatgacttaacatgcccatatgattgttgattttgtttatcatgttgatcaccatgctgctacttacactatgttcacaaagaatagcggtatgggttctcaatatggccataacccattccttttgcgtttccattaacggtgcttcaaccatacagcacaccgcatgaaagaactagcctgaatagcaatttccaaacgtatgctccgtttgggcttcagcttgcaaatgagcggcaaccactacgaatttcccagatccagaaaaaagggaagaagttaaaaaaaaaagaataaa

SEQ ID NO: 209340 - DNA, 2589 bp, Zea Mays
atcaccctcggtatacccctctctcccgcgttcttcattcctaggtcagacggacgcgcatccccgcaagcacgttcccgtgctctcgcagctcgcttctccagaggcgactagggtttgaaggctaccgagagggtgctactgggccaactcctccgaccgcccgcaggcgaaggagctctccgccttcccgccctcgtgtcatccttcccatcgcgacccgcgaggccacgagcccacgagctccagctcttgttattcggaagggttctggatttgggagccaagcgactggcgcagcggcagagcccggcggacacgctcccccctgtcgcccattctcttcctccccgagcggcacccccgcgtgttgccgcttgtagcatcggggagaggaaggacatgagggatccatttgatgcaccggttgatctcattaatgtggaccataatggtggctatcaactatccaggactggtgcggtttctgctggggaccatggtttacaaaatggtggacccaaatcccttgctccaaactccgacactgtagtcaggcatcaactccagggtgcatccttgcacaaagacttagctcttgaagatcctaatactcgtatcatggatcccgagaccaaggaactttactttagatcacaatcacaagaggacgagatcttgttgcttcgcaagaaaattgctgaggcgtctctcaaggagctgagtttgctgagtgaaaaacacattctggagaggaggctcacagacttgaggatggctgttgacgagaagcaggaagaagctatatctggtgctttgaaacaattgaaccagaagaaaacccatctcgaggacaatatgcgactggcaaatgaactaaaagttgaggaagaagagctatacttttttacttcttcattgcttagcatgctagcagaatacaacatccgcccacctcaaataaatgcatctaccattacaattggcacaaagcgcttgtaccaacagatgcattggaagctcaaatctttaaatgacaatttaggtgatatgcctcaacctggaaacatttataactccagtcatcagcaacagcaagtaaccctaccaagaaatgaagcttccccatcttataatatggtttcaaataagaatgctcttcaacaatatgctcaaggtccaagtgaccgacatattgagcaaatgtaccatggatccagttttcagcaggatactggaggtactactccctctaattattttgaagaaggaagagtagacggtggctcacagttatacccatctgatggtgatgctttacctggtattgagggatttcaaattgctggtgaacctagaccaggatgtcaattaacagcatgcggtttccctacaaatggtactaccctttgcaatttccagtgggttcgccatcttgaaaatggtatcaaacagtctatcgaaggtgccacgatgtatgactatgtggttactgcagatgatgttggtactcttcttgctgtagactgtacgcctatggatgacaacggccgccagggtgatttggtgacagaatttgctaataatgggaataagataacatgtgatccagagatgcagagtcatatcgatgcatgtatttctaaagggagagctgaatttgaagtttttgtcctgcaggcttattctcctgaggaatgggaactggctacattggtgctcacacgacctaattatcagattaagttcaaacagaccggtaatgttgtaattgacgagaagtactcacaaagtctacagacaaaaattccaaatgggcgcacaactcagtttgttttaataactgcgggtacaactcttccatttaacacacagggaatatcagagccaaacaatgaggattacgatgttaggttacgtgatctaatcgtattagtcatgagaacttttcagaaaaaggctctagatgctaaaaggaaaggaaaggcttagaattcatgtaaatcttttacaaaagtagaaccgtagaagattttcctatttctgattgttttgtgcagtatttgataatttttgtccttgaggtggaatgagcttctcgatagagcaggaatttcaagagttacctggtgggcacataaatggttagaggaacgtaggatcgattcttatcctaattcttttttccttcgcattgcttactctaagttaagccatgtcactgcggtctttgtaaattctaagcagccagtgctgcaaataaacctatgagatgttcgctgcagctcttggatgacttaacatgcccatatgattgttgattttgtttatcatgttgatcaccatgctgctacttacactatgttcacaaagaatagcggtatgggttctcaatatggccataacccattccttttgcgtttccattaacggtgcttcaaccatacagcacaccgcatgaaagaactagcctgaatagcaatttccaaacgtatgctccgtttgggcttcagcttgcaaatgagcggcaaccactacgaatttcccagatccagaaaaaagggaagaagttaaaaaaaaaagaataaa

SEQ ID NO: 209341 - DNA, 1742 bp, Zea Mays
tgctagtaaaaatacagatatacagctggtgctcgtacagtactccgcaagtccgcatacatacacagccacttcatttttaaagcattttacctgtgagctcggattttttaaagtgcagaacatgttcccatcgcctcaaatccagcgccgcaccaaatccgggacaagaatttaccacctctccatccatctcgttgcctgcctgcctgcctcgggctgcgactccactggacgaccctacttcaccctggtcttccaccccaccccacgcacacgaagacagagagagccctccgggcgtcgattccgccatactgccaccattactgacgccccctcaccgcctccgggcccaacgagcaagccagggaaggggagccgaggcctcgcctacgcctaggcacgcccctccccctgcgcgacatgtcaggggaccgctcgcccacggtagagcgccggcgggggatccggcgcctcctgctgcatccccgcggcgaggcctcctcgtcctcgcctccgccgccggcgccggcgcctgaggaggggaggcggaaggggttcgccacggcggcgctgcgcggcctgggctgcacgtcggcgtccgcgtcgcaggcgtacgcgcccggggaggccgcggcggcggcggccgtgcggtcgtcggcggactggcaaggtcggcggcgcaggagggggagggacaggaggaaggagcgtggcgggggcggaggaggaggcttcgtcaccggtgggatcggcgccgacgtgtggtgcgcacccggcatacccttcgcggcggaggcgtcctccgtgaactgcgtggtggcgcgccaccagatggtggggaggggcggccgcggcgccgagggggacaggtcccacagagagaggccgtgcttgtcccggagggtgaccgtgcaggagcagatatcctcgtccttcatggactcgccgccgccgccgcacctcgatgcccccttattcggcgccgatctcatcccctccggccgcctccgccggatgcgcgggtggcgccactcccccggaggactcgaggaagagataaggatgtttcagacaagagtgttactgggaggaatgaacatgtatgaccgctaccaggattggcgccttgacgttgataacatgacatacgaggagttgctcgagcttggagacaaaattggatatgtcaacacagggttacgtgacgacgagattactcgcaaccttcggaaggtcaagcacccatccttcagttccttacggttcgcaacagaaatggaaagaaaatgcagcatttgccaagaagaatttgaaacaaatgaagagatgggaaggctagactgtggccatagctaccatgtgtactgcatcaagcagtggctctcgcagaagaacatttgcccagtttgcaagactgccgtcagcaagaattgaaatccaaactccagtcacgctgtctgtagatctcggtgaaaacagcaaattctgttgtcctgtacagtccgttatatatattattattgtatgaacacaatccatttgtttcatcttgcagaaagaaaatgccatgttttggtcatgttccagcaaactacagacttgataccctcttatcttagagtgattaggaaaaggttttgcagtaacagataggatgaacctctttcataatgtatctaggctctatttagattttgtggtctttaacctatttagattccatggtcttagctaca

SEQ ID NO: 209342 - DNA, 932 bp, Zea Mays
gaactgcgtggtggcgcgccaccagatggtggggaggggcggccgcggcgccgagggggacaggtcccacagagagagaggccgtgcttgtcccggagggtgaccgtgcaggagcagatatcctcgtccttcatggactcgccgccgccgccgcacctcgatgcccccttattcggcgccgatctcatcccctccggccgcctccgccggatgcgcgggtggcgccactcccccggaggactcgaggaagagataaggatgtttcagacaagagtgttactgggaggaatgaacatgtatgaccgctaccaggattggcgccttgacgttgataacatgacatacgaggagttgctcgagcttggagacaaaattggatatgtcaacacagggttacgtgacgacgagattactcgcaaccttcggaaggtcaagcacccatccttcagttccttacggttcgcaacagaaatggaaagaaaatgcagcatttgccaagaagaatttgaaacaaatgaagagatgggaaggctagactgtggccatagctaccatgtgtactgcatcaagcagtggctctcgcagaagaacatttgcccagtttgcaagactgccgtcagcaagaattgaaatccaaactccagtcacgctgtctgtagatctcggtgaaaacagcaaattctgttgtcctgtacagtccgttatatatattattattgtatgaacacaatccatttgtttcatcttgcagaaagaaaatgccatgttttggtcatgttccagcaaactacagacttgataccctcttatcttagagtgattaggaaaaggttttgcagtaacagataggatgaacctctttcataatgtatctaggctctatttagattttgtggtctttaacctatttagattccatggtcttagctaca

SEQ ID NO: 209343 - DNA, 1073 bp, Zea Mays
agcgaatccgttgggatcttgctccagagtacaggttggagatgacacatgtgtttccaagggaaggtgcctcatctagctcaacctcaatgagcagccagaggagtgaaactgatgatgataggatgattgcaatggttctctctgaagaatatgccaagttagatggtgctatggccaagcgtcttactaatttaacatcaattccccttgttccccggattaatacatacttcccgacatatagtgatgctactatggaccattatcgcctccttgacaggttaaatgcatacggcttgtttgaggtgagagtgtctggtgatggaaattgtcagtttcgtgcactctcagaccaactatatagatcacccgattatcacaagaatgttcgaaaggagattgtaaaacagctcaaggaatgtaactccttatatgaaggttacgttccaatgaaatataaacattattgcaagaaaatgaagaagtatggtgaatggggtgaccatgtcacgctacaagcagctgctgacaagtttgctgcaaagatatgtcttctaacatcattcagagatacctgttttgttgaaattgttccacaatatcaagctccacagagagagatttggctgagtttctggtccgaagttcactataactcactgtacgatgctcgagatctccctagcaaatacaagcctagaaagaagcattggttgttgttttgatatccacgcgggggtttgcttcttaatggtggaatcatattgcttgaccgcttcgaccaccggccgctggtggcagcctggtcatagctcattgtggctctatccactatatagctatgcatcaatgatccattgtattgctcggtacaactccatcacgatccaggcatacaacactagatacagttacaatgccgaacctgagccttgtgaatagatactcctttactgacatacaggttgattgtataccatgtcctatttgttcattgttatattctttatttatacagttacatattattaatcttcatcagttcattattcagttcatatttggaagaa

SEQ ID NO: 209344 - DNA, 638 bp, Zea Mays
gctcttctcattactgacaggcgccagagagagagagagagagaccacaactcctctcgcctcgcctcgcctcgcctcccccggggaagaagaggaggagagggagctgagcagcagccggccgacgcgggaatgctcgtcggcggcgggcgggacgacgaggaggtgctccggaagctcaagagcatggacgtggacaagatggagaacggcggcggcggcggtgaggcggagagcccgcgccccgccgtcaagtaccacggctggaaggccatgcccttcatcatcgggaacgagacgttcgagaagctggggacgctgggcacgtcggccaacctgctggtgtacctgacgcaggtgttccacatgcggagcgtggacgcggccacgctgctcaacgggctcaacggcaccaccagcctcgcccccatcgtcggcgccttcctctccgacgcctacctcggccgctacctcgcgctcgccatcgcttccatagcctccctcatcatggcgggcggcacatgggacgagcgcacacgtgcacgctcgctcactggctcctcgtggtcgcttcttctccgagaatctggacgagcggcgggcgtgtttggttttgctgctgccttatactaccttag

SEQ ID NO: 209345 - DNA, 617 bp, Zea Mays
gctcttctcattactgacaggcgccagagagagagagagagagaccacaactcctctcgcctcgcctcgcctcgcctcccccggggaagaagaggaggagagggagctgagcagcagccggccgacgcgggaatgctcgtcggcggcgggcgggacgacgaggaggtgctccggaagctcaagagcatggacgtggacaagatggagaacggcggcggcggcggtgaggcggagagcccgcgccccgccgtcaagtaccacggctggaaggccatgcccttcatcatcgggaacgagacgttcgagaagctggggacgctgggcacgtcggccaacctgctggtgtacctgacgcaggtgttccacatgcggagcgtggacgcggccacgctgctcaacgggctcaacggcaccaccagcctcgcccccatcgtcggcgccttcctctccgacgcctacctcggccgctacctcgcgctcgccatcgcttccatagcctccctcatcgtgcgctcgtcctcctggccgggtcgtgtggcccagatgcccaccggccagacaggagctgcgtccgcgttgcgtcggcggtgcggtggggacggagatccggtgccctg

SEQ ID NO: 209346 - DNA, 1253 bp, Zea Mays
ctggaatttcttgccaacagccctctgcgggctgcggctctgcccttcttcctgcagtagagagccgccgcccctcccaaatccccttctccctcacgtctctctctccccaagccgctcctcaccaagcccatctcagccgctccctccagccctcacctcgccggccctagctgctggtcgccgtcgaccgcgagctctccaacgcaggcggctcgctgcgccttcccctcgccggtcatccctgctccctcggcttccaaaccatggccgcctctcctccatctcctccctccccagcgcctccctctctgctcctgcactcggagcccagtactccagctcgccaacgctccctccctgctcaccggccaccaggaagctcgccccatcccctgacttgtcgtgtcttgggccgtcacggcactctcatcttgcgtcgtcgccttattgctgttctgttgggaggtggagaagaaaggaactctagtgcatcacacaccttgtgcttgacgaaatgtttgaatcagaatttatcatcgcatccgcaatttggtttaatcatgcactacggcatgattaatggagttactgaagaagggcacccaattcaattgcccccggttgctgatcggacatttcatttgctcaaacagaagttggtccaagctcctgttctaggtcttcctaacgacttcagcaagggtttcgtgctagaaacagctgtcttcatgcaatcgaagaatctcgtggcttatttgaataagcacctttgtccaagaaaccaagcttcatcgaggagtgtttggcaatctttatggcaattattgacgaatggcggccatacttgcagcaccgtcaaatcgtgattgtactccatcttactgagcagagggtgaccttacgtttgtagcataaagtcctgctcaagctcattgacttgcattatcaaattcgcacaaacaggcaacggctgtaccgagcgactgatttggcacatatatatataagccgagacagtgggagaggagagctggacaacaggcaacgaattgtaattgaatcttctgaatactaaaggaaagcggtcacatcccattaatttgcacggtctctgtgggctgattccccacccttactcatccttatctctcatttcaaacttgtaaacagtacagtctcccatttatatgaatctatcattatgtatacgacgatatatataataatatagactattgcttaaatttaaa

SEQ ID NO: 209347 - DNA, 1156 bp, Zea Mays
ctggaatttcttgccaacagccctctgcgggctgcggctctgcccttcttcctgcagtagagagccgccgcccctcccaaatccccttctccctcacgtctctctctccccaagccgctcctcaccaagcccatctcagccgctccctccagccctcacctcgccggccctagctgctggtcgccgtcgaccgcgagctctccaacgcaggcggctcgctgcgccttcccctcgccggtcatccctgctccctcggcttccaaaccatggccgcctctcctccatctcctccctccccagcgcctccctctctgctcctgcactcggagcccagtactccagctcgccaacgctccctccctgctcaccggccaccaggaagctcgccccatcccctgacttgtcgtgtcttgggccgtcacggcactctcatcttgcgtcgtcgccttattgctgttctggtggagaagaaaggaactctagtgcatcacacaccttgtgcttgacgaaatgtttgaatcagaatttatcatcgcatccgcaatttggtttaatcatgaagttggtccaagctcctgttctaggtcttcctaacgacttcagcaagggtttcgtgctagaaacagctgtcttcatgcaatcgaagaatctcgtggcttatttgaataagcacctttgtccaagaaaccaagcttcatcgaggagtgtttggcaatctttatggcaattattgacgaatggcggccatacttgcagcaccgtcaaatcgtgattgtactccatcttactgagcagagggtgaccttacgtttgtagcataaagtcctgctcaagctcattgacttgcattatcaaattcgcacaaacaggcaacggctgtaccgagcgactgatttggcacatatatatataagccgagacagtgggagaggagagctggacaacaggcaacgaattgtaattgaatcttctgaatactaaaggaaagcggtcacatcccattaatttgcacggtctctgtgggctgattccccacccttactcatccttatctctcatttcaaacttgtaaacagtacagtctcccatttatatgaatctatcattatgtatacgacgatatatataataatatagactattgcttaaatttaaa

SEQ ID NO: 209348 - DNA, 1235 bp, Zea Mays
ctggaatttcttgccaacagccctctgcgggctgcggctctgcccttcttcctgcagtagagagccgccgcccctcccaaatccccttctccctcacgtctctctctccccaagccgctcctcaccaagcccatctcagccgctccctccagccctcacctcgccggccctagctgctggtcgccgtcgaccgcgagctctccaacgcaggcggctcgctgcgccttcccctcgccggtcatccctgctccctcggcttccaaaccatggccgcctctcctccatctcctccctccccagcgcctccctctctgctcctgcactcggagcccagtactccagctcgccaacgctccctccctgctcaccggccaccaggaaggtccgagctcgcccatcctctgctcggtttcaacttcggtcgtgcctgcagaccgctcccttgctcctgcagctcgccccatcccctgacttgtcgtgtcttgggccgtcacggcactctcatcttgcgtcgtcgccttattgctgttctgttgggaggtggagaagaaaggaactctagtgcatcacacaccttgtgcttgacgaaatgtttgaatcagaatttatcatcgcatccgcaatttggtttaatcatgaagttggtccaagctcctgttctaggtcttcctaacgacttcagcaagggtttcgtgctagaaacagctgtcttcatgcaatcgaagaatctcgtggcttatttgaataagcacctttgtccaagaaaccaagcttcatcgaggagtgtttggcaatctttatggcaattattgacgaatggcggccatacttgcagcaccgtcaaatcgtgattgtactccatcttactgagcagagggtgaccttacgtttgtagcataaagtcctgctcaagctcattgacttgcattatcaaattcgcacaaacaggcaacggctgtaccgagcgactgatttggcacatatatatataagccgagacagtgggagaggagagctggacaacaggcaacgaattgtaattgaatcttctgaatactaaaggaaagcggtcacatcccattaatttgcacggtctctgtgggctgattccccacccttactcatccttatctctcatttcaaacttgtaaacagtacagtctcccatttatatgaatctatcattatgtatacgacgatatatataataatatagactattgcttaaatttaaa

SEQ ID NO: 209349 - DNA, 1318 bp, Zea Mays
ctggaatttcttgccaacagccctctgcgggctgcggctctgcccttcttcctgcagtagagagccgccgcccctcccaaatccccttctccctcacgtctctctctccccaagccgctcctcaccaagcccatctcagccgctccctccagccctcacctcgccggccctagctgctggtcgccgtcgaccgcgagctctccaacgcaggcggctcgctgcgccttcccctcgccggtcatccctgctccctcggcttccaaaccatggccgcctctcctccatctcctccctccccagcgcctccctctctgctcctgcactcggagcccagtactccagctcgccaacgctccctccctgctcaccggccaccaggaaggtccgagctcgcccatcctctgctcggtttcaacttcggtcgtgcctgcagaccgctcccttgctcctgcagctcgccccatcccctgacttgtcgtgtcttgggccgtcacggcactctcatcttgcgtcgtcgccttattgctgttctggtggagaagaaaggaactctagtgcatcacacaccttgtgcttgacgaaatgtttgaatcagaatttatcatcgcatccgcaatttggtttaatcatgcactacggcatgattaatggagttactgaagaagggcacccaattcaattgcccccggttgctgatcggacatttcatttgctcaaacagaagttggtccaagctcctgttctaggtcttcctaacgacttcagcaagggtttcgtgctagaaacagctgtcttcatgcaatcgaagaatctcgtggcttatttgaataagcacctttgtccaagaaaccaagcttcatcgaggagtgtttggcaatctttatggcaattattgacgaatggcggccatacttgcagcaccgtcaaatcgtgattgtactccatcttactgagcagagggtgaccttacgtttgtagcataaagtcctgctcaagctcattgacttgcattatcaaattcgcacaaacaggcaacggctgtaccgagcgactgatttggcacatatatatataagccgagacagtgggagaggagagctggacaacaggcaacgaattgtaattgaatcttctgaatactaaaggaaagcggtcacatcccattaatttgcacggtctctgtgggctgattccccacccttactcatccttatctctcatttcaaacttgtaaacagtacagtctcccatttatatgaatctatcattatgtatacgacgatatatataataatatagactattgcttaaatttaaa

SEQ ID NO: 209350 - DNA, 1549 bp, Zea Mays
ccttccccacccgcgaggagctcgtcgcggcgggccgctccgacctcgcggatgccgtcgcgtccagcgggggctggctctccctcggctggtcctccaccgccgcggaggggcccgcgacgatggctgcgccgcgctcatcgggcgggggccaccctgactacccgcccgagacgggcgtgtattaccgtggtgacctagcgccgggctcagtggatgactccgagtgggaggaggaggaggaggacgacgacgaagaggaggcgtcatcatctgggcgggagccggaaacagaggagaccaggttcaaatcaggaatcgaggggatgctcaccaggctgcagaaggatagggagcaagcgcggccacctccacggagtagtacccacgacacacgggaacaaagtgatgatgatgctttagctggcaacagtggcgctcctagtcatatagcggctggcggcagacatattcgaagggtacctgagaatggaagtgtccgtggatctcattatcaaaatggaataatagagggcaacaacaccttagagagttcgagcaatgatgcatggaaaacatggacccttggcaagggtggtttatctcattttgaagtggctgaggtcctacctactgaaagaagaaaattatcccaacatggtgacattgcatctgtgcaaaatgatgttcaaaggtcatctaatggtgtggctgtaagtgattatcctagtgatggtgttggcactgaaagagatgagatacattcacgtcttcaaagtctggaattggacctttcttctgctctgaagacattaagatcaagatttgataaagtcttatcacatatgtcaaatagtaatggagcaactgtgctagatgacatctctgatgattgggaacttgaggagacaaaggtaatgcaagctcaggaggagcttagatcaatccgggccaaaatagctgtgttagaagggaagatcgcacttgagataattgaaaggaacaaaataattgaagataaacaaaggaggcttgatgaagttgagaaagcactgaatgagctccgtactgtttgtattatgtgggccaaccctgctacagatgttttgctggttgggtcctttgatggctggacaagccaaagaaagttggaaagatcagaaaacggcatgttttccttaaatctgagactgtaccctggtagatatgagattaagtttatcgttgacggtgtttggaagaatgatccgctgcgacccaccgtgcataacaatgggcatgaaaacaaccttctgcttgtcacttgacttgaagtttgcacccggtagcatttttgtagatcatttgcctagcaccttgtcggtcccccatgagttacattatcgtcgttctaacccccacatagaatgcagctaagaatcgccggggggattttgtttacggtgggaagggatttcttccagtgaaggtacggcattcgtttatccaggtctgcgtcactgaagtgctgaaggcatgtcatcggagtaaatgcttgtaatcataagct

SEQ ID NO: 209351 - DNA, 1560 bp, Zea Mays
attggctggccaccgcctgtagccctctcctgatcttcctctcgcctccctcctctgcctctgcgcttcacttcaattctcctcctcgccgagcgggagcgccgagagagatgcgaccgcgatgcccccactcgtcccctcccagctcctaccaccaatcccaaccctgatcctacccgcgccacctcgcctctcctgccgccgccgccgccacccgcccgcaccgctcgccgcgtcgtcgtcctcctccgcgtccccgcactccaggcaaccataccgccgccgccgccttgaagcccagcggcagacaccgacgcctgcgccgcgcccgccctcccagccaaagccgcctccgcgccacgcaaatgccaccgcgtcccgcgctcggggccaggaggagctggaggcggcgatttacgacttcatgtgccgctccgccaagccgggagccggaaacagaggagaccaggttcaaatcaggaatcgaggggatgctcaccaggctgcagaaggatagggagcaagcgcggccacctccacggagtagtacccacgacacacgggaacaaagtgatgatgatgctttagctggcaacagtggcgctcctagtcatatagcggctggcggcagacatattcgaagggtacctgagaatggaagtgtccgtggatctcattatcaaaatggaataatagagggcaacaacaccttagagagttcgagcaatgatgcatggaaaacatggacccttggcaagggtggtttatctcattttgaagtggctgaggtcctacctactgaaagaagaaaattatcccaacatggtgacattgcatctgtgcaaaatgatgttcaaaggtcatctaatggtgtggctgtaagtgattatcctagtgatggtgttggcactgaaagagatgagatacattcacgtcttcaaagtctggaattggacctttcttctgctctgaagacattaagatcaagatttgataaagtcttatcacatatgtcaaatagtaatggagcaactgtgctagatgacatctctgatgattgggaacttgaggagacaaaggtaatgcaagctcaggaggagcttagatcaatccgggccaaaatagctgtgttagaagggaagatcgcacttgagataattgaaaggaacaaaataattgaagataaacaaaggaggcttgatgaagttgagaaagcactgaatgagctccgtactgtttgtattatgtgggccaaccctgctacagatgttttgctggttgggtcctttgatggctggacaagccaaagaaagttggaaagatcagaaaacggcatgttttccttaaatctgagactgtaccctggtagatatgagattaagtttatcgttgacggtgtttggaagaatgatccgctgcgacccaccgtgcataacaatgggcatgaaaacaaccttctgcttgtcacttgacttgaagtttgcacccggtagcatttttgtagatcatttgcctagcaccttgtcggtcccccatgagttacattatcgtcgttctaac

SEQ ID NO: 209352 - DNA, 1796 bp, Zea Mays
attggctggccaccgcctgtagccctctcctgatcttcctctcgcctccctcctctgcctctgcgcttcacttcaattctcctcctcgccgagcgggagcgccgagagagatgcgaccgcgatgcccccactcgtcccctcccagctcctaccaccaatcccaaccctgatcctacccgcgccacctcgcctctcctgccgccgccgccgccacccgcccgcaccgctcgccgcgtcgtcgtcctcctccgcgtccccgcactccaggcaaccataccgccgccgccgccttgaagcccagcggcagacaccgacgcctgcgccgcgcccgccctcccagccaaagccgcctccgcgccacgcaaatgccaccgcgtcccgcgctcggggccaggaggagctggaggcggcgatttacgacttcatgtgccgctccgccaagccgggagccggaaacagaggagaccaggttcaaatcaggaatcgaggggatgctcaccaggctgcagaaggatagggagcaagcgcggccacctccacggagtagtacccacgacacacgggaacaaagtgatgatgatgctttagctggcaacagtggcgctcctagtcatatagcggctggcggcagacatattcgaagggtacctgagaatggaagtgtccgtggatctcattatcaaaatggaataatagagggcaacaacaccttagagagttcgagcaatgatgcatggaaaacatggacccttggcaagggtggtttatctcattttgaagtggctgaggtcctacctactgaaagaagaaaattatcccaacatggtgacattgcatctgtgcaaaatgatgttcaaaggtcatctaatggtgtggctgtaagtgattatcctagtgatggtgttggcactgaaagagatgagatacattcacgtcttcaaagtctggaattggacctttcttctgctctgaagacattaagatcaagatttgataaagtcttatcacatatgtctgttgtttactttttcagtcaaatagtaatggagcaactgtgctagatgacatctctgatgattgggaacttgaggagacaaaggtaatgcaagctcaggaggagcttagatcaatccgggccaaaatagctgtgttagaagggaagatcgcacttgagataattgaaaggaacaaaataattgaagataaacaaaggaggcttgatgaagttgagaaagcactgaatgagctccgtactgtttgtattatgtgggccaaccctgctacagatgttttgctggttgggtcctttgatggctggacaagccaaagaaagttggaaagatcagaaaacggcatgttttccttaaatctgagactgtaccctggtagatatgagattaagtttatcgttgacggtgtttggaagaatgatccgctgcgacccaccgtgcataacaatgggcatgaaaacaaccttctgcttgtcacttgacttgaagtttgcacccggtagcatttttgtagatcatttgcctagcaccttgtcggtcccccatgtaactaatcaactttcccttcaattttttctttcttttctagataggtgtgtgcaacataaacagtgtagggtgttattgaaacctgttgagataggagaaggaagtagatgcatattcttttgttcccatcgttctccccggtgttggtccagcttcatgattttgtttaacaatgttgtgatgtacatatgcagtgaggtggtctattatcgaaattatttcaaaatttgtttgcag

SEQ ID NO: 209353 - DNA, 833 bp, Zea Mays
gtcgcggcgggccgctccgacctcgcggatgccgtcgcgtccagcgggggctggctctccctcggctggtcctccaccgccgcggaggggcccgcgacgatggctgcgccgcgctcatcgggcgggggccaccctgactacccgcccgagacgggcgtgtattaccgtggtgacctagcgccgggctcagtggatgactccgagtgggaggaggaggaggaggacgacgacgaagaggaggcgtcatcatctgggcgggagccggaaacagaggagaccaggttcaaatcaggaatcgaggggatgctcaccaggctgcagaaggatagggagcaagcgcggccacctccacggagtagtacccacgacacacgggaacaaagtgatgatgatgctttagctggcaacagtggcgctcctagtcatatagcggctggcggcagacatattcgaagggtacctgagaatggaagtgtccgtggatctcattatcaaaatggaataatagagggcaacaacaccttagagagttcgagcaatgatgcatggaaaacatggacccttggcaagggtggtttatctcattttgaagtggctgaggtcctacctactgaaagaagaaaattatcccaacatggtgacattgcatctgtgcaaaatgatgttcaaaggtcatctaatggtgtggctgtaagtgattatcctagtgatggtgttggcactgaaagagatgagatacattcacgtcttcaaagtctggaattggacctttcttctgctctgaagacattaagatcaagatttgataaagtcttatcacatatgtctgttgt

SEQ ID NO: 209354 - DNA, 1577 bp, Zea Mays
acacagcccacttgcttaacgcgagaaaccctcctcctccccccatttcctacatcttccagactaaaaccccaggcctcgcgagtcgccgccgaccgccgcaaccacgcgctacgcccccgatggctcacctccggctcctcttctcatacttgcggcggaacccgcagcgccaccgcctgctctcactcttccacttctcctccgacgccaagtccagctccgcctcgccgccgcctcctcccatcaagcccgtctcctacgctccgaagccgcagcagcaggccccgcccgaggagtctgccgccccgacaaccccagacgttgcccctagggaccaatccccactgccacgacggcctcagcagccgatgccgccgcgggagtggacgcggcaggatatgcggtacgtgaaggacgcggcgcccgcgatctcgcccgtctcgtacccgtccagggtcgcgccgctgccggaggaccgtccggtcggcggcgaggtggaggaggtgcaggacggggggctgcagggggagtcggagcggatccagatgaacgcggcgcgtcccaccaggagcgtctttgggatgcacgaggaggataggctgccgtacccgacggtcatacccgtcgtcaagcggccgcagaaggtcgccattgatttaatcgacgccatccgcctagttaagactagtgcaaacgagaagaagcggaattttgttgaaactgttgaagctcatgtgatattaggtgttgatcctcgtcgtggtgaccagatggttcgtggcgccttaacattgcctcatggcactggcaagactgttagggtagcagtatttgctgaaggtcctggagcagacgaagctagagctgccggagcagatgttgttggtggtgatgagttgattgaggagatccgcacaggaggaggcaaactaagctttgacaagtgcatagcaaccccaatgttcatgccccgattgtcaaaggttgctaggatattgggtccacgtggtttgatgcctaatcctaagctaggatctgtgacgaatgatgtttctggtgcggtcaaagcggcaaaatcaggacgtgttgatttcaaaatagataaaactgctatagtgcatgttggccttgggaaggtaaactttactgaggagagtttacgtgaaaatattggtgcttttgtgcatgcacttttacttgctaagccagtgggcttaaagaaaacttcaaaatatgtcggatatgtgaagaagttcacactgagtagcacaatgggacccggacttcctgttaccataccatcactatctgtggccgccgatcactataacaaggttcaagtcagctaagtcaatacagtagaacatcgaatgtagctttctttctccaatagccgtggcctgcagatggcggtggagcttaaccagtcagcaaggttgagatttgggtggcttgctgttttgttattggggataataccttttgtggacaaggatcattcaacaaacatcataacctataactttattttatccttgtcactgcaattttgagattgcgttgctggtcaagaa

SEQ ID NO: 209355 - DNA, 1092 bp, Zea Mays
caacaaattaatgatgcacgaagaactattacttgagatggttcgtggcgccttaacattgcctcatggcactggcaagactgttagggtagcagtatttgctgaaggtcctggagcagacgaagctagagctgccggagcagatgttgttggtggtgatgagttgattgaggagatccgcacaggaggaggcaaactaagctttgacaagtgcatagcaaccccaatgttcatgccccgattgtcaaaggttgctaggatattgggtccacgtggtttgatgcctaatcctaaggatctgtgacgaatgatgtttctggtgcggtcaaagcggcaaaatcaggacgtgttgatttcaaaatagataaaactgctatagtgcatgttggccttgggaaggtaaactttactgaggagagtttacgtgaaaatattggtgcttttgtgcatgcacttttacttgctaagccagtgggcttaaagaaaacttcaaaatatgtcggatatgtgaagaagttcacactgagtagcacaatgggacccggacttcctgttaccataccatcactatctgtggccgccgatcactataacaaggttcaagtcagctaagtcaatacagtagaacatcgaatgtagctttctttctccaatagccgtggcctgcagatggcggtggagcttaaccagtcagcaaggttgagatttgggtggcttgctgttttgttattggggataataccttttgtggacaaggatcattcaacaaacatcataacctataactttattttatccttgtcactgcaattttgagattgcgttgctggtctacctgtgttatccagagtcttgtcatttgttgcacgaaatgtaatatcgaaatacggtagttttagggcattacttttgataataagaaatgaagtattgaaccatgattcgattcagaatccggagcgtacactcacaatcgagaataagctagctggcacgatgtctggagttattgatcagtttcttttaacttcttttcgagttatatttgatagggctggaaatggatgtctggagattcgaattattcgtatt

SEQ ID NO: 209356 - DNA, 1982 bp, Zea Mays
gtttgagataactgtcgagcacatggcgtgcagggagcctagaccgcctagacgtgcatgagaggaaggcgcagaagagctactgggaggagcactctggggagctcaacctcgaggccattatgctcgactcccgtgccgccgaactcgacaaggaggagcgccccgaggttctgtctttacttccttcatatgaagggaaatctatactggagctgggagctggaataggtcgctttactggtgaactggctaaaacatctgggcatgtttttgcagtggatttcgttgaaagtgtgattaaaaagaatggaagtataaatgatcactatggcaacacgtcctttatgtgtgctgatgttacatccacggacctgatgattgaagcaaactccattgatctgatattttcaaactggttgctgatgtatctttcagatgaggagattgacaagttggtagaaagaatggtaaaatggttgaaggtcggtggttatatcttctttagggaatcttgcttccatcaaactggagatacagaaaggaaatttaacccaacacactatcgagaaccaaggttttataccaaggtatttaaagaatgccaaacctttaatcaggatggcacttccttcaaactttctttgattacattcaaatgcattggagcttatgtaaacatcaagaaagatcaaaaccagatatgttggctatggaaaaaagtaaactcatcagaagatgggggatttcaaagttttttggacaatgtgcagtacaaagccactggaatactacgctatgaacgtatctttggagatggctacgtgagtactggtggagctgagactacaaaagaatttgtggagaaactgaatcttaagcctgggcagaaggtgcttgatgttggatgtggaattgggggaggtgacttttatatggctgagaagtatggtacacatgttgttggtattgacctttccattaacatgattatgtttgcccttgagcgttccattggatgtaagtgcttagttgagtttgaagttgctgattgcaccacaaagacatacccagaccacatgtttgatgtcatctacagtcgtgacactatccttcatatacaagataaaccctccttgtttaaaagtttcttcaaatggctgaaacccgggggaaaggttctaatcagtgattactgcaagagtcctggaaaaccatcagaagagtttgcaacatacattaagcagaggggttatgatctccatgatgtggaggcttatggacagatgctcaagaatgctggtttcagtcatgtcattgctgaagaccgaactgaccagttcctcagtgttttacagaaggagctagacaaatttgagaagaacaaagatgatttcctgtctgagtttgcccaggaggattatgacgatatcgtgaatggatggaaggcaaaactgcagaggagctctgctggtgagcagaggtgggggctgttcgtcgccaccaagtgatgcgcgtgcgtgtggctttattacaaataacatttggagctctgctggtgagcagaggtgggggctgttcgtcgccaccaagtgatgcgcgtgcgtgtggctttattacaaataaatttgaagctctgctggtgagcagaggtgggctgttcgtcgccaccaagtgatgcgcgtgcgtgtggctttattacaaataaatttgcttctgcaattcaccgatgggattcgcttcataacgtgattttacataactgaactcagagagcctatcctattgctttgtgttttgggacaatgagactgatataacttttacggtcctgttaaatatagagtgtgctgtactgatgctcctcatggctgtggctacatggttgacacgtgacatgagatttgttattttcatatttttttagaaaaatattttgcatctcaacttttgaccaatgtgcatcagatgcattgaatctg

SEQ ID NO: 209357 - DNA, 2114 bp, Zea Mays
gttccactggccttcgcttcgccacggttctcgcctcctcgcattctaaacatcgccatgattcggtggttctgaatgcatctcctgtaaccaccgggcccggagcttctcccaagcccgcgtcgccgtcgagggctgttaacctggcaacactctcaccaaccaacaaacaaacgcgcggggtcgctgtaatggccgccgccgccgccgctgtgaatgggagcctagaccgcctagacgtgcatgagaggaaggcgcagaagagctactgggaggagcactctggggagctcaacctcgaggccattatgctcgactcccgtgccgccgaactcgacaaggaggagcgccccgaggttctgtctttacttccttcatatgaagggaaatctatactggagctgggagctggaataggtcgctttactggtgaactggctaaaacatctgggcatgtttttgcagtggatttcgttgaaagtgtgattaaaaagaatggaagtataaatgatcactatggcaacacgtcctttatgtgtgctgatgttacatccacggacctgatgattgaagcaaactccattgatctgatattttcaaactggttgctgatgtatctttcagatgaggagattgacaagttggtagaaagaatggtaaaatggttgaaggtcggtggttatatcttctttagggaatcttgcttccatcaaactggagatacagaaaggaaatttaacccaacacactatcgagaaccaaggttttataccaaggtatttaaagaatgccaaacctttaatcaggatggcacttccttcaaactttctttgattacattcaaatgcattggagcttatgtaaacatcaagaaagatcaaaaccagatatgttggctatggaaaaaagtaaactcatcagaagatgggggatttcaaagttttttggacaatgtgcagtacaaagccactggaatactacgctatgaacgtatctttggagatggctacgtgagtactggtggagctgagactacaaaagaatttgtggagaaactgaatcttaagcctgggcagaaggtgcttgatgttggatgtggaattgggggaggtgacttttatatggctgagaagtatggtacacatgttgttggtattgacctttccattaacatgattatgtttgcccttgagcgttccattggatgtaagtgcttagttgagtttgaagttgctgattgcaccacaaagacatacccagaccacatgtttgatgtcatctacagtcgtgacactatccttcatatacaagataaaccctccttgtttaaaagtttcttcaaatggctgaaacccgggggaaaggttctaatcagtgattactgcaagagtcctggaaaaccatcagaagagtttgcaacatacattaagcagaggggttatgatctccatgatgtggaggcttatggacagttcctcagtgttttacagaaggagctagacaaatttgagaagaacaaagatgatttcctgtctgagtttgcccaggaggattatgacgatatcgtgaatggatggaaggcaaaactgcagaggagctctgctggtgagcagaggtgggggctgttcgtcgccaccaagtgatgcgcgtgcgtgtggctttattacaaataacatttggagctctgctggtgagcagaggtgggggctgttcgtcgccaccaagtgatgcgcgtgcgtgtggctttattacaaataaatttgaagctctgctggtgagcagaggtgggctgttcgtcgccaccaagtgatgcgcgtgcgtgtggctttattacaaataaatttgcttctgcaattcaccgatgggattcgcttcataacgtgattttacataactgaactcagagagcctatcctattgctttgtgttttgggacaatgagactgatataacttttacggtcctgttaaatatagagtgtgctgtactgatgctcctcatggctgtggctacatggttgacacgtgacatgagatttgttattttcatatttttttagaaaaatattttgcatctcaacttttgaccaatgtgcatcagatgcattgaatctg

SEQ ID NO: 209358 - DNA, 2267 bp, Zea Mays
gcgcagtgcagcatccactcacagcgggagaggggaccggtcatcacggttgatcgtggcaaatatcaaaatctctcccattccactgcccctaccacagttccactggccttcgcttcgccacggttctcgcctcctcgcattctaaacatcgccatgattcggtggttctgaatgcatctcctgtaaccaccgggcccggagcttctcccaagcccgcgtcgccgtcgagggctgttaacctggcaacactctcaccaaccaacaaacaaacgcgcggggtcgctgtaatggccgccgccgccgccgctgtgaatgggagcctagaccgcctagacgtgcatgagaggaaggcgcagaagagctactgggaggagcactctggggagctcaacctcgaggccattatgctcgactcccgtgccgccgaactcgacaaggaggagcgccccgaggttctgtctttacttccttcatatgaagggaaatctatactggagctgggagctggaataggtcgctttactggtgaactggctaaaacatctgggcatgtttttgcagtggatttcgttgaaagtgtgattaaaaagaatggaagtataaatgatcactatggcaacacgtcctttatgtgtgctgatgttacatccacggacctgatgattgaagcaaactccattgatctgatattttcaaactggttgctgatgtatctttcagatgaggagattgacaagttggtagaaagaatggtaaaatggttgaaggtcggtggttatatcttctttagggaatcttgcttccatcaaactggagatacagaaaggaaatttaacccaacacactatcgagaaccaaggttttataccaaggtatttaaagaatgccaaacctttaatcaggatggcacttccttcaaactttctttgattacattcaaatgcattggagcttatgtaaacatcaagaaagatcaaaaccagatatgttggctatggaaaaaagtaaactcatcagaagatgggggatttcaaagttttttggacaatgtgcagtacaaagccactggaatactacgctatgaacgtatctttggagatggctacgtgagtactggtggagctgagactacaaaagaatttgtggagaaactgaatcttaagcctgggcagaaggtgcttgatgttggatgtggaattgggggaggtgacttttatatggctgagaagtatggtacacatgttgttggtattgacctttccattaacatgattatgtttgcccttgagcgttccattggatgtaagtgcttagttgagtttgaagttgctgattgcaccacaaagacatacccagaccacatgtttgatgtcatctacagtcgtgacactatccttcatatacaagataaaccctccttgtttaaaagtttcttcaaatggctgaaacccgggggaaaggttctaatcagtgattactgcaagagtcctggaaaaccatcagaagagtttgcaacatacattaagcagaggggttatgatctccatgatgtggaggcttatggacagatgctcaagaatgctggtttcagtcatgtcattgctgaagaccgaactgaccagttcctcagtgttttacagaaggagctagacaaatttgagaagaacaaagatgatttcctgtctgagtttgcccaggaggattatgacgatatcgtgaatggatggaaggcaaaactgcagaggagctctgctggtgagcagaggtgggggctgttcgtcgccaccaagtgatgcgcgtgcgtgtggctttattacaaataacatttggagctctgctggtgagcagaggtgggggctgttcgtcgccaccaagtgatgcgcgtgcgtgtggctttattacaaataaatttgaagctctgctggtgagcagaggtgggctgttcgtcgccaccaagtgatgcgcgtgcgtgtggctttattacaaataaatttgcttctgcaattcaccgatgggattcgcttcataacgtgattttacataactgaactcagagagcctatcctattgctttgtgttttgggacaatgagactgatataacttttacggtcctgttaaatatagagtgtgctgtactgatgctcctcatggctgtggctacatggttgacacgtgacatgagatttgttattttcatatttttttagaaaaatattttgcatctcaacttttgaccaatgtgcatcagatgcattgaatctg

SEQ ID NO: 209359 - DNA, 1472 bp, Zea Mays
atgccgagcgaccattttttgggaggtcgacactatgaccacgacaccgatctcctgccacgtagatgccagctcgacataccggagcaagatttcggcgccatttatattggcgtcgagacgtgtaatctcggcgtcaataataatggtgatgatatcttcttctcggcgctcaggaggaccactcaatccaccttcacttcaccgggcgggatctggtcgcaatcggatccacaccgccgccgcggccgcctcctcgggtggagtcccgggctcgacgagacggaggccagggtagacgacggaggcgacgaggacgacgaggctgaggaggggaagcccatgccggccgccggggcccgccgctccactcgcgtcttcatgcccaaggcggctaagccgccgcaatcccaggagcacgtcgatcccgccacccgggtcctccgctccggcaagcgcctcgccgccgaccggatccgctgggacgccaaggaggcggcagccttccacgtcgacatcaatcacggccacgaccagcagcaccaaaaggaagattaccccaaaccgggattgccagctctgacaaagtccttcgggctcgtgtacagaaggaaacgccgtcgccgccggaggcaccccgccgatgaggtcgtcgccgaggacgaggacggcagcaggaggtttgggatagtatacaccaggaggaagggcaagcgatcgaagggtgcacccataaggcgagggcatttatcacaaaagtctgccatgaagcgaaagagatctttcaagagacaaaaaagccaagctggtcgtggaaagcctgaagctttattgcaatacaatgctgaagaggacgcagctttgcacagagttgcccaagctgaacgtgcggcaaaacaggctgtagaaagagctattcgactgcgcaacagagcccagtctctcatgacaaacgcagagctcgcagcatacaaatccgtcatggctctcaggattgccgaggctgctaggatatctgactcgtcccgagatattgtttgtactatcctcgactaaagaaaaatatgggttgttcattgatttgtgtggagagcatggaaaatactcttcatcgcccatgatattggcttttcgacaagctgtggggttatatccccccccttctgttaactcactttgtcaagtcaattttgaggcgaatgcttgaactgaaaactgtaatttcttgtataaattgaagtagttagctagattttgtatcttatgggagctaatgttctgtagaaatgatgaaagttttttttttaaaaaatgcatgggctgaacggaaatcaagtatttgtttgcatcccattgtcttcagcgatatatgttgtctatgatgtgtcccttctgttttattagtgtgtagtgttgtgtgattgtcacttctccgaaactatttgctttatattttgtaaataatatttttg

SEQ ID NO: 209360 - DNA, 1818 bp, Zea Mays
gcggcacgccaaaggagtattccttccaaactgtttgttcagaagctgcatttttcttcagaacttagtatttctagatgggcttgctgccttttagtaggtattcgccagctattgacatatggagtatcggttgcatttttgcggagatcttaactgggaagcctttatttcctggaaaaaatgtggtccaccagttagatttgatgactgatctcttgggtactccatcacttgatacagtttccaggattcggaatgagaaggcaaggaggtacttgagtagcatgaggaaaaaacagccagtaccatttactgaaaagtttcctaaagcagatcctgctgcactcaaacttttgcagaggcttttggcatttgatcccaaggataggccaactgctgaagaggcattggctgatccgtattttaaaggcctcgcaaaagtagagagagaaccatcatgccagccaataacaaaaatggagttcgagtttgagcgaaaaaaggcgaccaaagaggatgtcaaggaacttatattcagggagatattggagtatcatcctcaacttctcaaggattacatgaatgggactgagaaaacaaactttctatatcctagtgctgttgaccatttcaggaggcaatttgcaaacttggaggaaaatggaggaaagagtggggcacacgccgcttcatcagacaggaagcatgtttcgctcccaaggacaaccacagttcattctaatccaatccctccaaatggaacctcccaggttcctcaaaagattcccacaggtagaccaggaagagtggttggtccagtaataccatttgagaacgcagctgcagttgatccatacagccaacgtagggtctcaaggaatccagtacttcctccaaccacgtcgaacatgtcagcctatgcctaccaccggaagtcagacaactcagacagagagctccaacaggagctggaaaaggaccgcatgcagtaccagccagcacagcggttcatggacgccaaggtagtatcacagatgtcccctgacttgaggtcttcctactacataccaaaaggtgtcccaaaggctgatcccgcagatagaaccgctctgcattctagcatgattcatgggatcgcccctttcagtggcattgcagctgttggaggtggctacaacaaggtcaatgcagttcagtatggagtttctaggatgtactagttctagttgcattggccatctccgaattcctcagctgatgagttgaagtaataacatggcgaagaccagatgtaggtaccgaagaactgccataccggctctgagccaaagatagaaaacatggaatacggatctcggatcgaggacgtgtccgtcagattgaaaacagatactgggcagcagtcatggttctgtccattggacctagcttttcgggaagcaatgccatcgccccgcggaaacggtaaaataaaaggagaaaaaaaaatgcagtactgtcagttgattgctgcttataaagaagcaaagggggcagagacgacgatttttacaggtaaaattatgtactttgcaaggagggaaacatgtgggaataagtagtgagcctacgtttagctctgtatataaagtgacttgattttatatgtactattacggctggtgaaacacgcttctttaattcaaagctatggagttttggcctaaataccataggcagctcagattgatacagacgttcgtttattttgccctctttacctctgtgtttgtatattacgactagattagaaatgaaaattaccatcaagccgtc

SEQ ID NO: 209361 - DNA, 2366 bp, Zea Mays
cttttccttatccgcaatcgtccctcgtcttcgttgcgggaagacggtcgcgtggagctgtacttggatttgaatttgagttgtggagtcgacacagttcagggttcgtcagagatggacttcttcagtgaatacggcgatgcgaacagatacaaaatccaagaggtcattggcaaaggaagttatggcgttgtttgctcagctgttgaccaacatactggtgacaaggtggcaatcaagaaaatacacaatatctttgagcacttatctgatgctgcccggatcctacgtgagatcaaactgcttcggctattacgccatcctgatatagttgagatcaagcatataatgctgcctccatcaaggagggacttcaaagatatctatgttgtatttgagctgatggatacagacctccaccaagtcatcaaggcaaatgatgatttaacccgagagcatcatcaattctttctctatcagatgctccgtgcactgaaatacattcataccgctaatgtttatcatcgtgatttgaagccaaagaatatattggctaatgctaactgtaaacttaaaatatgtgattttggattggcaagagtggcattcaatgacactcctacaacagtattctggacggattatgttgctacaagatggtatagggcccctgaactgtgtgggtctttcttttccaagtattcgccagctattgacatatggagtatcggttgcatttttgcggagatcttaactgggaagcctttatttcctggaaaaaatgtggtccaccagttagatttgatgactgatctcttgggtactccatcacttgatacagtttccaggattcggaatgagaaggcaaggaggtacttgagtagcatgaggaaaaaacagccagtaccatttactgaaaagtttcctaaagcagatcctgctgcactcaaacttttgcagggctgatccgtattttaaaggcctcgcaaaagtagagagagaaccatcatgccagccaataacaaaaatggagttcgagtttgagcgaaaaaaggcgaccaaagaggatgtcaaggaacttatattcagggagatattggagtatcatcctcaacttctcaaggattacatgaatgggactgagaaaacaaactttctatatcctagtgctgttgaccatttcaggaggcaatttgcaaacttggaggaaaatggaggaaagagtggggcacacgccgcttcatcagacaggaagcatgtttcgctcccaaggacaaccacagttcattctaatccaatccctccaaatggaacctcccaggttcctcaaaagattcccacaggtagaccaggaagagtggttggtccagtaataccatttgagaacgcagctgcagttgatccatacagccaacgtagggtctcaaggaatccagtacttcctccaaccacgtcgaacatgtcagcctatgcctaccaccggaagtcagacaactcagacagagagctccaacaggagctggaaaaggaccgcatgcagtaccagccagcacagcggttcatggacgccaaggtagtatcacagatgtcccctgacttgaggtcttcctactacataccaaaaggtgtcccaaaggctgatcccgcagatagaaccgctctgcattctagcatgattcatgggatcgcccctttcagtggcattgcagctgttggaggtggctacaacaaggtcaatgcagttcagtatggagtttctaggatgtactagttctagttgcattggccatctccgaattcctcagctgatgagttgaagtaataacatggcgaagaccagatgtaggtaccgaagaactgccataccggctctgagccaaagatagaaaacatggaatacggatctcggatcgaggacgtgtccgtcagattgaaaacagatactgggcagcagtcatggttctgtccattggacctagcttttcgggaagcaatgccatcgccccgcggaaacggtaaaataaaaggagaaaaaaaaatgcagtactgtcagttgattgctgcttataaagaagcaaagggggcagagacgacgatttttacaggtaaaattatgtactttgcaaggagggaaacatgtgggaataagtagtgagcctacgtttagctctgtatataaagtgacttgattttatatgtactattacggctggtgaaacacgcttctttaattcaaagctatggagttttggcctaaataccataggcagctcagattgatacagacgttcgtttattttgccctctttacctctgtgtttgtatattacgactagattagaaatgaaaattaccatcaagccgtc

SEQ ID NO: 209362 - DNA, 2740 bp, Zea Mays
attatttcttctagtggagtttgtatctaccaatgagattctagggctacaaataatctttaatcattattttacaagcctctttactatgtaactaggttattatatggacttactaatggaagttcctaacatacaatgcattcccaacacaaaactcaaaacatttacgagtagcgtacattgaattatggagggtcaaagatgttagaaagaaaaaagatgaaaaagaaaagggaaaaagataatatggacttttatttgcgaaggcacagccgccgccattacttcatcttcctcgcagcgccggcgccccatcctgcggccctcgtgatcgggctctcagcgacggcgtcagcggcttccccttccgcctctcgccagtcgcctcgcgccctcgcctccggccctccacacaccggcctgcgaccttgcgtgcctgcctctctctctctcctccttccggtggaacggcgcccggctgcgccgcgcgcgccttgagggtagcgggagccaacagccgctgctccaccaaggcggtcgcgccgctttgggagcgcttatgccccaaagcgaagcgtcacccgtccgcttagcgcgctgaagcgcgcgcttagtgccgcttcttggaaccctaacggctgtacctggcaaaaagagggcaattattgtgtgtgcaacagagcacatgcagaaagatctgattcaagtgtggaaactttgtgagacggctatcttttttttcaaagtcagcgtcttttcgggtaggttatagtaaattcggcttttaatttccttcgcttcatgaatctggctctggtggcactgacgttatttggcaagttttagtggatctgtagaggactttaattctctgaaggagtgcaatggtcaagttgcctgcactgagaatgaagaggatgtttcatggtgatgattgtgctaatgagttcaaaatcaggaccatgaaatccatgaaagtttcacactttcatgtcagcgagttagagcagtcagctatgtcgaacttatcagataaaactcctcaagatgagccagacccaaccattcaacttgctgaccaggatattagggtaacagaagcttctggcttgcatgatctgattggaggaaaatccatgctcgaggatttaacatccgaagtgatagattcaccaaattcagagggtgactcctctgctaattatgatgacaacaaatctgtgttacatgcagtgaattatgttggcaaagatgatggtgtagattcttcattccagaatttctgttttagtgatcatgaggcgaactggggtttgaatgagtgttgcagactgatggatatttatagtccagatgacgatttctcttatttgcttgatagtccacctgatcttctgcctagttatactggattttgtgatgaatttgtatcaatagatgcattgatgaatatgagtagcagatgtggaatcttcccacttattgagagcgctacggaagccagtgttgataataagccatgctcatctgaggtggatttgtgctttaataattctgaggtattagagtggctcaaccctaatctattggagggggatttaccagatcttgttgattttgctgagttaaattcaaatgctacccctgcaaaaaaagagcaatggaccaggaatgttactctcgtgcttgatttggatgaaacccttgttcattcaactatgaagcattgtgatgacgctgatttcacattttctatgttctatgatatgaaagagcatgttgtatacgtgaaaaagagaccgcatgtccatatgttcctccaaaggatggttgaaatgtttgaggtagtgatatttactgccagtcaaagtgtttatgcagaccagttgcttgacatgctggatccagagaagaaacttttctccaagcgtttcttccgggaatcgtgtttgatcacagacagcggctacagaaaagatctgactgttgttggagtcgaccttgccaaggttgccataattgacaacactccacaggtttttgagctgcaagtgaacaatggtataccaatagagagttggtatagcaaccccttggacgaggcgttacctcagttgatcccattcttggagaccctcgctgtagcagatgatgtccggcctatcattgccaagaagtttggcaatataatagataatcgctaaggttcttaaataagtatagggttagtcttgtttactggaagaacctagatgacatctttaactggtcaaggtgggggcatttttctcttaagggctagtttgggaaccctattttcctaagttttttttttccattttcccaagtaaaattagttcattttttcttgggaaaatataaatcccttggaaaatgaagttctcaaaccaactctaagggctagtttgggagtcacttccggttttgtggctcccaaactagccctaaaaggcaggttggcccgtaggaattaagagtaggaattaagagtttcggtgatggggctattccttagaagaactgtacatatcctaaattttgttttgcaactttgtacataggatggttggaattgaaagacaaacatctatgcaaagtttctttgcattttgctcaatgtggtttaatgttcgcagctgtacgatgtttgtatccgtttggctccttgattgtttggatattgctgtgtagtttcatcatgcaatgatgcaaacaa

SEQ ID NO: 209363 - DNA, 2612 bp, Zea Mays
attatttcttctagtggagtttgtatctaccaatgagattctagggctacaaataatctttaatcattattttacaagcctctttactatgtaactaggttattatatggacttactaatggaagttcctaacatacaatgcattcccaacacaaaactcaaaacatttacgagtagcgtacattgaattatggagggtcaaagatgttagaaagaaaaaagatgaaaaagaaaagggaaaaagataatatggacttttatttgcgaaggcacagccgccgccattacttcatcttcctcgcagcgccggcgccccatcctgcggccctcgtgatcgggctctcagcgacggcgtcagcggcttccccttccgcctctcgccagtcgcctcgcgccctcgcctccggccctccacacaccggcctgcgaccttgcgtgcctgcctctctctctctcctccttccggtggaacggcgcccggctgcgccgcgcgcgccttgagggtagcgggagccaacagccgctgctccaccaaggcggtcgcgccgctttgggagcgcttatgccccaaagcgaagcgtcacccgtccgcttagcgcgctgaagcgcgcgcttagtgccgcttcttggaaccctaacggctgtacctggcaaaaagagggcaattattgtgtgtgcaacagagcacatgcagaaagatctgattcaagtgtggaaactttgtgagacggctatcttttttttcaaagtcagcgtcttttcggtggatctgtagaggactttaattctctgaaggagtgcaatggtcaagttgcctgcactgagaatgaagaggatgtttcatggtgatgattgtgctaatgagttcaaaatcaggaccatgaaatccatgaaagtttcacactttcatgtcagcgagttagagcagtcagctatgtcgaacttatcagataaaactcctcaagatgagccagacccaaccattcaacttgctgaccaggatattagggtaacagaagcttctggcttgcatgatctgattggaggaaaatccatgctcgaggatttaacatccgaagtgatagattcaccaaattcagagggtgactcctctgctaattatgatgacaacaaatctgtgttacatgcagtgaattatgttggcaaagagtttgcagatgatggtgtagattcttcattccagaatttctgttttagtgatcatgaggcgaactggggtttgaatgagtgttgcagactgatggatatttatagtccagatgacgatttctcttatttgcttgatagtccacctgatcttctgcctagttatactggattttgtgatgaatttgtatcaatagatgcattgatgaatatgagtagcagatgtggaatcttcccacttattgagagcgctacggaagccagtgttgataataagccatgctcatctgaggtggatttgtgctttaataattctgaggtattagagtggctcaaccctaatctattggagggggatttaccagatcttgttgattttgctgagttaaattcaaatgctacccctgcaaaaaaagagcaatggaccaggaatgttactctcgtgcttgatttggatgaaacccttgttcattcaactatgaagcattgtgatgacgctgatttcacattttctatgttctatgatatgaaagagcatgttgtatacgtgaaaaagagaccgcatgtccatatgttcctccaaaggatggttgaaatgtttgaggtagtgatatttactgccagtcaaagtgtttatgcagaccagttgcttgacatgctggatccagagaagaaacttttctccaagcgtttcttccgggaatcgtgtttgatcacagacagcggctacagaaaagatctgactgttgttggagtcgaccttgccaaggttgccataattgacaacactccacaggtttttgagctgcaagtgaacaatggtataccaatagagagttggtatagcaaccccttggacgaggcgttacctcagttgatcccattcttggagaccctcgctgtagcagatgatgtccggcctatcattgccaagaagtttggcaatataatagataatcgctaaggttcttaaataagtatagggttagtcttgtttactggaagaacctagatgacatctttaactggtcaaggtgggggcatttttctcttaagggctagtttgggaaccctattttcctaagttttttttttccattttcccaagtaaaattagttcattttttcttgggaaaatataaatcccttggaaaatgaagttctcaaaccaactctaagggctagttggcccgtaggaattaagagtaggaattaagagtttcggtgatggggctattccttagaagaactgtacatatcctaaattttgttttgcaactttgtacataggatggttggaattgaaagacaaacatctatgcaaagtttctttgcattttgctcaatgtggtttaatgttcgcagctgtacgatgtttgtatccgtttggctccttgattgtttggatattgctgtgtagtttcatcatgcaatgatgcaaacaa

SEQ ID NO: 209364 - DNA, 2933 bp, Zea Mays
ccagtcccagtctcggccggccagctctcttttagtagagacactctgccacagcgtagcctagcatagcgtccactagctagctagctagctagcatcagtcatggaggatggcgccgagaaggcgacgacaccggattcttcttcttcgcaagcggcaccgccagcgctgagcgcggtgtacgtgaacaggcgcctcgtggcgggcaaccgcgccatggccgccgtccacgtcgcgctggtcgccacggtcatcggccagcgcgccctggcgctgctctctgctggaaccagcagcgcgtcgcccgcgtcccggtccctgcaggtgcagcacgtggccatggcgctggccgacctgacgctgctgttcgtgtgggcgctgtcgcagtcggggctgtggcgtcccgtgacgcgcgccgcgttcccgggccggctgctggcggcggtgccccgcggcgcgctcccgcgcgtggacgtgctggtggtgacggccgacccggacaaggagccgcctctcggggtggtgaacacggtggtgtcggcgatggcgctggactaccccggcggcaagctgagcgtgtacctgtcggacgacgccgggtcgccgctcacgctgctcgccgcccgtaaggcctacgccttcgctgccagggcctgggtgcccttctgcaggaggcactccgtgcagtgcccctggccggacaggtacttcgccggcgacgacgacgacgctgacggcgatcggcggcgggaggagctcgcggaggagagggcaagagtcagggtacatgtctgtctgtctgtctctagtgttttgcttttgattagactattttttttcttttccggtccctctgggcgtgacgtgtgtgatgacgtcaaagtggcacatcgggatggagtctccaacacactccaaagtccaaactccaaagtgccgtaatcagtgtcacgtggaagtggaacaaccattttcgtcctcatgcattgcatgcatgaaactatacgagaagttgaaagcggatatagaggcggctaagaatgacgagactatttctgggagctggtcaaaagacaaacgtcagaatcacgatgcttacgtggagatcatcgaagacggcgacggcgttgaggagattccggcgctggtgtacgtagcccgcgagaagcggagagcgtggcctcaccacttcaaggccggcgctctcaacgccctgctgcgagtgtcgggcgtggtgagcaacgcgccctacgtgctggtcctcgactgtgacatggcctgcaacagccgcgcctccgccctggacgccatgtgcttcctcctcgaccgcaggccgccgccggacagcctcgccttcgtgcagttcccgcagctgttccacaacctcagccacaaggacatctacgccaacgagctcagatacatcttcgggacccgatggttcggcctggacggcgtccggggccctcccctctccggctccggcttctacgtcaggagagacgcgctttacggggccacaccgaccgcggacttcatgcccgatgccaccgccgtcgccgagctcaagacaaggttcggccactccgaccgtctcgtggcatccttacgcagccccggcgttccaccagaagcagaagcgatgatgtcccttgcggcgctggcctcctgcgcatacgaggccggcaccgcctggggcgccggcgtcggcttcatgtaccagtcggtggtggaggactacttcacggggttccagcgcttcttcgcccgggggtggacctccgcctactgctacccggagccgcgcccggcgttcctcggcagcgtgcccaccaacctcaacgacgtgctggtccagaacaagcgctggatgtccggcatgctcgccgtcggcgtctccaggcgccactccccgctcgcctgccgcccgctcctccgggcctccctgctccaggccatggcctacgcctacttcggcttcgccgcgctctgcgccgtccccgtgctctgctacgccaccctgccgcagctctgcctcctccggggcgtcccgctattcccctgccccgccgccaccgcggcggcgttcgcgtcctcgcttctgcagcacatggcggaggtgtgcgtgtccaggcggggtaggctggacctgcgcacgtggtggaacgagcagaggttctgggtgctcaacgccctcacagcccagctcttcggctgcgtcagcgccgcccaggagctgctcggcgcacgcgccttggacttcgacctcaccagcaaggccgccgtcgacgggagcctgtaccaggacggcgtgttcgacttcacgggctgctccgcgctgctgctccctgccaccacgctctccgtgctcaacgccgctgcgatcgtcgccggcacctggaagatgtcgtcgtcgtcgtcgtcatcgagcggcggcttccacttcgccccgcagctgttcctcatgtgctacggcgcggcgctcagctacccgctactggaggggatgttcctcaggcgggatcctgcgagggttccgccacgcatcaccgcactctcggtcgcattggcagccgtgctgcttgccgccatgcttggatgaacatcaaccgagagatgcacggcctgcttcaactcttgtctactgttctagatatactgtacttttaattactattcccactgtattcccaccgttgaagcacaacaacgcagtgaactaaacgacgaacgagaagaagcccaaggttaattagaactaatttatgatatacgttcggactaattattctacacatcaaagatatttatgtaatgcggtataatatatataatttgtttactattgcatacgcataaatttagaaagataagaatgtgagttcaaaggaaatgaattgacgtgcatgataaaaaaaaaatctgattttca

SEQ ID NO: 209365 - DNA, 1162 bp, Zea Mays
gttcaaaagacttcgcctttaagtttgccatttgggcgaagttcgcgtgagccaaggtaccgcgtcgagttccatcctgttgattcgccattccatccagagaatggtcaggaatcggtaccaatggctagtcatgaggggaagcgttataagtgctttctaccagttgaagaaactaaaaccatgaagtcaatgctcccacaaaatgcaactaatattataatagaaagtgaaaggagaattaagccaaaggagccagatgagttacttgaggttctcaaggatcagtgtttctacaggcacgaaggttggtggtcgtatgaattctgttattatgggaaaatcagacaggtccatgtagaggacggtaaggttatccaagaatttgttctaggcgaattcgatgacgacgcgactgctgcataccatgaaaatagcacctctgagttagctgacgatgaccatcacgtgaaagatatatctaagaggtatcatgttcacttgtatacaaatgggactgtatgtgatctcacagatattccccgggagacagaggttagatttgtctgctcggagcctactgtgctgattagttcagtcaaggagatctcttcctgcaaatatgttgtaacaattcaaagcccgatgctttgcaaaaacccgttgttccagcaagaaaaacgaacccttcccatccattgcaatgaattacctgctaaagcagaatccggtgctgaggatggtttgcttccaaaagaagcgcagatttccatcatccccgatcaggatgagctgcatggttttccagcttatgctacttgatataatgatatgccttcaatatttatttctggtgtagaaaaagcacagttttggaggcccagtggcaactgagcaacgctatgtattactctctccgttcttttttatttgtcgtggtttagttcaaaaattacgacaaatattggagaacggacccatagatcctacagcagcggctccttgtaaagcaggttgagacgatcattctgcagtgctaattatttaggaggattacgaaggtagaaagtttctcagtattagtaaatgtaacaagtttgagacagtaacatttgcttgaaatgtctagtctataacaaggacaatactgcattcttgaaat

SEQ ID NO: 209366 - DNA, 1160 bp, Zea Mays
cgcatatggatcgagggctggtttgccatttgggcgaagttcgcgtgagccaaggtaccgcgtcgagttccatcctgttgattcgccattccatccagagaatggtcaggaatcggtaccaatggctagtcatgaggggaagcgttataagtgctttctaccagttgaagaaactaaaaccatgaagtcaatgctcccacaaaatgcaactaatattataatagaaagtgaaaggagaattaagccaaaggagccagatgagttacttgaggttctcaaggatcagtgtttctacaggcacgaaggttggtggtcgtatgaattctgttattatgggaaaatcagacaggtccatgtagaggacggtaaggttatccaagaatttgttctaggcgaattcgatgacgacgcgactgctgcataccatgaaaatagcacctctgagttagctgacgatgaccatcacgtgaaagatatatctaagaggtatcatgttcacttgtatacaaatgggactgtatgtgatctcacagatattccccgggagacagaggttagatttgtctgctcggagcctactgtgctgattagttcagtcaaggagatctcttcctgcaaatatgttgtaacaattcaaagcccgatgctttgcaaaaacccgttgttccagcaagaaaaacgaacccttcccatccattgcaatgaattacctgctaaagcagaatccggtgctgaggatggtttgcttccaaaagaagcgcagatttccatcatccccgatcaggatgagctgcatggttttccagcttatgctacttgatataatgatatgccttcaatatttatttctggtgtagaaaaagcacagttttggaggcccagtggcaactgagcaacgctatgtattactctctccgttcttttttatttgtcgtggtttagttcaaaaattacgacaaatattggagaacggacccatagatcctacagcagcggctccttgtaaagcaggttgagacgatcattctgcagtgctaattatttaggaggattacgaaggtagaaagtttctcagtattagtaaatgtaacaagtttgagacagtaacatttgcttgaaatgtctagtctataacaaggacaatactgcattcttgaaat

SEQ ID NO: 209367 - DNA, 2382 bp, Zea Mays
ctccggtccgcagagggagggaggaggacgccagttgccactgccgcgccgctcccgcctccctctctccatccgacgagctcgagaagccaccatgatctccgcgcgcaccgccgcagcttcccccgcctccctgtggaagcagggaggacgaagcgagggcggcggcagctgcgacggatgtcggacttacaggaacactttgcggagggccgcagcagcgaaggtgcgtgccttgccgtcgagggcggtggaggcggtcaaaatgggctccgccgcggagatggagcaggaggaggcggaggtggccgcggccgcggccggcgtcgtcgtcgaggaccactacggcgaggacagcgccaccgaggagctgcccatcctgccctgggccttctccgtcgcaagcggttacaccctcttgagggatccacatcacaacaagggtcttgctttcatggagaaggagagggatgcacaccacttgcgggggctgcttcctcctgcagttgtgcctcaagaactccaaattaagaagatcatgcacaacctgcggcagtaccaggtccctttgcagcgctatatggccatgatggaccttcaggagaggaacgagaggcttttctacaagcttttaattgataacgtggaggagctgcttcctgtggtttatacaccaactgtaggtgaggcctgccagaagtatgggtccatctttcgacaaccacagggtctgtatgtcagcttgagggacaaggggaaggtcctagaagttctaaggaactggccacataggaacattcaagttatctgtgttactgatggtgagcgaatcttgggacttggagatttgggttctcagggaatgggaattcctgtaggcaaacttgctctatacactgctcttggaggagttcgtccatcagcttgtttgcctatcacaatcgatgttggcacaaataatgagaaactgcttaatgatgagttttacattggactccggcaaaaacgtgcaactggcgaggagtatcatgagcttatggaagagttcatggctgctgttaagcaaatctacggcgagaaagtcctcattcagtttgaggacttcgcgaatcataatgcttttaatttgcttgcaaaatatagcaagagccatcttgttttcaatgatgacatccagggcacagcatcagtggtccttgcaggtttgttagcagcactcaaggtggttggtaggaccttggcagagcacacttatttattccttggtgctggggaggctggaactggtattgcagaactcattgctcttgagatttcaaaacagacgtcggctccaattgaagagtgccgcaagaagatttggttggtggactcaaagggtttgattgttgactctcgtaaaaactccgttcagtcattcaaaaaaccttgggcacatgagcatgagcccttgacaaccttgtacgatgctgttcagtccatcaaacctacagttctgattgggacgtctggagttggaagaacattcacaaaagaagttgttgaggccatggcttccttcaatgagaggcctatcatcttttcactgtcaaatccaacctctcattctgaatgtactgctgaagaagcatataactggactcagggtcgtgtaatatttgccagtggcagtccatttgaccctgtggagtacgatgggaaggtttttgtacctggacagtcgaacaacgcctacattttccctggatttggcctcggtcttgttatctctggagccatccgtgtccacgaggacatgcttcttgccgcctcggaagcactagctgctcaggccacacaggagaacttcgacaagggatcaatcttcccgcccttcaccaacattagaaagatctctgcgcgcattgccgcagccgtggctgcaaaagcttatgaactcggtttggcgacccgtctgcctcccccaagggacctggtgaaatatgcacagagctgcatgtacactcctgtctaccgtaactaccggtagtgctgctgggatcaattctgcagtaataaaatatgtcgacgcagatgatcctgcaatgttgtagtttattttttcatttgttggccctgctgctgaccacctttgtggctgctagacactgtacctgtctatgcatatatgatactggaacatttggcgcgctgtgggcgtccctgtcatgagatcaattgcagaaataaaatgcaatttagatttgagcaccaaaataaaaatagtaataatacacaagtgaggcaagcatatgttgaatctgatttgcttcaccttcgattagagatgacaatgagtaaatattcaccttcgattagagatgacaatgagtaaatacccgt

SEQ ID NO: 209368 - DNA, 555 bp, Zea Mays
cacccttatacgttgccctcgctgcgccgcgtctgcgttctgtctgtcttcacttatccgaggttccgtgcagcagtggaaaagagcagattttagcagagcagcgagggtcggagaagcctccccaagcttcgaatcgctatgcagcccgtcaaggtgtacgccgaccggcggtcgcaaccctcccgagctgtcatcatcttctgcagggtgaaccagatcgatttcgaggaggtcacggtggatctgttcaagtctcagcacctcacacccgaattcaaaaaaataaacccaatgggacaggtacctgcaattgttgatggaagattcaaactatttgaaagagccaaaattgagtcaatcttggattggcatcactcaaatttgcggcgtggtgcagcaacccttgtaatgcacactgcattgctcccttccttggtcttacgacagtcatgaggctgtgaaacaagcagagagcttgtgatgcagtcactggggggtgatcgaatccgtatggctgaaagccgatgccaagttcttgctaggtatccccca

SEQ ID NO: 209369 - DNA, 1753 bp, Zea Mays
cggttgcgaggctaaactggacatttctagacttctctaccaagtcatatctcatatcccccgaaacagtcaggggctgagggaggcgccgcctgggtggagtggagagctggaggcagatcgaaataaagagcaccttccgaaccgacgtcctcgccaacgtcgtctcaaacgtgcccctcacgagaccgtcctccaaaatcctgaaacctatataattcccgctccatcaccggccggacgcctgatccgagcccctgagtcctgatagtacacgacaggcaccgcagcagaccggccggactcggcgccaagcgcgatggatttgtcatccgacgacgtgaaggcggcgaacatgcggcctgcggttgctgctgccgacggcacgtcgacgcttctgcggggttggcgggagttcatgcggagcggcgcgccggcgaggttcctctgttatgaggacggcaagtggatcggtatcaccggagaggccgagtcatcctcgggcgtggacgtgcgctcaggggagagacacggcgtggacgccaagaagatgaaggcatgggagaacgcggcggtgaggctcgaggagaacgacatgtactaccaggtcgtcagcaagctattcctcagctatgggatggcgcaacgcggcgcggcgatcacggaggtgcgcaagatcgcgcccggcgcgaggaccgtggcgttccgggaacaggggcagcgcctcgcctacgcgcgctgcacagccaccggcaccgccaagttcgcatggtacggcgcctcggaggacgacgtggccgccgtcgtcgagcgaggattcgtgaggaacaacgcgccaaggctgggcgcgcgcaagcacggcgacggcgttcatctttcgccggcgcagtgcccttacacgagtgccatgctggccaaggcagacgggagcgacgaggcgcacatcgtgctgtgccgcgtgctgatgggccggccggaggctgtcccggcaggatcttcgcagttctgccccagcagccgcagctacgacagcgccgtggataagctggagaatccacagtggtacgttgtgtggaacatggatatgaacacgaggatcctcccggaatacgtggtcagcttcaagtgctccaagctgcaacagatgcgagaatcatcagaagcgacttcaaagctgaagaagccggcaccagtggctcgcgacatgttcccgacgcttcttgcagagatccagcagatcgtgccagacaagtgtgatctattgcaggagtcatacaaaaacttcaagatgggtcagattaagaaagaccagttcatccagttcctccgcaattacgtcggagacgaagtgctgaaaaccgtggccaagaaacttcgacgatgctaaatttctagtgcgcggtgcgacatcattatctccttgatttctactcgagctgtctgtagtagtgctcagtagagatgaggaggttcacttctgtttctgttgattcaagtttctgtcaagggcttatagggggtttggcgcgctgttcttacattaaccaacagtccaacacaaaggatagatgcagtttctgatactgagacgtttcgattcttcttttagtgtcctgcagcctgtgataatctgtacagactgaaatgatatatgcataaatggaaccattgttgagctggccagtcgctccaaagttttgccgttggccaatcgctccaaagttttgccgttgcagagttcaggagcttgttt

SEQ ID NO: 209370 - DNA, 4132 bp, Zea Mays
atcaaattagaatcaattggtggtgttgtactagttattttgaaatctctactactccttgagatggtaaggagggcgtccacaccctcaccatggctccgccctcctcccccgctaatcaccacgccgcgcacgcgccgcgcgaggcccgtcttcgttcccccaccgctaatctcgccgcggcatccatggcgccgccctcgccctccccccacatgtccacgccggcgccccctccctcgcgccccacctcaatctcctccattgcgcgcccgagaacgcgcaaatcccccattcccgcgcctctccctcgcgcctcgatggaatcgccacggcatccatggtagggtcctcaggatccacctccaccgcgtcgccacagtccgcaggggccgagggtgccccgacggtggggacctagactgtggtcaggtgcacgcgtattcaagcaggcgctcttgcttttcgtccacaacaagttctccatgtgccctgggcacgcgacacatgttcggggtggtgggcattaccgtcacctccctcacgtcccgtgccgccgcggccgaggtctgcttcctcgccttccgcaacgagcagtccgcggggtacgccgccgcctacgacttcctgacgggctccccgggcgccctcctcatcgtctccggcccaagatacatccacgggctcgccggcctctcccacgccaccgccaacgcctggtcgctcctcatgagctccggatcctgcgaccaggctgacgccggcaggggcgacttccaggagctcgaccagatcgctgccaccaagcccttcgccaagctcgccgtcaaggcaacaaccatcctcaacgtatctaggtcttccctgccaacaagaacaaatggcacgcccgccgtgccgatttgaggtggttttggaggtgaggaggggtacgatttcggtgaccctaggccttgcgggtccggtggatggaagcggtggagctgccattaccagctaaggtggagttcaggaagccaaggtgagaccgctgctgaggtaatggagcgcatccagagaaaacttagagttcatgatgatgaattgtccaaggtaatatattatattattactatttatcatagaatgaatttacccagatctcccttccccctcccttaaatatgaatatagcgtggattgaatctaatctgtttattgctccaacttaatatggtgttattttattttggttgtcaaggtcgatttgctatccaacaattttgcattatttctggctacctattggtcttgctgccacaccggagttgccatcttagcttttgtcgtcctgtccccttcctatcagggcaatatgacttgctccccttcctgtcaagctacatgcttcgaccagctgaggcactgaaatgaaactaaattattgttgcaaacctctctgccatcttgtgcgtgcactatgcaaaatcacaaggcgggcttagtttctctaacactgataatgcttatttgatcagttgaagcttgcattcatttccatgaacaaacaagagtacctccaagacactaacgttgtatcaacatgtttttaggcaagtgatttctttataatgcttacatgcataccttctcttgttcactatgttcatacacgatgctttgctttttactatacgagagatgtatatggtgcttgggaacaataccttggcttggagcacactgatacaacattgaaacaataccttggcttgggatcaataccggcaaggacccaacaagcccaagagggcacccaacgcttacttcgtgttcatgtgagatgcgagtttgtccccacctctttttaaattttttatggatgcttgttggttcgatctatttttggatgcattactatctatattattctattacgaagcaaaagtggcgccttcgtgttaccatgcccctaccgggtgtgggtacgagtgaagattttgacccgtgggtgcaacccgcacccgacccaaagttttgcgggtgtgggtttctatttcaacccgtgggtgacccgcacctgacccaaaatatggttcattctttattttgcggaaaaataagtaagatacaatagtaattattttgaataagtaacttggctaatgattcatgaaatgttttgttgttgctcaatgtgaaaaggtttaaaatacgtacatataaattgactattattgctatttaattgattattgctcaattattgtttaaaagtgtacacttagtaaaacccgcgggtgacccgaaacccgacgggttcgggcgcgcgtttggaatggcactcgtgggtgccatcatgggtgggtttcggtagtcttcacgggtgtgcatgccccctgcccgcggatgcccaccactgcagtaccctgctgctgtgtatagcacacaaatgcattctacaagatcacagatagtcaataacataaaaaaaccagtgtgcgatgtactaactatggtcaactctttctgcatttagttttgtacattaacaacattaatgtggtttatgtcaagtacatttcttaattaactaccttcatctaacacaatattcagggaataggtatatatgaatgttcgacagttcctagaatgctagcattgtagttgttgatgctttggaaacaaaaggcagcatcaaactactaaatactaataatgagagttgtttaccagtaaaattggaaatttataatctgaggcatagtaataagtttgttacacataattaccatctcttttgttttctgtagaaaagctcaaaagcattataaaagctaagtaatgtactccgatgttgatcctgttttgtcgcctatttcaagagactgacattccatagaagagggcaatggaggacgacacatttattttttgttctttgcactatctagcagactatcatcaatgctctaaaatgcagaggttagctggacaatcattttgggaggatgagaaaggaatatcatatgaatcaaatggtctataatgttctaactgatggcctagcaaggattctaatgcttagcttctgtttccatatcaagtttatgtcataattacttttttaatgtgttggatttattttcgaacttagggcgtgttcatttatgtgtcgcattcatggttcaaaattgatttgggtttggtgttcatttatcttgcatgtgttgcaatgaaggaggaatgggtggagggacgagcaagatgtcaatgttctattgaaacaaactgccttaattattaggctatcactactgaaacaaactacctctgtcgtcaacctactaacttccatattcttcacactcagctttgcaaaatttacttgactggctttttttggcttaaaatataactcagggagacgtgattttgggacgatcaaactgttgggattgcgcttggacattccgggcagcgtgcacccaagattgaccaagctgattcgacggtgctaggacaaagatcctgatgcgtgtctgacttttgcagagattactatagaactccaagatagtctacaccatatcgaggcacccaagggagccagccgtcgttcttgagcaaagatgtagaagaaataagaggaagaaaaagaataagaatacatacgtagggcaaggtttcctacttttttgtgtgttacacaagttgcagtatgagtgtttgtggtgtatgtcatagttataaatatttcaaggccaaggaatacctagctacgacaaagatggggatggctaggaaagaaaaccaattgtgggacaatgataattgatatcaatgtcagccccttatatgctacacctgcaacctgtaatcataccgtcaactgcacctgacatccgtgcatcagaagtttttaattctgatgatttagattatgtctataaatctgttgaggatggcatggaacatatttttacttcaacaacacaactccaatttggtcatgatttgtgcttgaatgaagaagtcaagatttccttttgactcagcctgtttttctgaattactggtttgttacaaaattgtagatataatagggaactaatttgtgttgttttttatcagagatgcaggagctcta

SEQ ID NO: 209371 - DNA, 3636 bp, Zea Mays
gagggcgtccacaccctcaccatggctccgccctcctcccccgctaatcaccacgccgcgcacgcgccgcgcgaggcccgtcttcgttcccccaccgctaatctcgccgcggcatccatggcgccgccctcgccctccccccacatgtccacgccggcgccccctccctcgcgccccacctcaatctcctccattgcgcgcccgagaacgcgcaaatcccccattcccgcgcctctccctcgcgcctcgatggaatcgccacggcatccatggtagggtcctcaggatccacctccaccgcgtcgccacagtccgcaggggccgagggtgccccgacggtggggacctagactgtggtcaggtgcacgcgtattcaagcaggcgctcttgcttttcgtccacaacaagttctccatgtgccctgggcacgcgacacatgttcggggtggtgggcattaccgtcacctccctcacgtcccgtgccgccgcggccgaggtctgcttcctcgccttccgcaacgagcagtccgcggggtacgccgccgcctacgacttcctgacgggctccccgggcgccctcctcatcgtctccggcccaagatacatccacgggctcgccggcctctcccacgccaccgccaacgcctggtcgctcctcatgagctccggatcctgcgaccaggctgacgccggcaggggcgacttccaggagctcgaccagatcgctgccaccaagcccttcgccaagctcgccgtcaaggcaacaaccatcctcaacgtatctaggtcttccctgccaacaagaacaaatggcacgcccgccgtgccgatttgaggtggttttggaggtgaggaggggtacgatttcggtgaccctaggccttgcgggtccggtggatggaagcggtggagctgccattaccagctaaggtggagttcaggaagccaaggtgagaccgctgctgaggtaatggagcgcatccagagaaaacttagagttcatgatgatgaattgtccaagttgaagcttgcattcatttccatgaacaaacaagagtacctccaagacactaacgttgtatcaacatgtttttaggcaagtgatttctttataatgcttacatgcataccttctcttgttcactatgttcatacacgatgctttgctttttactatacgagagatgtatatggtgcttgggaacaataccttggcttggagcacactgatacaacattgaaacaataccttggcttgggatcaataccggcaaggacccaacaagcccaagagggcacccaacgcttacttcgtgttcatgtgagatgcgagtttgtccccacctctttttaaattttttatggatgcttgttggttcgatctatttttggatgcattactatctatattattctattacgaagcaaaagtggcgccttcgtgttaccatgcccctaccgggtgtgggtacgagtgaagattttgacccgtgggtgcaacccgcacccgacccaaagttttgcgggtgtgggtttctatttcaacccgtgggtgacccgcacctgacccaaaatatggttcattctttattttgcggaaaaataagtaagatacaatagtaattattttgaataagtaacttggctaatgattcatgaaatgttttgttgttgctcaatgtgaaaaggtttaaaatacgtacatataaattgactattattgctatttaattgattattgctcaattattgtttaaaagtgtacacttagtaaaacccgcgggtgacccgaaacccgacgggttcgggcgcgcgtttggaatggcactcgtgggtgccatcatgggtgggtttcggtagtcttcacgggtgtgcatgccccctgcccgcggatgcccaccactgcagtaccctgctgctgtgtatagcacacaaatgcattctacaagatcacagatagtcaataacataaaaaaaccagtgtgcgatgtactaactatggtcaactctttctgcatttagttttgtacattaacaacattaatgtggtttatgtcaagtacatttcttaattaactaccttcatctaacacaatattcagggaataggtatatatgaatgttcgacagttcctagaatgctagcattgtagttgttgatgctttggaaacaaaaggcagcatcaaactactaaatactaataatgagagttgtttaccagtaaaattggaaatttataatctgaggcatagtaataagtttgttacacataattaccatctcttttgttttctgtagaaaagctcaaaagcattataaaagctaagtaatgtactccgatgttgatcctgttttgtcgcctatttcaagagactgacattccatagaagagggcaatggaggacgacacatttattttttgttctttgcactatctagcagactatcatcaatgctctaaaatgcagaggttagctggacaatcattttgggaggatgagaaaggaatatcatatgaatcaaatggtctataatgttctaactgatggcctagcaaggattctaatgcttagcttctgtttccatatcaagtttatgtcataattacttttttaatgtgttggatttattttcgaacttagggcgtgttcatttatgtgtcgcattcatggttcaaaattgatttgggtttggtgttcatttatcttgcatgtgttgcaatgaaggaggaatgggtggagggacgagcaagatgtcaatgttctattgaaacaaactgccttaattattaggctatcactactgaaacaaactacctctgtcgtcaacctactaacttccatattcttcacactcagctttgcaaaatttacttgactggctttttttggcttaaaatataactcagggagacgtgattttgggacgatcaaactgttgggattgcgcttggacattccgggcagcgtgcacccaagattgaccaagctgattcgacggtgctaggacaaagatcctgatgcgtgtctgacttttgcagagattactatagaactccaagatagtctacaccatatcgaggcacccaagggagccagccgtcgttcttgagcaaagatgtagaagaaataagaggaagaaaaagaataagaatacatacgtagggcaaggtttcctacttttttgtgtgttacacaagttgcagtatgagtgtttgtggtgtatgtcatagttataaatatttcaaggccaaggaatacctagctacgacaaagatggggatggctaggaaagaaaaccaattgtgggacaatgataattgatatcaatgtcagccccttatatgctacacctgcaacctgtaatcataccgtcaactgcacctgacatccgtgcatcagaagtttttaattctgatgatttagattatgtctataaatctgttgaggatggcatggaacatatttttacttcaacaacacaactccaatttggtcatgatttgtgcttgaatgaagaagtcaagatttccttttgactcagcctgtttttctgaattactggtttgttacaaaattgtagatataatagggaactaatttgtgttgttttttatcagagatgcaggagctcta

SEQ ID NO: 209372 - DNA, 2164 bp, Zea Mays
ggcgtccacaccctcaccatggctccgccctcctcccccgctaatcaccacgccgcgcacgcgccgcgcgaggcccgtcttcgttcccccaccgctaatctcgccgcggcatccatggcgccgccctcgccctccccccacatgtccacgccggcgccccctccctcgcgccccacctcaatctcctccattgcgcgcccgagaacgcgcaaatcccccattcccgcgcctctccctcgcgcctcgatggaatcgccacggcatccatggtagggtcctcaggatccacctccaccgcgtcgccacagtccgcaggggccgagggtgccccgacggtggggacctagactgtggtcaggtgcacgcgtattcaagcaggcgctcttgcttttcgtccacaacaagttctccatgtgccctgggcacgcgacacatgttcggggtggtgggcattaccgtcacctccctcacgtcccgtgccgccgcggccgaggtctgcttcctcgccttccgcaacgagcagtccgcggggtacgccgccgcctacgacttcctgacgggctccccgggcgccctcctcatcgtctccggcccaagatacatccacgggctcgccggcctctcccacgccaccgccaacgcctggtcgctcctcatgagctccggatcctgcgaccaggctgacgccggcaggggcgacttccaggagctcgaccagatcgctgccaccaagcccttcgccaagctcgccgtcaaggcaacaaccatcctcaacgtatctaggtcttccctgccaacaagaacaaatggcacgcccgccgtgccgatttgaggtggttttggaggtgaggaggggtacgatttcggtgaccctaggccttgcgggtccggtggatggaagcggtggagctgccattaccagctaaggtggagttcaggaagccaagaatttgagagatccctttgtatggttatttgggaaggtgagaccgctgctgaggtaatggagcgcatccagagaaaacttagagttcatgatgatgaattgtccaagttgaagcttgcattcatttccatgaacaaacaagagtacctccaagacactaacgttgtatcaacatgtttttaggcaagtgatttctttataatgcttacatgcataccttctcttgttcactatgttcatacacgatgctttgctttttactatacgagagatgtatatggtgcttgggaacaataccttggcttggagcacactgatacaacattgaaacaataccttggcttgggatcaataccggcaaggacccaacaagcccaagagggcacccaacgcttacttcgtgttcatggagacgtgattttgggacgatcaaactgttgggattgcgcttggacattccgggcagcgtgcacccaagattgaccaagctgattcgacggtgctaggacaaagatcctgatgcgtgtctgacttttgcagagattactatagaactccaagatagtctacaccatatcgaggcacccaagggagccagccgtcgttcttgagcaaagatgtagaagaaataagaggaagaaaaagaataagaatacatacgtagggcaaggtttcctacttttttgtgtgttacacaagttgcagtatgagtgtttgtggtgtatgtcatagttataaatatttcaaggccaagtaagtataaaaaccgaccttagctcagttggtagagcggaggactgtagtggattccccatgtcatttgttcttgttggcagggaatacctagctacgacaaagatggggatggctaggaaagaaaaccaattgtgggacaatgataattgatatcaatgtcagccccttatatgctacacctgcaacctgtaatcataccgtcaactgcacctgacatccgtgcatcagaagtttttaattctgatgatttagattatgtctataaatctgttgaggatggcatggaacatatttttacttcaacaacacaactccaatttggtcatgatttgtgcttgaatgaagaagtcaagatttccttttgactcagcctgtttttctgaattactggtttgttacaaaattgtagatataatagggaactaatttgtgttgttttttatcagagatgcaggagctcta

SEQ ID NO: 209373 - DNA, 2990 bp, Zea Mays
ctcaccatggctccgccctcctcccccgctaatcaccacgccgcgcacgcgccgcgcgaggcccgtcttcgttcccccaccgctaatctcgccgcggcatccatggcgccgccctcgccctccccccacatgtccacgccggcgccccctccctcgcgccccacctcaatctcctccattgcgcgcccgagaacgcgcaaatcccccattcccgcgcctctccctcgcgcctcgatggaatcgccacggcatccatggtagggtcctcaggatccacctccaccgcgtcgccacagtccgcaggggccgagggtgccccgacggtggggacctagactgtggtcaggtgcacgcgtattcaagcaggcgctcttgcttttcgtccacaacaagttctccatgtgccctgggcacgcgacacatgttcggggtggtgggcattaccgtcacctccctcacgtcccgtgccgccgcggccgaggtctgcttcctcgccttccgcaacgagcagtccgcggggtacgccgccgcctacgacttcctgacgggctccccgggcgccctcctcatcgtctccggcccaagatacatccacgggctcgccggcctctcccacgccaccgccaacgcctggtcgctcctcatgagctccggatcctgcgaccaggctgacgccggcaggggcgacttccaggagctcgaccagatcgctgccaccaagcccttcgccaagctcgccgtcaaggcaacaaccatcctcaacgtatctaggtcttccctgccaacaagaacaaatggcacgcccgccgtgccgatttgaggtggttttggaggtgaggaggggtacgatttcggtgaccctaggccttgcgggtccggtggatggaagcggtggagctgccattaccagctaaggtggagttcaggaagccaaggtaacgacagcaaaaatatctcttctggcgtgtaaccgtgtattgtgaagttgccataggttcagcgagaaacactgaagaacttactgttctggctatggttgctgaaaagtttggtcatcagcagttggatttgttaccagttggtgtatctcttgtgcttcgccatatgagtctactctctattctatgttttgatatggtgcagttgaatttttcttgagatatggtgcagttggtgtatctcttgtgcttcgcaattgcatgataaatagcatgttcaacggatatcattttaatttccaagaaatactttgtaagttcctcaacatatatactgcacagagaactaagccccagcaactgaataatcatctattacatgttaaaaaatatgattctcgtgatctctccgtttatatattatagaattaagatgtatacaattatactgaccgttctatctattctattgaaaaatacaattatatttacgaagattcatctgtgatacttatgtatagttgtcttgcataacattgcatctgtcaattttggaacaaatcccagaggaagagaataatcttggcccacatgatcgattggttcatgtttaccatttcatgaaagaccctaaccagaatcatcaaattcagaatttgagagatccctttgtatggttatttgggaaggtgagaccgctgctgaggtaatggagcgcatccagagaaaacttagagttcatgatgatgaattgtccaagttgaagcttgcattcatttccatgaacaaacaagagtacctccaagacactaacgttgtatcaacatgtttttaggcaagtgatttctttataatgcttacatgcataccttctcttgttcactatgttcatacacgatgctttgctttttactatacgagagatgtatatggtgcttgggaacaataccttggcttggagcacactgatacaacattgaaacaataccttggcttgggatcaataccggcaaggacccaacaagcccaagagggcacccaacgcttacttcgtgttcatgaggaatgggtggagggacgagcaagatgtcaatgttctattgaaacaaactgccttaattattaggctatcactactgaaacaaactacctctgtcgtcaacctactaacttccatattcttcacactcagctttgcaaaatttacttgactggctttttttggcttaaaatataactcagggagacgtgattttgggacgatcaaactgttgggattgcgcttggacattccgggcagcgtgcacccaagattgaccaagctgattcgacggtgctaggacaaagatcctgatgcgtgtctgacttttgcagagattactatagaactccaagatagtctacaccatatcgaggcacccaagggagccagccgtcgttcttgagcaaagatgtagaagaaataagaggaagaaaaagaataagaatacatacgtagggcaaggtttcctacttttttgtgtgttacacaagttgcagtatgagtgtttgtggtgtatgtcatagttataaatatttcaaggccaagtaagtataaaaaccgaccttagctcagttggtagagcggaggactgtagtggattccccatgtcatttgttcttgttggcagggaatacctagctacgacaaagatggggatggctaggaaagaaaaccaattgtgggacaatgataattgatatcaatgtcagccccttatatgctacacctgcaacctgtaatcataccgtcaactgcacctgacatccgtgcatcagaagtttttaattctgatgatttagattatgtctataaatctgttgaggatggcatggaacatatttttacttcaacaacacaactccaatttggtcatgatttgtgcttgaatgaagaagtcaagatttccttttgactcagcctgtttttctgaattactggtttgttacaaaattgtagatataatagggaactaatttgtgttgttttttatcagagatgcaggagctcta

SEQ ID NO: 209374 - DNA, 2639 bp, Zea Mays
ctcaccatggctccgccctcctcccccgctaatcaccacgccgcgcacgcgccgcgcgaggcccgtcttcgttcccccaccgctaatctcgccgcggcatccatggcgccgccctcgccctccccccacatgtccacgccggcgccccctccctcgcgccccacctcaatctcctccattgcgcgcccgagaacgcgcaaatcccccattcccgcgcctctccctcgcgcctcgatggaatcgccacggcatccatggtagggtcctcaggatccacctccaccgcgtcgccacagtccgcaggggccgagggtgccccgacggtggggacctagactgtggtcaggtgcacgcgtattcaagcaggcgctcttgcttttcgtccacaacaagttctccatgtgccctgggcacgcgacacatgttcggggtggtgggcattaccgtcacctccctcacgtcccgtgccgccgcggccgaggtctgcttcctcgccttccgcaacgagcagtccgcggggtacgccgccgcctacgacttcctgacgggctccccgggcgccctcctcatcgtctccggcccaagatacatccacgggctcgccggcctctcccacgccaccgccaacgcctggtcgctcctcatgagctccggatcctgcgaccaggctgacgccggcaggggcgacttccaggagctcgaccagatcgctgccaccaagcccttcgccaagctcgccgtcaaggcaacaaccatcctcaacgtatctaggtcttccctgccaacaagaacaaatggcacgcccgccgtgccgatttgaggtggttttggaggtgaggaggggtacgatttcggtgaccctaggccttgcgggtccggtggatggaagcggtggagctgccattaccagctaaggtggagttcaggaagccaaggtaacgacagcaaaaatatctcttctggcgtgtaaccgtgtattgtgaagttgccataggttcagcgagaaacactgaagaacttactgttctggctatggttgctgaaaagtttggtcatcagcagttggatttgttaccagttggtgtatctcttgtgcttcgccatatgagtctactctctattctatgttttgatatggtgcagttgaatttttcttgagatatggtgcagttggtgtatctcttgtgcttcgcaattgcatgataaatagcatgttcaacggatatcattttaatttccaagaaatactttgtaagttcctcaacatatatactgcacagagaactaagccccagcaactgaataatcatctattacatgttaaaaaatatgattctcgtgatctctccgtttatatattatagaattaagatgtatacaattatactgaccgttctatctattctattgaaaaatacaattatatttacgaagattcatctgtgatacttatgtatagttgtcttgcataacattgcatctgtcaattttggaacaaatcccagaggaagagaataatcttggcccacatgatcgattggttcatgtttaccatttcatgaaagaccctaaccagaatcatcaaattcagaatttgagagatccctttgtatggttatttgggaaggtgagaccgctgctgaggtaatggagcgcatccagagaaaacttagagttcatgatgatgaattgtccaagttgaagcttgcattcatttccatgaacaaacaagagtacctccaagacactaacgttgtatcaacatgtttttagagatgtatatggtgcttgggaacaataccttggcttggagcacactgatacaacattgaaacaataccttggcttgggatcaataccggcaaggacccaacaagcccaagagggcacccaacgcttacttcgtgttcatggagacgtgattttgggacgatcaaactgttgggattgcgcttggacattccgggcagcgtgcacccaagattgaccaagctgattcgacggtgctaggacaaagatcctgatgcgtgtctgacttttgcagagattactatagaactccaagatagtctacaccatatcgaggcacccaagggagccagccgtcgttcttgagcaaagatgtagaagaaataagaggaagaaaaagaataagaatacatacgtagggcaaggtttcctacttttttgtgtgttacacaagttgcagtatgagtgtttgtggtgtatgtcatagttataaatatttcaaggccaaggaatacctagctacgacaaagatggggatggctaggaaagaaaaccaattgtgggacaatgataattgatatcaatgtcagccccttatatgctacacctgcaacctgtaatcataccgtcaactgcacctgacatccgtgcatcagaagtttttaattctgatgatttagattatgtctataaatctgttgaggatggcatggaacatatttttacttcaacaacacaactccaatttggtcatgatttgtgcttgaatgaagaagtcaagatttccttttgactcagcctgtttttctgaattactggtttgttacaaaattgtagatataatagggaactaatttgtgttgttttttatcagagatgcaggagctcta

SEQ ID NO: 209375 - DNA, 2279 bp, Zea Mays
atggctccgccctcctcccccgctaatcaccacgccgcgcacgcgccgcgcgaggcccgtcttcgttcccccaccgctaatctcgccgcggcatccatggcgccgccctcgccctccccccacatgtccacgccggcgccccctccctcgcgccccacctcaatctcctccattgcgcgcccgagaacgcgcaaatcccccattcccgcgcctctccctcgcgcctcgatggaatcgccacggcatccatggtagggtcctcaggatccacctccaccgcgtcgccacagtccgcaggggccgagggtgccccgacggtggggacctagactgtggtcaggtgcacgcgtattcaagcaggcgctcttgcttttcgtccacaacaagttctccatgtgccctgggcacgcgacacatgttcggggtggtgggcattaccgtcacctccctcacgtcccgtgccgccgcggccgaggtctgcttcctcgccttccgcaacgagcagtccgcggggtacgccgccgcctacgacttcctgacgggctccccgggcgccctcctcatcgtctccggcccaagatacatccacgggctcgccggcctctcccacgccaccgccaacgcctggtcgctcctcatgagctccggatcctgcgaccaggctgacgccggcaggggcgacttccaggagctcgaccagatcgctgccaccaagcccttcgccaagctcgccgtcaaggcaacaaccatcctcaacgtatctaggtcttccctgccaacaagaacaaatggcacgcccgccgtgccgatttgaggtggttttggaggtgaggaggggtacgatttcggtgaccctaggccttgcgggtccggtggatggaagcggtggagctgccattaccagctaaggtggagttcaggaagccaaggtgagaccgctgctgaggtaatggagcgcatccagagaaaacttagagttcatgatgatgaattgtccaagggcaatatgacttgctccccttcctgtcaagctacatgcttcgaccagctgaggcactgaaatgaaactaaattattgttgcaaacctctctgccatcttgtgcgtgcactatgcaaaatcacaaggcgggcttagtttctctaacactgataatgcttatttgatcagttgaagcttgcattcatttccatgaacaaacaagagtacctccaagacactaacgttgtatcaacatgtttttaggcaagtgatttctttataatgcttacatgcataccttctcttgttcactatgttcatacacgatgctttgctttttactatacgagagatgtatatggtgcttgggaacaataccttggcttggagcacactgatacaacattgaaacaataccttggcttgggatcaataccggcaaggacccaacaagcccaagagggcacccaacgcttacttcgtgttcatggagacgtgattttgggacgatcaaactgttgggattgcgcttggacattccgggcagcgtgcacccaagattgaccaagctgattcgacggtgctaggacaaagatcctgatgcgtgtctgacttttgcagagattactatagaactccaagatagtctacaccatatcgaggcacccaagggagccagccgtcgttcttgagcaaagatgtagaagaaataagaggaagaaaaagaataagaatacatacgtagggcaaggtttcctacttttttgtgtgttacacaagttgcagtatgagtgtttgtggtgtatgtcatagttataaatatttcaaggccaagtaagtataaaaaccgaccttagctcagttggtagagcggaggactgtagtggattccccatgtcatttgttcttgttggcagggaatacctagctacgacaaagatggggatggctaggaaagaaaaccaattgtgggacaatgataattgatatcaatgtcagccccttatatgctacacctgcaacctgtaatcataccgtcaactgcacctgacatccgtgcatcagaagtttttaattctgatgatttagattatgtctataaatctgttgaggatggcatggaacatatttttacttcaacaacacaactccaatttggtcatgatttgtgcttgaatgaagaagtcaagatttccttttgactcagcctgtttttctgaattactggtttgttacaaaattgtagatataatagggaactaatttgtgttgttttttatcagagatgcaggagctcta

SEQ ID NO: 209376 - DNA, 1079 bp, Zea Mays
gtcgatttgctatccaacaattttgcattatttctggctacctattggtcttgctgccacaccggagttgccatcttagcttttgtcgtcctgtccccttcctatcagggcaatatgacttgctccccttcctgtcaagctacatgcttcgaccagctgaggcactgaaatgaaactaaattattgttgcaaacctctctgccatcttgtgcgtgcactatgcaaaatcacaaggcgggcttagtttctctaacactgataatgcttatttgatcagttgaagcttgcattcatttccatgaacaaacaagagtacctccaagacactaacgttgtatcaacatgtttttagggagacgtgattttgggacgatcaaactgttgggattgcgcttggacattccgggcagcgtgcacccaagattgaccaagctgattcgacggtgctaggacaaagatcctgatgcgtgtctgacttttgcagagattactatagaactccaagatagtctacaccatatcgaggcacccaagggagccagccgtcgttcttgagcaaagatgtagaagaaataagaggaagaaaaagaataagaatacatacgtagggcaaggtttcctacttttttgtgtgttacacaagttgcagtatgagtgtttgtggtgtatgtcatagttataaatatttcaaggccaaggaatacctagctacgacaaagatggggatggctaggaaagaaaaccaattgtgggacaatgataattgatatcaatgtcagccccttatatgctacacctgcaacctgtaatcataccgtcaactgcacctgacatccgtgcatcagaagtttttaattctgatgatttagattatgtctataaatctgttgaggatggcatggaacatatttttacttcaacaacacaactccaatttggtcatgatttgtgcttgaatgaagaagtcaagatttccttttgactcagcctgtttttctgaattactggtttgttacaaaattgtagatataatagggaactaatttgtgttgttttttatcagagatgcaggagctcta

SEQ ID NO: 209377 - DNA, 1765 bp, Zea Mays
ggctcgccaaggaagcatccactgaccagcatccaagcgaggcagcctgaccgcccaccgtactacacgcgagcgcgcgcttctgcccccgccctgtaaaactctgaacataaaagtgcatcgccctgcctccctctcttcatctccctcttccaaggagaacacccacctctctctctctctctctctctctctctctctctctcttgttgggacctggagaagaggaaggaacagggagcaggggggaagaagaggttgctgcgacggctcaagcctcaagcagacaagcagagaaacaccagttggtcaagatgtcagctggtttccagctcggtgtgatcgggtcacttgcactctctgtcgcatcctcagttgccattgtcatctgcaacaaagctctcatcagcacgcttggttttccgttcgccacaacattaacaagctggcatctgatggtgaccttctgcaccctccatgtggcacatcgcttgcatttcttcgagcccaaggcgattgatggacagacggtgatactctttgggttgctgaatggcacgtcaattggccttctcaacctgagcttaggattcaactccattggattctaccagatgacaaaattggcgatcatacctttcactgtgctattggagactatcttcttgaacaaaagattcagcgagagtatcaaactctctcttctggtcttacttcttggagtaggaattgcttcaattactgatctcaagctaaacatgcttggttccatcctttctggcctcgccattgccactacttgtgttggccaaattgtatcctacatttaatttaatagcaatacaattatcaatagtctcagaactgtaaggagaaagcaaatcaagcagatagattattagttcttttcaacccacttctcattgcaatgtacattgataaagcagtttattattaaaaaaacacaaggactcagtactgaaatcttattatctattcagagaccttctagtttgagccactttatgaatcacttggcatgaatctgtcacatgcttcccataccagtgccacatgctaatccttgaccaatatgtttttgaacgaagctcacaaatacaatacagaagaggttgaaggtctcctcaacgcagcttctgtaccaatctgcgccttaccaggcaggaattctgtttgcaactggcccttttgtggatcaacttcttactgaccggagtgtctttgcacacaaatactctgctccagttctgggtttcattgtcctatcttgcttgattgcggtgtctgtgaacttcagtacatttcttgtgatcggaacaacatccccagtgacataccaggaacatattgggcattctaattgccatatttggtatggcactatactcctacttctctgtaagagagggcaagaagaagtcagcaaatgatgctctaccagtttcacagatggcagataaggaggctgaaccacttttggcaactaaagacaacaacgacaccaagaaagcaaatggtttatctcacgactgctgaggcttttcttgtagtttaggtctagtatgaactgcccttcgaatttaaaggacctggaaagccattcttttcattcttgagttcctttttaggaaacggagcttttaaaatttgtatagaatgcatattttgacattaaaattattatttgattgtattctacacacagcagttccagctgaagttttactagtgcagatctcaaact

SEQ ID NO: 209378 - DNA, 1267 bp, Zea Mays
ggctcgccaaggaagcatccactgaccagcatccaagcgaggcagcctgaccgcccaccgtactacacgcgagcgcgcgcttctgcccccgccctgtaaaactctgaacataaaagtgcatcgccctgcctccctctcttcatctccctcttccaaggagaacacccacctctctctctctctctctctctctctctctctctctcttgttgggacctggagaagaggaaggaacagggagcaggggggaagaagaggttgctgcgacggctcaagcctcaagcagacaagcagagaaacaccagttggtcaagatgtcagctggtttccagctcggtgtgatcgggtcacttgcactctctgtcgcatcctcagttgccattgtcatctgcaacaaagctctcatcagcacgcttggttttccgttcgccacaacattaacaagctggcatctgatggtgaccttctgcaccctccatgtggcacatcgcttgcatttcttcgagcccaaggcgattgatggacagacggtgatactctttgggttgctgaatggcacgtcaattggccttctcaacctgagcttaggattcaactccattggattctaccagatgacaaaattggcgatcatacctttcactgtgctattggagactatcttcttgaacaaaagattcagcgagagtatcaaactctctcttctggtcttacttcttggagtaggaattgcttcaattactgatctcaagctaaacatgcttggttccatcctttctggcctcgccattgccactacttgtgttggccaaattctcacaaatacaatacagaagaggttgaaggtctcctcaacgcagcttctgtaccaatctgcgccttaccaggcaggaattctgtttgcaactggcccttttgtggatcaacttcttactgaccggagtgtctttgcacacaaatactctgctccagttctgggtttcattgtcctatcttgcttgattgcggtgtctgtgaacttcagtacatttcttgtgatcggaacaacatccccagtgacataccaggaacatattgggcattctaattgccatatttggtatggcactatactcctacttctctgtaagagagggcaagaagaagtcagcaaatgatgctctaccagtttcacagatgactgcgagggttaaagggagatggctagggttacagggcgacgactagggttaggggcgctgggaggctggccgcaaaactttgccca

SEQ ID NO: 209379 - DNA, 529 bp, Zea Mays
atatcgccggggcattgtgctatgccaaactgctcgcctcgctaaatccgctccattccctcgccctcgccgatcgccggatctctccctccgcctcgcttccgccgcacgccagggcgcacggcttcttcctccgctccctcgcctcagcgcagttcctatggggttcctgcaaagcactttttcgctgttgatcggcaccggctgcggcatctacattgcccagaactacgacgtcccaaacataaagaagctcatgaggagcctggtgggcaaggccaaggaggttgaggagtcatacaagaagacgggcaacagcaagaacaaggataacgaatagcgttgacccgcagtctgcggtccaccatctaggaaagctaattgttgcaagattattctgattattggagaaaatatgagatggcatactggaactgcggcctactcttgccccggattgaatctgtctagatgtggcaatacaatttttgaggtgaaagagccggacgggggatccatgcttttggaa

SEQ ID NO: 209380 - DNA, 849 bp, Zea Mays
gccatcaccgcggaagaaagaggtgggagcggggttggacgtagggaagccagacggtgcggattggtccatcaatgagtgagtgcagagatggacacatcaagccctgcagcacttgtcaatgcaaagattatgaacatgtttgttgggcaaagagtgcgcacagttgttcaagtccaacacaatgatggtggaatgcttgtcgggcagtcccctgatgggcatcaattgagtatcaaaagcgccatggatgtccctgtatcacactttatggaagtttatggaattgctgaaaacagccagaccatccgcgctgaagtttgcacagattttggtcctgactttgatcccgagacttttaatcaattgtgcaacctggcgagtaacaagttcaagcacatgttcctgtagaggtcatcatcaagtggaggaccttcggccaactgaagcttgtttgaaatcgatatgattcacctctaaatgttctttcactcaccccagtactctgttgtcagtattggactccttttagcatgtattaatctaagcaacataagactacgaaggcaagcaaaatatatcgtgtagttgaagaacgtatggtcttttctacttttaggcaatccaaagctaagcttgttatgttgctgtcacttacatttggaccctgagaagttgctacaatggctaatgcagcttgatgagaggaaagagttctaatgtgataattacatgccccatctgaaaattctagctttgattttatgtctgcaagatccaccgtagtcaacctgaaaccctctattcagttcttattgggtttaaggcttgagatttagatttttgtgt

SEQ ID NO: 209381 - DNA, 3326 bp, Zea Mays
atctaataaaatcacacttcgacaccaaaccgaacccccttcctcaacatcaacatcaacaattcaacatcgacctcccccaaatctcatcagcaactacacggcaccgcagtccgcagcaaactgtgcacacggcacaccacaccgcggcggccaccgcccgcctggccccaccgtcctcttccacgacgtcactataaaacccgctccaccgtaccgcctcccaagaacccccaaacaaaccccccgctccgccgcccggagaacccacctggccacctcaccgcggcatttccacgagaccacgagcacccctcgccgccttccgaccgcgatgaccgacgccgaagcggacacggaggccgtccgcgccgcggcctgggaggtgctgcgcctcgatcacgacggccacacccacgaggcgctcacccgcgcccgcgacctcatgctcgcgcatcaggacatggcgatcacgcaccgcctcctgggcgacctctcctacggtgccgccgcccgcgcgtgcctcgaagaaggcactcggaaggccgggttggccgcggcagcgccgcacctccacgtcgcccgcgaagcgtttgccgcggcgcgccgcctcgcccccgactgcatcgacattgccgacgcgctcggcgacgccttcgcggcctcctggatgttcagggaggccgagtgcgagtacaagcgcgcgcagcacaccccgcagcctaccgacccggcactccacaacgcggcctacggcatgtgcatgtccgggggccacgagcatgaccgcgacccggacttcatgagcgtgagggtggaggaggtcagggcgcgggcccgcgcctcctacagccgcatgaagacggagcagctccttccgatcgcgatccaccgggtgctcgaagccggcatgcagctcggcgcggcggaggggcgcaagcaggccaagggcatcgccgaggtgttccccgacctggggcgcgcgcagtacctcgcggcgtacatggacctggagttcgtgcgcagcctcgacgcggccatcgacaagcgcctgttcctgcgccgcaccctcgtcatcaccgagcgagtggcgcgggactaccccaaatcgcccgtgttcgcctccttccacgccaagctcctcttcgtcctgggtgagtacgacgcagccgagacggagtgccgccgcgcgctggaaatggtggagcccaatgacccgcaagacgactgcatcccggttgggtcaatcagcggggaaaaccgtggcgtcaggctggtttcggtggcctgcgagttccacgagctgatcaacaagatcgtgatgctggccagcgattactgggactccatgagcagtgagaggcagcgtcacagcttcctacaggtcaggctcgatgtgctgcagcatgagtacaacaaggttgatccgtcgcatgcgttcgctatgtctgatgtgcggagctttgtcaaggagcacgagtcttggaggttctggatttgccccctttgtcattgcaagaagttcatgtacactggtttgctattgtcacacatgtgcaccaggcacccaagggcagtcctgccacgacttcagtcagtattggatcagaaactcagtgatgaagcattggagagtgacgattctctgcatgcggtgacattttgtgaagattcagaacagcaagacgtgacgatttgcttcaacaagagcagcgaggtattcaaatggttgttctatgcaccttcaagtggagtacggccaaagccattccttgaaatacgacaaatgaagtgtgataaaggacgtatgctgcttgaaagcataaaggacaaaatgaagactctacctgcagatagatctagtactgagttcgccaaggctattcctgaaatcgaggagcagtggcagaattttctcaaatgttctgtgttggactacagagaagtcattctccaacttgcaagatcattcctatggagagatttaaagaaatgcatgactgaggatccagaacttgctgctaagccgattagtgccgctgatattgatgccatattcactaaagaagttgttaatcctgccagcaatgctgtagagtcttctcaaacagtgggggctcaaatggtcagtggaaattgtcaagaaagtgttcacgacgaaggggacagctctgacaaccatggaaagaatacagaatcgtcagatcagacaactgatatggtggaacgtgagactggccttgctgcaaaactggataagttggagaatggtccaaagatcagtgagagtaatccggaaggtaatgttcacgacaaatgggagagttctaacaaccacggaaagattacagaatcatcacatcaggcaatcggtatggtggaaagtgagactgaccttgctgcaaaatcagtaatgacattctgtaatgttcacgacgaagaggagagttgtgacaaccagggaaagaatacagaatcatcagatcaggccatttgtatggtggaaagtgagaccgaccttgctacaaaactgaataagttggagattgatccaaagatcagtgagagtaaccaggaaagtaatgttcacgacaatggggagagttctggcaaccagggaaagaatacaaaatcactagatcaggcaatcggtatggcggaaagtgagaccgaccttgcgggaaaactagataagttggggactgatccaaagatcagtgagagtaaccaggaaagtgagttacacgctgaacatgagagttctgattccccagtaagcaggagtgacgtggcactaagctcgaaggggacttctgaggccacggttaccgacacaaagttgccacggttacctaccaacacgatggagggaaagaaacaaaaacaatacaccgtggtggctaataaaaagtctaaaactgttgagaagcaatgtcgtcgcagatcccagatccagactccaaaccttcacattagcaatggaggcacgaggaagatgtagaagaccttcccttcgcgtggtagcaggtagcacaaacacaagagatgagagatgaaagatgggggattctttcctggttattcattatgatagggtacaagtttaataagtagagaagtatagtccctcagaggtacattcggtgttagctcacataatcctttgtagggtttcttaacactccttcttggatgaataccgtgacaaatttattcctcattaaaactccaaaaaacccagtggggaaaaggagaaacagagtgcattgtgtcacttcatgtattgcacttattggctcattaaaaccatctatgagaaactcctg

SEQ ID NO: 209382 - DNA, 1575 bp, Zea Mays
acattcccagagtcattagcgctacagggggaggcaggaagccgcgcgcgtgcccgtttgtggccgaaatcgcagcgcgggtgggtagaccgtagaagactgcagggccggccagccgagcagagctgccgaagccaccacccacccatggcccccgtccccgtgtcggtgtcggccaccctcgcgccgccgccggcggcgccgccaaaggcaacatccaggagctgggaacggcgtgcgccggctgacgccgcgttcgcggccgcctcttccgtcgccatctcggccgcgttgctgacactgacgccggccgcgcccgccgcggccttgtccaaggaggacgtcgccggctcgcttaccaaggccgtggacacggtgagccaggccatcgacgtcggcggcaaggccgctgagcaggtggcggccgtgctcaaggcgttgggcgaggccgtcaagccggcgcttccggtcctgaagagcgccagcgacgaggccctcaagctggccgcgcccgtggtgtccgccgcctccaagcaggccacggaggcactccagggcgccggcgtcgaccccgcccccgttctgtccgtcgccaagaccgcagcggagcagagcacgaaggtgatcgacgccgcgaagcccgtggcctcggcggccgtggagaccatcacgtcgctgggccccgaggactacgtcgtggccgccggagcggcgtttctcgcgtacctcctcgtgccgccggtctggtcgctggtctcgtccagcctccgcggttacaaaggcgacctgaccccggcgcaagcactggacaaggtgaccacgcagggctacgtcctgatcgacgtgcggagcgacaaggacaaggccaaggcaggattgccgcagctgccatcgaacgcgaagaacaagctcgtctctgtgccgctggaagaccttccgagcaagctgaagggcatggtgcgcaacgcgaagaaagccgaggcggagatcgccgctctgaagatatcctacctcaagaagatcggaaagggctccaacgtcatcatcatggactccgacgtcgccaagactgtggcgaagacgctggacagcgtggggttcaagaactgctgggtcatggccggcggcttctctggccggaaagggtgggcgcagagccgtctcggaacggattcctacaacctatccgtggtcgaagtcgtcacgccgtcacgtgtgatccctgctgtcgcaggccgccgcactgggacgaccgctgcacgcattgggacggcctcgtcggcgtccagagcgactactcgcaagcttcttcccggcggcgtagactgatgatgagtggagctgaaactgaaacaactcccaagtgtaaatccatatgtttcttttattttcagatgcaacttttggtctgtgcgttcattttttttcttttgcagtaataacacaattttgtgtccgtaaatagggactgtcatcttctacacagtaaactatctcaaagtatgtctacatactagtcggttgtccgtgcgctgcgatagctcaaaataatacccacgtaaactatctaccaaa

SEQ ID NO: 209383 - DNA, 3206 bp, Zea Mays
atccgttccatctatctgcatccttccgctggtgttctggcaactatcatcggtcggcagtcggcaccgcacacaccctgcccagtgcccaccgtcttcgaagcttctcttctcctcctcctccctaccggctacccttctctccttccctcgccggtcgccaccccctcaccacgagacgcacagccggcagcgaatctcctcaccagcccagacgccgcagcgcagcgccgagccctagtccgccggtccagcgaggcagaaagttgataccgctttggcgtcttccctatggaacatcttccctcaacactagcatggatctgcagtgcgtagcatgagtttgcatgcacgtttggcttttgttcgtcattgaggctggtgcacttctataatgggttcacgatcaaagaacgaagatgacaaggctcttgtcttgtgccaggaaagaaaacgatttgttagagaagctcttgacgggagatgtgcttttgcagctactcatttcgcttatattcagtcactgaggcacacgggatttgctctgagaaaattcgtagagcctgaagtgccgacagattcgtcactgttcacatcaacatctgccactccagagcctcctacaatcatgcagaaaccgatgaccatatctccatccctttcacatcatgctagtgactctttctccccagttccctcaccattatcttcaggacgtttccatgttaatcatatgaaagctgggggcaattcagtgacaactgttaaggagaaggtgattgaacctgtgaccgcaactctcgaaacatcatcccctgtgcgtggacaagctatccatgacctggatgacagttcaacgtttgaagctccccctggaacaccaccatgggactactttggccttttccaacctgttgagagccagatgtcattccatgatgacaaggaacttggtcatgactttgagaatgatgatgatatcaggcgtcttcgggagaaagagggaatcccagaacttgaagaggaactggagaagtctcctgcttatcctgattatctaaagcggcgcctaggacaggagaaacctccagatctcaaagatgttgagaaatctcctatgaatggtggagaggatgatcttgcattgtcagaagatgattttgacaatccaacatctgaatctttagtgcggatgttcaagaatcgcaatgatacacccgttgcacatattgcaacagatcattcatccacatcgcttcctaaagatgacttagtttcagaaacgattgattctcagcctgaaagaccaaaagatgacagagcagttgattctcagactgaaagactaaaagatgtcacgccagatgatcctcagactgaaaaaccaaaagatcatgccggagttgattctcctactgaaaaaacaaaagatcatcctggagttgattctcctgctgaaaaaccaaaacatgacatgagggtactggacattagcatgtatgaaagtgacgaaacgcctgttacaagtcctccgaaagaaatttcatcttcaactgctgcgtttcaagttaatgggaaattcaagaaacctttacatgatgtaaggaatgtggcgagggatttaaactcttgcattaaggagattgagatcttgtttatcaaggcatctgattctgggaaagaagtcccaaggatgcttgaagcagacaaagtcaatttccgccctttactaccagaagaaaaagcgccgggatcaacagcatcaggcttttttgcaacattatttgcttgttgcagagaggaagtccctcttcctcaacctcctcctcaggccgaagtgaagtaccttacctggcatagatcaatgtcttcactttcttcatcatctagaattcctcttgggacaacatcgaaggaagacactgacggtctcaatggaaatatctttggtggtgtatacatgaattcaggcagtcatgcctccacactggacaggttgtatgcatgggagagaaagctttatgatgaagtcaaggcaagcagtgtagtttgcaggcaatatgatgagaaatgtaggcagctaagacaccaggaatcaagaggagaaagccaaatgagtattgacaaaacccgtgctgttgtgaaggatttgcactccagaattttagtggccattcagagaatcgacatgatttcgaagaacatagaggatctaagagacaaagagcttcaaccacaactagaggaattaattggaagtttgactcgcatgtgggcaacaatgcttgagtgtcaccggcatcaacacgatatcattaaactagtatccagcactcgcaacatgaagacctcaattcggtcagaatcacagttccaagcaactctactccttcaggttgagctgaacacattatgttcaaactttcagaaatggatagcatcccacaaagcatatttgcagagcctaaattcatggctactcaagtgtgtgaaggcactacaaaggaagaggaagagttccaggaaaaagaacatcaaagctgatccaataacaaagtatgctgttgcgcccatatttaaaacctgtgagagctggataaatttgttggatgatttaccaacggatttggaggatgctattaaggaccttgctgctgatataaaccgttacgtgccacatcaagagaagcaacgaggcggttcaaagctaactctctcgttgtcccgtagtggaaggtcaaacggcgagatgggtgaagtccacaggagttatacccctatggatttacaatcaagtttggagacatttctagggaagcttgaaatgttctctgatgtttcattgcagaagtacatgaagctcaaagaggatattgatgaggcgaaggagaggtatgaggaggcgcaggcagcccagcggatttaatttctggcacagaacataactagtcatgtagagatgtcatctagtgtcggtgtatgcttgttgaaataataggcataaattacttttgccattttgtaagttgcaagataagcctaggaacaaaattgtagagtacatgctaaaatatgccgctgaactgcggttgtaaatgtgaggtggtgataattgaagtcgaagttgcgggggatataaggtgtacattcatcttggggctatatcaatacatgaggtttcattttcttcattgttctcatctatg

SEQ ID NO: 209384 - DNA, 3110 bp, Zea Mays
gccggcagcgaatctcctcaccagcccagacgccgcagcgcagcgccgagccctagtccgccggtccagcgaggcagaaagttgataccgctttggcgtcttccctatggaacatcttccctcaacactagcatggatctgcagtgcgtagcatgagtttgcatgcacgtttggcttttgttcgtcattgaggctggtgcacttctataatgggttcacgatcaaagaacgaagatgacaaggctcttgtcttgtgccaggaaagaaaacgatttgttagagaagctcttgacgggagatgtgcttttgcagctactcatttcgcttatattcagtcactgaggcacacgggatttgctctgagaaaattcgtagagcctgaagtgccgacagattcgtcactgttcacatcaacatctgccactccagagcctcctacaatcatgcagaaaccgatgaccatatctccatccctttcacatcatgctagtgactctttctccccagttccctcaccattatcttcaggacgtttccatgttaatcatatgaaagctgggggcaattcagtgacaactgttaaggagaaggtgattgaacctgtgaccgcaactctcgaaacatcatcccctgtgcgtggacaagctatccatgacctggatgacagttcaacgtttgaagctccccctggaacaccaccatgggactactttggccttttccaacctgttgagagccagatgtcattccatgatgacaaggaacttggtcatgactttgagaatgatgatgatatcaggcgtcttcgggagaaagagggaatcccagaacttgaagaggaactggagaagtctcctgcttatcctgattatctaaagcggcgcctaggacaggagaaacctccagatctcaaagatgttgagaaatctcctatgaatggtggagaggatgatcttgcattgtcagaagatgattttgacaatccaacatctgaatctttagtgcggatgttcaagaatcgcaatgatacacccgttgcacatattgcaacagatcattcatccacatcgcttcctaaagatgacttagtttcagaaacgattgattctcagcctgaaagaccaaaagatgacagagcagttgattctcagactgaaagactaaaagatgtcacgccagatgatcctcagactgaaaaaccaaaagatcatgccggagttgattctcctactgaaaaaacaaaagatcatcctggagttgattctcctgctgaaaaaccaaaacatgacatgagggtactggacattagcatgtatgaaagtgacgaaacgcctgttacaagtcctccgaaagaaatttcatcttcaactgctgcgtttcaagttaatgggaaattcaagaaacctttacatgatgtaaggaatgtggcgagggatttaaactcttgcattaaggagattgagatcttgtttatcaaggcatctgattctgggaaagaagtcccaaggatgcttgaagcagacaaagtcaatttccgccctttactaccagaagaaaaaggttgtattttagtaggtttctttacattactgttccataattcacgcattgggagttttgattcaaaaagaaagatggaaagtagaaagcgccgggatcaacagcatcaggcttttttgcaacattatttgcttgttgcagagaggaagtccctcttcctcaacctcctcctcaggccgaagtgaagtaccttacctggcatagatcaatgtcttcactttcttcatcatctagaattcctcttgggacaacatcgaaggaagacactgacggtctcaatggaaatatctttggtggtgtatacatgaattcaggcagtcatgcctccacactggacaggttgtatgcatgggagagaaagctttatgatgaagtcaaggcaagcagtgtagtttgcaggcaatatgatgagaaatgtaggcagctaagacaccaggaatcaagaggagaaagccaaatgagtattgacaaaacccgtgctgttgtgaaggatttgcactccagaattttagtggccattcagagaatcgacatgatttcgaagaacatagaggatctaagagacaaagagcttcaaccacaactagaggaattaattggaagtttgactcgcatgtgggcaacaatgcttgagtgtcaccggcatcaacacgatatcattaaactagtatccagcactcgcaacatgaagacctcaattcggtcagaatcacagttccaagcaactctactccttcaggttgagctgaacacattatgttcaaactttcagaaatggatagcatcccacaaagcatatttgcagagcctaaattcatggctactcaagtgtgtgaaggcactacaaaggaagaggaagagttccaggaaaaagaacatcaaagctgatccaataacaaagtatgctgttgcgcccatatttaaaacctgtgagagctggataaatttgttggatgatttaccaacggatttggaggatgctattaaggaccttgctgctgatataaaccgttacgtgccacatcaagagaagcaacgaggcggttcaaagctaactctctcgttgtcccgtagtggaaggtcaaacggcgagatgggtgaagtccacaggagttatacccctatggatttacaatcaagtttggagacatttctagggaagcttgaaatgttctctgatgtttcattgcagaagtacatgaagctcaaagaggatattgatgaggcgaaggagaggtatgaggaggcgcaggcagcccagcggatttaatttctggcacagaacataactagtcatgtagagatgtcatctagtgtcggtgtatgcttgttgaaataataggcataaattacttttgccattttgtaagttgcaagataagcctaggaacaaaattgtagagtacatgctaaaatatgccgctgaactgcggttgtaaatgtgaggtggtgataattgaagtcgaagttgcgggggatataaggtgtacattcatcttggggctatatcaatacatgaggtttcattttcttcattgttctcatctatg

SEQ ID NO: 209385 - DNA, 6350 bp, Zea Mays
gactactgccagggcaggcagcgcagcgggacggaagagcatcaaacgccatcaccagcagaagcagcagcagcaagtcaataataaaagtcggaggcatcaaatccaaaaggtttttattagcatggaagcgatccaaacccctgaccaattcgggacgagcagcaggcggagggggagttgcatctgtgccctctcctgttgctcctcctcgcggtcgcgcgcgcccgggtcctgttgttccgcgctggggtgcgcccgccgatcctgttctacttcgcgtctgggctgcgacgttacctactgccgccgtcacccattggtggaattcgtggcgcggatcgagccgcgggcttgcttccggctcggtgcctgtgtatttattcgcggaaatcgccctagcgtgtgattaggtttgttgttcttctgtgtggcctagtcttcgcgtgttgtggtttgttgtccgctggaggcgaatctagggttacggtcgtccgggatggagtcctccgacgacgggggctccgggccgctgctgctggcggcggggatggggagtcccggccattcgttggtccccgcggccgtcggcggtgcgagtagcgcacctggcgcctccggatccggggggaagccgccggtgaagcgcgtcatgaagacgccctaccagctggaggttctggagaggacgtatgcagaggattcgtacccaaacgagacgaagcgggcggagctatcggtgcagttaaacctcacggacaggcagctgcagatgtggttctgccaccgccggctcaaggaccggaaaccgctggccaagaggcaactgagggacgacgagctgccaccctattccaggagagggcctgaccggccatccgtgcctaggctatctgtgcccgagattgggaggagatactacgaacctccacaagttatgctgcctcacatggcaccagtgcaccttacacaagcggagcatcgggtgatcaattctgtagaagcacttataggggagcctttgagggatgatgggccagtgcttggtattgaatttgatccacttcctcctggtgcatttggcacacctatagttcctgagccaccaaggcagcccttccgatcatatgataccaagatgttttttgggcatgattccaaacccatgaaggctttggcatttttgcctgccacagaccctttacttccaaatagagggaaacagaagtccttggttgggtcttctcatcttggctcacaggcagtacatgaatatcaatttcttcctgagcagccaagtgacacatatgagagggcaagccagtcacacttctataatgctccagcagaggcatcaaacttgagggtagctcctctgtctacaggttcacgctttctacatggacttgagcaggcacctagctatacgtttcacagtcaatcatctggttctagccattcggctcatcgtggcagatcgccgattgcattggcattgacagatcatgagggggctttgtcaaatattaatgttagcccaactccaatccatggcaaatttagcatccctcaagttgctggatttgaaagctccctcgcatcctctgaaagaatgggatatcatgatgatgatacatatcgtgtggacagaaagcgcaagcataatgaggaagctaagactgttagggaggttgaggctcatgaaaagagaatcagaaaggagcttgagaagcaagatctgctgaatagaaagagagaagaacaaatgcagagggaaacagagagacttggtcgtgagagacgaaaggaagaggagaggttgatgcgtgaaaggcagagggaagaagagaaattccaaagggaacaaagacgtgcacacaagcgtatggaaaagtttatgcagaaacaatctataagagctgaaaaactaagacaaaaagaggagcttcgacgagagaaagaagcagcgaagcagaaggctgctaatgagagggctacagcacgtagaatcgcgcgggagagtatggaactgatggaagatgagcgcttagaattattagaactggcctctcgtagtaaagggctcctctcaatggtttctcttgatagtgacacattacagcagcttgattcatttagaggaatgctgggaaagtttcctcctgaaactgtgagactgaaggtgcctttttcaataaaaccatgggcagattccgaggatattattggaaaccttttgatggtttggaagttctttgttacctttggtgatgttcttgggcttccatcattcacattggatgagttcgtgcaggctcttcatgattatgattcaaggctcttaggtgaattgcatattgctctgttgaaatctatcattaaagatattgaggatgttgcccggactccttcagttgctttaggtgtaaatcagagcagttctgccaatcctggaggtggtcacccacaaattgttgaaggggcgtatgcttggggcatcaacatacttaactggcagcaccacttgaactttcttacatggccagaaatattgcgccaatttggtttatgtgctggttttgggcctcagttaaagaaaagcaatgctgaaattgtccatcaccgtgacaataacgaggtccataatggtgtagatgtcatttccattctgcgaaatggttcagcggctgtgaaggctgctgctttaatgaaagaaagagggtatactaatcgcaggtctcgacaccgtctgacacctggaacagtaaagtttgctgctttctatgtactgtcacttgaagggagcagaggtctcacgatattggaagttgcagaaaagatccagaaatctggactgagagaccttacaacaagtaagacaccagaggcatctgtatctgcggcattgtcgagagacactaagctttttgaaagaacagcaccttcgacatattgtgttaaaactccttacagaaaggacccagatgactctgaggctgtgttgtcagcagcacgtgaaaaaatcagggtttttcagaatacactttcagagtgtgaagaagtggagaaggatgtggatgaggctgagagggatgaggattctgaatgtgatgatgctactgatgacgctgatggtgacgacgtgaatattgagggcaaggatgccaagtctcctctagttggagctcaatatgacacacaaattacagtagttggtgatgtaaagaaagaatcaaacagtgtgatgaacatatcagtgccaccaagcattcaaattaaatctagtgcaagtgtaccgttgcatactttagacagtaaagcaagtagttcaactgacccacaagttggagatgatgataaagacactgagatagatgaaagtaaccaaggggagtcctgggtacaggggttagctgagggtgactattgtgatcttagtgtggacgaacggctcaatgctttcgttgcgcttattggtgttgccacagaaggaaattctatccgtgcaattctggaggaacgcctagaagcagcaagtgctttgaaaaaacaaatgtgggctgaggcacaacttgataagaggcgttcaagggatgactttactagtaaggtgcagtatgattcttgtgtgggtataaaggttgatacagatcaaaaaaataatgctgctgaaagtacacttgtgccagtggataaccctattagaaacaacaacggaaattccagtttgacgaacaacgatttacttgttgataagcagaaccagcttattactggtgatgtatttcaacaatggaatggtgtaagccaagaattgagtactaaccccgaaagcttgtctgttcagcaatatgcttcatctgagaaaactagatctcagttgaaatctttcataggtcacaaggcagaacagctatacgtgtacagatcgctaccccttggacaagatcggagacggaaccggtattggcagttttctgcatcttcatcatcctatgaccctggttcgggaagagtcttttttgaatctagagatggatattggagggtcattgattcatctgaggcgtttgaagctttggtatcttcccttgatactcgtggcatccgtgagtcacatctacactcaatgttgcaaagtatcgagccaacttttagggaagctgttgagaggaagaagtgtgttagtttagaacacacaactgggtggactgacaatggaagtaatgaaagtccaaactgcaacaatgagtttggaagtccatgcagtaccctttctggtgttgcttctgataatcttatggcatattcagatactttcaagatagaaattgggcacaacgaagctgagaaaagttctatctcgaaaagggcttctgtgtttctgaaatggatgtggagagagtgctactgtcaccaatccacgtacaccatgaaatatggaaagaagcggtgccctgagttgattcaatcttgtgaccattgctaccagatatacttagctgaagaacaacactgttcttcttgtcacaagtcattcaaacccattcacaatttcttggagcacttatcacaatgcgaagataatcagagaacaaatcctagttggaagacacaaattgtgggcctttctgtacccgtaggattgagattgctgaggttgctcttagctaccattgaggcttcagtaccggcagaagctctcctacctttttggacggatttgtatcgaaaatcttggggtgtgaagttgtattctgcatcatctgctgaagaagtcttgcagatgcttagtgtgctggaaagtgcaataaagcgagattacttatcatctaattttgaaacgacaactgagttgcttaattcaaacacacaagatgctacccagaattcagttggaggttctggatctgccactatacttccatgggttcctgacaccaccgctgctgtcgccttaagattgttagacttggatacttccatctcatacaaacttcattcaaagttggtttcaaataaggagcaagaagctggagatttcatgaagcttccactgagatacccttctattaataagaacaaacaagaaatagaacagttcatacctattggttttgatcaacaggatggaacattgctaactaacagcaatggccgtagaggtcgtggacggggaggtagaggtggaaggggaagtagaggaggtagcaggggaggtagttctcgtggtggtggtggtagggttcccaggggtattggtagctcatccaggattcagttcagggatgacaatagtgtgccctatgggagagcccctcgaaagaatgtacgtggtgggcgtacccgtggccgcggccgcggccgtggacttcgaactgtcagacctcggcaaccatctgaattcagtgccacatcaattccaaagttaaacctattgggcagctttagcatgttaagtaaggcaaatcacactggcaatatgcattctccagagagcttgggtgcagaagagtgggtcttggagagaagggaatatgtcaaggatgatgatgacaatttggtctctcgatatgatgagtcagaggaggaaaatggtgagcctatgaatgaggaatatgatgagcagatctcaggctatccaagggacaattctgagttcagccccatacagatgatgggtgatgtgagccacgatgaggatgctgaaggggatgagggcgaggaggatggagaggactatgaaactgaagatcctgctggtgatgaggatgatgacgttgagatggattgggatgatgacattcgggacaacgatgatggtaatggagcagccaacgcagatgaggatgaaggtggtacatcatcatattcttcagagtatagtgagtgatgagagtggattgaagttgtgcaggtttgtggtttgccaactatgtaagaggctgccagttctaaactgtgctgtggctatggccctatttctattcatttttaactaaaatttatttagggtcttatcattttgttaagaatcatttggatggtgacccattaccatctctagttgtggctcgttattgcatagaagctagccgacagtggaagatcggctttgtacagggatgttcgaaacttcgaatcaggttatttgtggtgtatatataatgccaaattaccaatcacaagaagtaaaaaaaaagtcattcactgtctgtttttttgttcttcagctacatttttcattgctatatatagggagagttttttttagacggttgtcacagtcttggcttacaaatttgtctctaacggtgttcgggtctgatcgattcgtcgtcacgcacttg

SEQ ID NO: 209386 - DNA, 6635 bp, Zea Mays
caacatacaacgcgcgcgcacgaaatccacaccacaccaatccaagaacagatccacatcaccgctcccccttcctttctttccttggttgctgacctccgcatcgagggaaaaaaggactactgccagggcaggcagcgcagcgggacggaagagcatcaaacgccatcaccagcagaagcagcagcagcaagtcaataataaaagtcggaggcatcaaatccaaaaggtttttattagcatggaagcgatccaaacccctgaccaattcgggacgagcagcaggcggagggggagttgcatctgtgccctctcctgttgctcctcctcgcggtcgcgcgcgcccgggtcctgttgttccgcgctggggtgcgcccgccgatcctgttctacttcgcgtctgggctgcgacgttacctactgccgccgtcacccattggtggaattcgtggcgcggatcgagccgcgggcttgcttccggctcggtgcctgtgtatttattcgcggaaatcgccctagcgtgtgattaggtttgttgttcttctgtgtggcctagtcttcgcgtgttgtggtttgttgtccgctggaggcgaatctagggttacggtcgtccgggatggagtcctccgacgacgggggctccgggccgctgctgctggcggcggggatggggagtcccggccattcgttggtccccgcggccgtcggcggtgcgagtagcgcacctggcgcctccggatccggggggaagccgccggtgaagcgcgtcatgaagacgccctaccagctggaggttctggagaggacgtatgcagaggattcgtacccaaacgagacgaagcgggcggagctatcggtgcagttaaacctcacggacaggcagctgcagatgtggttctgccaccgccggctcaaggaccggaaaccgctggccaagaggcaactgagggacgacgaggttagcgccccagtcatagcgccatcacctgtgcttccgcctccatcgccgcccagcgagatgatagcggggactgttggaacctatcgtgagcagctgccaccctattccaggagagggcctgaccggccatccgtgcctaggctatctgtgcccgagattgggaggagatactacgaacctccacaagttatgctgcctcacatggcaccagtgcaccttacacaagcggagcatcgggtgatcaattctgtagaagcacttataggggagcctttgagggatgatgggccagtgcttggtattgaatttgatccacttcctcctggtgcatttggcacacctatagttcctgagccaccaaggcagcccttccgatcatatgataccaagatgttttttgggcatgattccaaacccatgaaggctttggcatttttgcctgccacagaccctttacttccaaatagagggaaacagaagtccttggttgggtcttctcatcttggctcacaggcagtacatgaatatcaatttcttcctgagcagccaagtgacacatatgagagggcaagccagtcacacttctataatgctccagcagaggcatcaaacttgagggtagctcctctgtctacaggttcacgctttctacatggacttgagcaggcacctagctatacgtttcacagtcaatcatctggttctagccattcggctcatcgtggcagatcgccgattgcattggcattgacagatcatgagggggctttgtcaaatattaatgttagcccaactccaatccatggcaaatttagcatccctcaagttgctggatttgaaagctccctcgcatcctctgaaagaatgggatatcatgatgatgatacatatcgtgtggacagaaagcgcaagcataatgaggaagctaagactgttagggaggttgaggctcatgaaaagagaatcagaaaggagcttgagaagcaagatctgctgaatagaaaggtcttccttagttgcactaagaaagttcatgcatacctttcatgatgcattattattttttcctctttctgcagagagaagaacaaatgcagagggaaacagagagacttggtcgtgagagacgaaaggaagaggagaggttgatgcgtgaaaggcagagggaagaagagaaattccaaagggaacaaagacgtgcacacaagcgtatggaaaagtttatgcagaaacaatctataagagctgaaaaactaagacaaaaagaggagcttcgacgagagaaagaagcagcgaagcagaaggctgctaatgagagggctacagcacgtagaatcgcgcgggagagtatggaactgatggaagatgagcgcttagaattattagaactggcctctcgtagtaaagggctcctctcaatggtttctcttgatagtgacacattacagcagcttgattcatttagaggaatgctgggaaagtttcctcctgaaactgtgagactgaaggtgcctttttcaataaaaccatgggcagattccgaggatattattggaaaccttttgatggtttggaagttctttgttacctttggtgatgttcttgggcttccatcattcacattggatgagttcgtgcaggctcttcatgattgattcaaggctcttaggtgaattgcatattgctctgttgaaatctatcattaaagatattgaggatgttgcccggactccttcagttgctttaggtgtaaatcagagcagttctgccaatcctggaggtggtcacccacaaattgttgaaggggcgtatgcttggggcatcaacatacttaactggcagcaccacttgaactttcttacatggccagaaatattgcgccaatttggtttatgtgctggttttgggcctcagttaaagaaaagcaatgctgaaattgtccatcaccgtgacaataacgaggtccataatggtgtagatgtcatttccattctgcgaaatggttcagcggctgtgaaggctgctgctttaatgaaagaaagagggtatactaatcgcaggtctcgacaccgtctgacacctggaacagtaaagtttgctgctttctatgtactgtcacttgaagggagcagaggtctcacgatattggaagttgcagaaaagatccagaaatctggactgagagaccttacaacaagtaagacaccagaggcatctgtatctgcggcattgtcgagagacactaagctttttgaaagaacagcaccttcgacatattgtgttaaaactccttacagaaaggacccagatgactctgaggctgtgttgtcagcagcacgtgaaaaaatcagggtttttcagaatacactttcagagtgtgaagaagtggagaaggatgtggatgaggctgagagggatgaggattctgaatgtgatgatgctactgatgacgctgatggtgacgacgtgaatattgagggcaaggatgccaagtctcctctagttggagctcaatatgacacacaaattacagtagttggtgatgtaaagaaagaatcaaacagtgtgatgaacatatcagtgccaccaagcattcaaattaaatctagtgcaagtgtaccgttgcatactttagacagtaaagcaagtagttcaactgacccacaagttggagatgatgataaagacactgagatagatgaaagtaaccaaggggagtcctgggtacaggggttagctgagggtgactattgtgatcttagtgtggacgaacggctcaatgctttcgttgcgcttattggtgttgccacagaaggaaattctatccgtgcaattctggaggaacgcctagaagcagcaagtgctttgaaaaaacaaatgtgggctgaggcacaacttgataagaggcgttcaagggatgactttactagtaaggtgcagtatgattcttgtgtgggtataaaggttgatacagatcaaaaaaataatgctgctgaaagtacacttgtgccagtggataaccctattagaaacaacaacggaaattccagtttgacgaacaacgatttacttgttgataagcagaaccagcttattactggtgatgtatttcaacaatggaatggtgtaagccaagaattgagtactaaccccgaaagcttgtctgttcagcaatatgcttcatctgagaaaactagatctcagttgaaatctttcataggtcacaaggcagaacagctatacgtgtacagatcgctaccccttggacaagatcggagacggaaccggtattggcagttttctgcatcttcatcatcctatgaccctggttcgggaagagtcttttttgaatctagagatggatattggagggtcattgattcatctgaggcgtttgaagctttggtatcttcccttgatactcgtggcatccgtgagtcacatctacactcaatgttgcaaagtatcgagccaacttttagggaagctgttgagaggaagaagtgtgttagtttagaacacacaactgggtggactgacaatggaagtaatgaaagtccaaactgcaacaatgagtttggaagtccatgcagtaccctttctggtgttgcttctgataatcttatggcatattcagatactttcaagatagaaattgggcacaacgaagctgagaaaagttctatctcgaaaagggcttctgtgtttctgaaatggatgtggagagagtgctactgtcaccaatccacgtacaccatgaaatatggaaagaagcggtgccctgagttgattcaatcttgtgaccattgctaccagatatacttagctgaagaacaacactgttcttcttgtcacaagtcattcaaacccattcacaatttcttggagcacttatcacaatgcgaagataatcagagaacaaatcctagttggaagacacaaattgtgggcctttctgtacccgtaggattgagattgctgaggttgctcttagctaccattgaggcttcagtaccggcagaagctctcctacctttttggacggatttgtatcgaaaatcttggggtgtgaagttgtattctgcatcatctgctgaagaagtcttgcagatgcttagtgtgctggaaagtgcaataaagcgagattacttatcatctaattttgaaacgacaactgagttgcttaattcaaacacacaagatgctacccagaattcagttggaggttctggatctgccactatacttccatgggttcctgacaccaccgctgctgtcgccttaagattgttagacttggatacttccatctcatacaaacttcattcaaagttggtttcaaataaggagcaagaagctggagatttcatgaagcttccactgagatacccttctattaataagaacaaacaagaaatagaacagttcatacctattggttttgatcaacaggatggaacattgctaactaacagcaatggccgtagaggtcgtggacggggaggtagaggtggaaggggaagtagaggaggtagcaggggaggtagttctcgtggtggtggtggtagggttcccaggggtattggtagctcatccaggattcagttcagggatgacaatagtgtgccctatgggagagcccctcgaaagaatgtacgtggtgggcgtacccgtggccgcggccgcggccgtggacttcgaactgtcagacctcggcaaccatctgaattcagtgccacatcaattccaaagttaaacctattgggcagctttagcatgttaagtaaggcaaatcacactggcaatatgcattctccagagagcttgggtgcagaagagtgggtcttggagagaagggaatatgtcaaggatgatgatgacaatttggtctctcgatatgatgagtcagaggaggaaaatggtgagcctatgaatgaggaatatgatgagcagatctcaggctatccaagggacaattctgagttcagccccatacagatgatgggtgatgtgagccacgatgaggatgctgaaggggatgagggcgaggaggatggagaggactatgaaactgaagatcctgctggtgatgaggatgatgacgttgagatggattgggatgatgacattcgggacaacgatgatggtaatggagcagccaacgcagatgaggatgaaggtggtacatcatcatattcttcagagtatagtgagtgatgagagtggattgaagttgtgcaggtttgtggtttgccaactatgtaagaggctgccagttctaaactgtgctgtggctatggccctatttctattcatttttaactaaaatttatttagggtcttatcattttgttaagaatcatttggatggtgacccattaccatctctagttgtggctcgttattgcatagaagctagccgacagtggaagatcggctttgtacagggatgttcgaaacttcgaatcaggttatttgtggtgtatatataatgccaaattaccaatcacaagaagtaaaaaaaaagtcattcactgtctgtttttttgttcttcagctacatttttcattgctatatatagggagagttttttttagacggttgtcacagtcttggcttacaaatttgtctctaacggtgttcgggtctgatcgattcgtcgtcacgcacttg

SEQ ID NO: 209387 - DNA, 893 bp, Zea Mays
ctttgatgctttatacttggacactcggcatataacttgaaggttacggaatgactgaaacttgtgggatcatatctttagagtacccagaaaaaggacaaattcgtcaatttggttcaactggagcacttgtctcaggagttgaagcaaaaattgttgatgtagaaacattgatatgtctgccaccaaatcaactaggagaaatttgtgttcgaggaccgaacataatgcaagggtatttcaacaatgtgcaagctactgaatttacaatcaagcaagggtggttgcatactggtgatattggatactttgatgagggaggtcagcttttcgtagttgatagacttaaagaactgattaagtacaaaggttttcagattgcacctgccgagcttgaagggctacttctgtctcatccagaaattctggatgctgttgttatcccgttccccgatgctgaagctggtgaagttcctattgcttacgtcgtaaggtcctctgagagttctttgactgaagttgatgtccagaaatttattgaaaagcaggtcgcatactacaaaaaattgaggagggtgacctttgtggacagcgtaccaaaatctgcttcagggaagatcttgagaagagaactcatctctaaagtcagatcatccaagctatagcaagccggcttctgtgttcagaagctagaacgacttccaatttgaaaatttgtcagattgagcgtaaaggtttacatgttactgagcggagcttatcaagcaatacattcagcttgacacagtttgtgggacatgtatacatggtggtgtcggatgacttgtatcgaatattgggcctgatttacattcactattcgaaaatagtacagatataaaacaaaactaaaa

SEQ ID NO: 209388 - DNA, 545 bp, Zea Mays
cacatagatccccgacgccgccaagcaggacactcctgtcgaccccttcgctcaccttactgaacctgaacagaaatcatacacctgggatgctgcaacggccgccgggaaactcagggtcaaaaccggttgtgcgccccggtctccaggctataaaaatagggtcccacgaccctcctacatcccatcggcatcacaaataaatcacgcctaggagcaccatcatggcgaggaggaggataatagggaaagccgtcgcacctggaaatcctttgcattagctttcagcctcggggaattggtcctggtgattcatcaggtcacgctcaagcaattgaccccttgctgtgcatgtctggtggacgaagataccgtgattcgtcgttggagtgccgtcaccaccgcagagccgcgtctcatcgtgggtagagaacatcacgcctcggttcctgattctggaagcacttatagcaaagaattgccgagaggacttttcgcaggaatcattagagacacttggggattctttttcaactatattacag

SEQ ID NO: 209389 - DNA, 6024 bp, Zea Mays
ccacgtcttgtcgacgcgtggaagcggctcccggacccgaaatttttattgaattcgacggaatccgacgcttgcgtccgtggccctcatcgcctggacctccccttccaccaccgcctccttctccgccctctcctcctcgcccgcgtccgtccccagtctccggcaggctccttacccccaccgtcggccctgcttcttccttctcccctacgcgtgatgccctcaacaccgtcgccctctcttcttcaccatcgcctcgctcgcctcctccgtcgtcgagccagcccttctccgtatctgtcgccatcacacccggatctgcctccgccatgaccgacgaccaacgagagcggcgtgagacggctttaggcgacgaaggcggcccacaccatgtcagccaacgacgcacagcggtggaagcacgcgatgggagctgacgacgcccttcctcggacggtttaggcgctccaccacctcagtccgggtgcactgtcttgccctcgactccagtgcctgtcacctcctcctgggccttggcgttaccgtggcccctcgcacagagaaccctcggtccaacaagcatctaggcgtctttggtagtggtctgtcaacaacttacaaggtttgcactctttggtttctttccttactaaagttctatatggagggagtcccaggctataaaccatatgttgatgtctgtttgattgacccagttagtcgttgtttgatacttatattctgcaacaggatagttccacatctattgcacatctgatttttgcatatattcaacgtgctgacattaaggatccatttacttaggtatgattaaaagctgaatatgcaggttttgggatgtcaatacctaaatatgcagggtttgggatgtcaagaaaagcctatgactacgaactgacctgtcccaaaaatatccacgttgtatagggttaaagctatagcatttctggtagtttaattggtctgatagtgccattttttagaccaagatttccattctggcagacattgttatgctatttcttataatttattcgatgatttgcttcacatccctgcaatgatagagctgcaattttgttctggtgtctacaattgatgtctcatgtgaagtgctatatgtgcttcccctctttctgaccctattgatggttatattgtatgtgaatcttattattgtcttacagttgggccatccaaaggacttggcttattgatattcgcaaagtacttatactgtacctttattagcagaagtgtccctttatttaactatcgttcttgcttaacacgagagtcagttcaattcattgttttcattatttggcccagattttttttgggtttggcacacccaattatttggactaccaagtaactacctaatggtctaatttcgtatacacattaatgtggatggggcatgttgcgctgcaaacctttgggaaagatgattttgtgatagagttagttgaagttcctagggatcttcaggttttccttttgttagctactacatttgcttgcatgtacttaacattaggaccatttatgtgactttttctttcacatgaaacacacaagtttggatatataggaagtgtaggtggttgttcagacttaataatgttttcttcttaagtggtgttgttccttaatcatcttattttttgtatacattgtaaggtacataaaaaaacttggattcatcatttaagttaaccaccaaccatgttgaagttcagcttttgccttaagcagtggttacagaagataatatatgtaatatccaatgaattctttctctaatgtgttttttgcatattatgactatcttatgtctttcaaacttatgaatgactttttaggatatattgtattgaggttccttttatagtaccaaaactgtcttacatactaagttttcctttatgtggctcttgcaatctgtttgctatcgagtttctcctaactcctgggattttctgatggtacaggttgattactgaaatattttctttaatattctactccataccttccaaattataaattgttttagatacacagatcttgttatgcacctagatatatataatatatttacaatttcgaatggaggtagtaaaacattgaatatttcctcatttcctaaacaagaccggagagctgtcatatgttagaagtaaaagttatgtcttatccacgtgtgcacaattgaaatggtatgctttacgtagttggtttacatgaaaaaattgtattaatgacaaggctagatttgtgatcaagttatatttcctttttaatgtcattgtttattataatccacatcatatttcgtattttaccgttaacatctctcttcagttacagatgatgcaatatgtaaagataggcttcagcatatgagacaacatagagattagaatttctacatgtgtaaagtcagcaaggactttgtaattgatgcagcttttacagaacacgcttctcgcttttttaaccacagttgtcaacctaactgtcggctggagaaatggaatcagagggtctgctttgggccctcaatttgttgctaaaccacttgcacctgataaccctccactgaaggtaagatttattgacaacatcgatcctggtgggattgatcatcaaattgctcaactaggatctcaactggcaactagctactcttgtaattgtcatttctaaggtacataaagatcccaaactttcttattttgttgatattctcccagctgcagcatgagcttataagtagctgcgattcttggttttgcattgctttaccagggacaaaattatgtagccctttgttactggttgagttagtgtctctctgtatgtagcctaagaaaaagaccaaaactgttgttgagaagtattgggattgggagctttcaaatgagacacaacctatttggctaagatccatctttgttctttttattgatataatcatggttgtctaagcatgtatttttggaaatgtcaatgcctgaggcttatgtggtaatcatgcctttttttggtgttgtatcaaacctggaaatgtacccttgtgaattggaaactctaggtaatagagttctgttctatttttttatgggcagtacaacactgcaatctctacagctttgatgcaccttcttgctaagagctagcactgacgaatgcttctgttagtacaccagtcagatctttttggatcttgtatgcttgattgtgcaaatttattgactgtatagcttgtcagtcgttgtaacattgccttcaaatatgccccagtgattttgaaattttaggcaacaaagaatatagttacattgaaatgcgacaaacttgtttgcatcatggctagaaattggagggaaagcattatcggacaatcatttaatttggcttagttacaggtgctttttaagtggtaacgcaagttgcagttcacacaaataacacctttgaatgtaatgtattatcacacaaggctccagtgagttgtgttctatttgtttcttttctatttggcagtataatacttaatctttatgtttttgatgcacctgctaagcgctaccagtaccaaaaaggggttacattaaaatgtgatgtatcatgtatatattgttgggtctgcatgttgtgatcttcaagggcacaacaacttagatgaacccaagtcgaatatgattatgtatcctcttttactgttctatattagattacttcacaattgttgaatgatatttcgatggtcatatttgaatgttgtttgttatggaagaaagatgatattttggcactatatggtaccaagtttttattatcttgcaaaaaaatatctaaatgttactgacagatttcccatcagtctgttttggatcacttttccctttctttgattgtgtgccaaaagaggtgccatctttcaccatgaggccttacattttctgatggtgacaaactgacaatccattccaagtctatatgctcatattatttttagtatctttgtattttacttccgaaggggcgtgtttatatgatagaaaaagtattacaacactaagtctttgccaccagagtttagcagcaaattattttttgccatcatacatgcttagattttggaggcccaagtgagcaggccttcctgttatctagaacacaaaggccatttactccattgcagtggatggagttggagcaccaggctctcatgtacaatctcaatgcaatggccccggtaccgtaccttccagcctgctcatttcaatcagcaagaacttcatatcatccaatagagatatgcatattctgaatcataaggctaaggttctctacttcaaaactactagcatttgcaataaaacaaaaatagaagataaaaatattatttgcacaaatgaatgcctttgtaatgttacatggtaaataataatgttggcagctttgtagtatcagaaactacatgagccatttgctcattgtattggatgtttctatatctggagttgtgctgttagagtattaaagttctacactttacgatgtaatagtttgtagattcctctattcatattttttgagtttaggtaattaactttatggatcatcttaagtcctcatggttggggagtatgtactaacaactaaagtcaagactaggcaaaatgaatcaaacaagtaaagcgtgtggctgcctgtagcttactgacaaataaaaacgaatcaagttggcaccatagtaacacaagagaagctgtcattctccttttattccatatgattatgtgttatttcacagtttatgatggtaacagaacacttgagggagggggaactgctgaagcgtgtttcatcaagatccaagcagcacatgagctattgattcatgatgaaaggagaagggcatatgatagagaggatcatgtgaacccaatgaaggtcttataattttcttagccactcagattaccaccgtatcatgattcatcaactctaacatgcgtgagccaacactatgcttctccacttcaggacatggatatgactcttctatgtttaagccactacaacttggtgtatttatgccaaagattttttgagcactaacacaccaaaccagcgcctatgaagtgcttttgtatgatcaccttcttcttgcaccatccatggataatctacgtagctgcaaacagtcttagttacatattactgtactgaacatcctttcatagactacttgtacactgcctttttagaaccgttgtaaaacctcatgcgatacgtctgcgcctttgaaacagagatcaactgaacaacctgttcaatgtttccttctattgcatatgtattctgttgtcatactatgtccaacaatgcatttatattgctacaatatgtttatacttgatgcatgtgatacaaatccgttatttatacatacaaagacaagctcttctgacaccatagggcgccgcggagcgcaccccttttttctagtaagtttaacgttgcagttgctgaaggtgattgaatagaactcctgatttttttgtgttctatctaggaacttcagacatgatgtaaagatgaaccggagcatcaagcagcagctgggtgcctcttcactgatagtagatctctaatatagtgatgtatgttctatactttgaggttagcttttcccctctggtcccctttgttggagaaactgttgtacttcagttaagagataagttttcagagtaatttctcctaatcagtttagtagaggtttcaggttcactaacctgagcagtgatcaggcttttagcttatttatttatgttgtgcaacgctggaatggtttcgaatgcaaaattgtcgctgctgttgccgcattgccgtcttaactcgcaggggctgcatgctgatatcggtgtttgaacggaaagaggactcacaacaagaaatgaatgaacgatgttccat

SEQ ID NO: 209390 - DNA, 3314 bp, Zea Mays
ccctcggtccaacaagcatctaggcgtctttggtagtggtctgtcaacaacttacaagttacagatgatgcaatatgtaaagataggcttcagcatatgagacaacatagagattagaatttctacatgtgtaaagtcagcaaggactttgtaattgatgcagcttttacagaacacgcttctcgcttttttaaccacagttgtcaacctaactgtcggctggagaaatggtaagaatgtacttttccatctttagtatgctatggttgcttttccatctggacatgtcacttcaattctctccgtaggaatcagagggtctgctttgggccctcaatttgttgctaaaccacttgcacctgataaccctccactgaaggtaagatttattgacaacatcgatcctggtgggattgatcatcaaattgctcaactaggatctcaactggcaactagctactcttgtaattgtcatttctaaggtacataaagatcccaaactttcttattttgttgatattctcccagctgcagcatgagcttataagtagctgcgattcttggttttgcattgctttaccagggacaaaattatgtagccctttgttactggttgagttagtgtctctctgtatgtagcctaagaaaaagaccaaaactgttgttgagaagtattgggattgggagctttcaaatgagacacaacctatttggctaagatccatctttgttctttttattgatataatcatggttgtctaagcatgtatttttggaaatgtcaatgcctgaggcttatgtggtaatcatgcctttttttggtgttgtatcaaacctggaaatgtacccttgtgaattggaaactctaggtaatagagttctgttctatttttttatgggcagtacaacactgcaatctctacagctttgatgcaccttcttgctaagagctagcactgacgaatgcttctgttagtacaccagtcagatctttttggatcttgtatgcttgattgtgcaaatttattgactgtatagcttgtcagtcgttgtaacattgccttcaaatatgccccagtgattttgaaattttaggcaacaaagaatatagttacattgaaatgcgacaaacttgtttgcatcatggctagaaattggagggaaagcattatcggacaatcatttaatttggcttagttacaggtgctttttaagtggtaacgcaagttgcagttcacacaaataacacctttgaatgtaatgtattatcacacaaggctccagtgagttgtgttctatttgtttcttttctatttggcagtataatacttaatctttatgtttttgatgcacctgctaagcgctaccagtaccaaaaaggggttacattaaaatgtgatgtatcatgtatatattgttgggtctgcatgttgtgatcttcaagggcacaacaacttagatgaacccaagtcgaatatgattatgtatcctcttttactgttctatattagattacttcacaattgttgaatgatatttcgatggtcatatttgaatgttgtttgttatggaagaaagatgatattttggcactatatggtaccaagtttttattatcttgcaaaaaaatatctaaatgttactgacagatttcccatcagtctgttttggatcacttttccctttctttgattgtgtgccaaaagaggtgccatctttcaccatgaggccttacattttctgatggtgacaaactgacaatccattccaagtctatatgctcatattatttttagtatctttgtattttacttccgaaggggcgtgtttatatgatagaaaaagtattacaacactaagtctttgccaccagagtttagcagcaaattattttttgccatcatacatgcttagattttggaggcccaagtgagcaggccttcctgttatctagaacacaaaggccatttactccattgcagtggatggagttggagcaccaggctctcatgtacaatctcaatgcaatggccccggtaccgtaccttccagcctgctcatttcaatcagcaagaacttcatatcatccaatagagatatgcatattctgaatcataaggctaaggttctctacttcaaaactactagcatttgcaataaaacaaaaatagaagataaaaatattatttgcacaaatgaatgcctttgtaatgttacatggtaaataataatgttggcagctttgtagtatcagaaactacatgagccatttgctcattgtattggatgtttctatatctggagttgtgctgttagagtattaaagttctacactttacgatgtaatagtttgtagattcctctattcatattttttgagtttaggtaattaactttatggatcatcttaagtcctcatggttggggagtatgtactaacaactaaagtcaagactaggcaaaatgaatcaaacaagtaaagcgtgtggctgcctgtagcttactgacaaataaaaacgaatcaagttggcaccatagtaacacaagagaagctgtcattctccttttattccatatgattatgtgttatttcacagtttatgatggtaacagaacacttgagggagggggaactgctgaagcgtgtttcatcaagatccaagcagcacatgagctattgattcatgatgaaaggagaagggcatatgatagagaggatcatgtgaacccaatgaagattaccaccgtatcatgattcatcaactctaacatgcgtgagccaacactatgcttctccacttcaggacatggatatgactcttctatgtttaagccactacaacttggtgtatttatgccaaagattttttgagcactaacacaccaaaccagcgcctatgaagtgcttttgaacttcagacatgatgtaaagatgaaccggagcatcaagcagcagctgggtgcctcttcactgatagtagatctctaatatagtgatgtatgttctatactttgaggttagcttttcccctctggtcccctttgttggagaaactgttgtacttcagttaagagataagttttcagagtaatttctcctaatcagtttagtagaggtttcaggttcactaacctgagcagtgatcaggcttttagcttatttatttatgttgtgcaacgctggaatggtttcgaatgcaaaattgtcgctgctgttgccgcattgccgtcttaactcgcaggggctgcatgctgatatcggtgtttgaacggaaagaggactcacaacaagaaatgaatgaacgatgttccat

SEQ ID NO: 209391 - DNA, 3662 bp, Zea Mays
ccctcggtccaacaagcatctaggcgtctttggtagtggtctgtcaacaacttacaagttacagatgatgcaatatgtaaagataggcttcagcatatgagacaacatagagattagaatttctacatgtgtaaagtcagcaaggactttgtaattgatgcagcttttacagaacacgcttctcgcttttttaaccacagttgtcaacctaactgtcggctggagaaatggaatcagagggtctgctttgggccctcaatttgttgctaaaccacttgcacctgataaccctccactgaaggtaagatttattgacaacatcgatcctggtgggattgatcatcaaattgctcaactaggatctcaactggcaactagctactcttgtaattgtcatttctaaggtacataaagatcccaaactttcttattttgttgatattctcccagctgcagcatgagcttataagtagctgcgattcttggttttgcattgctttaccagggacaaaattatgtagccctttgttactggttgagttagtgtctctctgtatgtagcctaagaaaaagaccaaaactgttgttgagaagtattgggattgggagctttcaaatgagacacaacctatttggctaagatccatctttgttctttttattgatataatcatggttgtctaagcatgtatttttggaaatgtcaatgcctgaggcttatgtggtaatcatgcctttttttggtgttgtatcaaacctggaaatgtacccttgtgaattggaaactctaggtaatagagttctgttctatttttttatgggcagtacaacactgcaatctctacagctttgatgcaccttcttgctaagagctagcactgacgaatgcttctgttagtacaccagtcagatctttttggatcttgtatgcttgattgtgcaaatttattgactgtatagcttgtcagtcgttgtaacattgccttcaaatatgccccagtgattttgaaattttaggcaacaaagaatatagttacattgaaatgcgacaaacttgtttgcatcatggctagaaattggagggaaagcattatcggacaatcatttaatttggcttagttacaggtgctttttaagtggtaacgcaagttgcagttcacacaaataacacctttgaatgtaatgtattatcacacaaggctccagtgagttgtgttctatttgtttcttttctatttggcagtataatacttaatctttatgtttttgatgcacctgctaagcgctaccagtaccaaaaaggggttacattaaaatgtgatgtatcatgtatatattgttgggtctgcatgttgtgatcttcaagggcacaacaacttagatgaacccaagtcgaatatgattatgtatcctcttttactgttctatattagattacttcacaattgttgaatgatatttcgatggtcatatttgaatgttgtttgttatggaagaaagatgatattttggcactatatggtaccaagtttttattatcttgcaaaaaaatatctaaatgttactgacagatttcccatcagtctgttttggatcacttttccctttctttgattgtgtgccaaaagaggtgccatctttcaccatgaggccttacattttctgatggtgacaaactgacaatccattccaagtctatatgctcatattatttttagtatctttgtattttacttccgaaggggcgtgtttatatgatagaaaaagtattacaacactaagtctttgccaccagagtttagcagcaaattattttttgccatcatacatgcttagattttggaggcccaagtgagcaggccttcctgttatctagaacacaaaggccatttactccattgcagtggatggagttggagcaccaggctctcatgtacaatctcaatgcaatggccccggtaccgtaccttccagcctgctcatttcaatcagcaagaacttcatatcatccaatagagatatgcatattctgaatcataaggctaaggttctctacttcaaaactactagcatttgcaataaaacaaaaatagaagataaaaatattatttgcacaaatgaatgcctttgtaatgttacatggtaaataataatgttggcagctttgtagtatcagaaactacatgagccatttgctcattgtattggatgtttctatatctggagttgtgctgttagagtattaaagttctacactttacgatgtaatagtttgtagattcctctattcatattttttgagtttaggtaattaactttatggatcatcttaagtcctcatggttggggagtatgtactaacaactaaagtcaagactaggcaaaatgaatcaaacaagtaaagcgtgtggctgcctgtagcttactgacaaataaaaacgaatcaagttggcaccatagtaacacaagagaagctgtcattctccttttattccatatgattatgtgttatttcacagtttatgatggtaacagaacacttgagggagggggaactgctgaagcgtgtttcatcaagatccaagcagcacatgagctattgattcatgatgaaaggagaagggcatatgatagagaggatcatgtgaacccaatgaagattaccaccgtatcatgattcatcaactctaacatgcgtgagccaacactatgcttctccacttcaggacatggatatgactcttctatgtttaagccactacaacttggtgtatttatgccaaagattttttgagcactaacacaccaaaccagcgcctatgaagtgcttttgtatgatcaccttcttcttgcaccatccatggataatctacgtagctgcaaacagtcttagttacatattactgtactgaacatcctttcatagactacttgtacactgcctttttagaaccgttgtaaaacctcatgcgatacgtctgcgcctttgaaacagagatcaactgaacaacctgttcaatgtttccttctattgcatatgtattctgttgtcatactatgtccaacaatgcatttatattgctacaatatgtttatacttgatgcatgtgatacaaatccgttatttatacatacaaagacaagctcttctgacaccatagggcgccgcggagcgcaccccttttttctagtaagtttaacgttgcagttgctgaaggtgattgaatagaactcctgatttttttgtgttctatctaggaacttcagacatgatgtaaagatgaaccggagcatcaagcagcagctgggtgcctcttcactgatagtagatctctaatatagtgatgtatgttctatactttgaggttagcttttcccctctggtcccctttgttggagaaactgttgtacttcagttaagagataagttttcagagtaatttctcctaatcagtttagtagaggtttcaggttcactaacctgagcagtgatcaggcttttagcttatttatttatgttgtgcaacgctggaatggtttcgaatgcaaaattgtcgctgctgttgccgcattgccgtcttaactcgcaggggctgcatgctgatatcggtgtttgaacggaaagaggactcacaacaagaaatgaatgaacgatgttccat

SEQ ID NO: 209392 - DNA, 1646 bp, Zea Mays
ccctcggtccaacaagcatctaggcgtctttggtagtggtctgtcaacaacttacaagttacagatgatgcaatatgtaaagataggcttcagcatatgagacaacatagagattagaatttctacatgtgtaaagtcagcaaggactttgtaattgatgcagcttttacagaacacgcttctcgcttttttaaccacagttgtcaacctaactgtcggctggagaaatgagggtctgctttgggccctcaatttgttgctaaaccacttgcacctgataaccctccactgaaggtaagatttattgacaacatcgatcctggtgggattgatcatcaaattgctcaactaggatctcaactggcaactagctactcttgtaattgtcatttctaagattttggaggcccaagtgagcaggccttcctgttatctagaacacaaaggccatttactccattgcagtggatggagttggagcaccaggctctcatgtacaatctcaatgcaatggccccgaacacttgagggagggggaactgctgaagcgtgtttcatcaagatccaagcagcacatgagctattgattcatgatgaaaggagaagggcatatgatagagaggatcatgtgaacccaatgaagattaccaccgtatcatgattcatcaactctaacatgcgtgagccaacactatgcttctccacttcaggacatggatatgactcttctatgtttaagccactacaacttggtgtatttatgccaaagattttttgagcactaacacaccaaaccagcgcctatgaagtgcttttgtatgatcaccttcttcttgcaccatccatggataatctacgtagctgcaaacagtcttagttacatattactgtactgaacatcctttcatagactacttgtacactgcctttttagaaccgttgtaaaacctcatgcgatacgtctgcgcctttgaaacagagatcaactgaacaacctgttcaatgtttccttctattgcatatgtattctgttgtcatactatgtccaacaatgcatttatattgctacaatatgtttatacttgatgcatgtgatacaaatccgttatttatacatacaaagacaagctcttctgacaccatagggcgccgcggagcgcaccccttttttctagtaagtttaacgttgcagttgctgaaggtgattgaatagaactcctgatttttttgtgttctatctaggaacttcagacatgatgtaaagatgaaccggagcatcaagcagcagctgggtgcctcttcactgatagtagatctctaatatagtgatgtatgttctatactttgaggttagcttttcccctctggtcccctttgttggagaaactgttgtacttcagttaagagataagttttcagagtaatttctcctaatcagtttagtagaggtttcaggttcactaacctgagcagtgatcaggcttttagcttatttatttatgttgtgcaacgctggaatggtttcgaatgcaaaattgtcgctgctgttgccgcattgccgtcttaactcgcaggggctgcatgctgatatcggtgtttgaacggaaagaggactcacaacaagaaatgaatgaacgatgttccat

SEQ ID NO: 209393 - DNA, 1822 bp, Zea Mays
ccaacaagcatctaggcgtctttggtagtggtctgtcaacaacttacaagttacagatgatgcaatatgtaaagataggcttcagcatatgagacaacatagagattagaatttctacatgtgtaaagtcagcaaggactttgtaattgatgcagcttttacagaacacgcttctcgcttttttaaccacagttgtcaacctaactgtcggctggagaaatggaatcagagggtctgctttgggccctcaatttgttgctaaaccacttgcacctgataaccctccactgaaggtaagatttattgacaacatcgatcctggtgggattgatcatcaaattgctcaactaggatctcaactggcaactagctactcttgtaattgtcatttctaagattttggaggcccaagtgagcaggccttcctgttatctagaacacaaaggccatttactccattgcagtggatggagttggagcaccaggctctcatgtacaatctcaatgcaatggccccggtaccgtaccttccagcctgctcatttcaatcagcaagaacttcatatcatccaatagagatatgcatattctgaatcataaggctaaggttctctacttcaaaactactagcatttgcaataaaacaaaaatagaagataaaaatattatttgcacaaatgaatgcctttgtaatgttacatggtaaataataatgttggcagctttgtagtatcagaaactacatgagccatttgctcattgtattggatgtttctatatctggagttgtgctgttagagtattaaagttctacactttacgatgtaatagtttgtagattcctctattcatattttttgagtttaggtaattaactttatggatcatcttaagtcctcatggttggggagtatgtactaacaactaaagtcaagactaggcaaaatgaatcaaacaagtaaagcgtgtggctgcctgtagcttactgacaaataaaaacgaatcaagttggcaccatagtaacacaagagaagctgtcattctccttttattccatatgattatgtgttatttcacagtttatgatggtaacagaacacttgagggagggggaactgctgaagcgtgtttcatcaagatccaagcagcacatgagctattgattcatgatgaaaggagaagggcatatgatagagaggatcatgtgaacccaatgaaggtcttataattttcttagccactcagattaccaccgtatcatgattcatcaactctaacatgcgtgagccaacactatgcttctccacttcaggacatggatatgactcttctatgtttaagccactacaacttggtgtatttatgccaaagattttttgagcactaacacaccaaaccagcgcctatgaagtgcttttgaacttcagacatgatgtaaagatgaaccggagcatcaagcagcagctgggtgcctcttcactgatagtagatctctaatatagtgatgtatgttctatactttgaggttagcttttcccctctggtcccctttgttggagaaactgttgtacttcagttaagagataagttttcagagtaatttctcctaatcagtttagtagaggtttcaggttcactaacctgagcagtgatcaggcttttagcttatttatttatgttgtgcaacgctggaatggtttcgaatgcaaaattgtcgctgctgttgccgcattgccgtcttaactcgcaggggctgcatgctgatatcggtgtttgaacggaaagaggactcacaacaagaaatgaatgaacgatgttccat

SEQ ID NO: 209394 - DNA, 1745 bp, Zea Mays
caagcatctaggcgtctttggtagtggtctgtcaacaacttacaagttacagatgatgcaatatgtaaagataggcttcagcatatgagacaacatagagattagaatttctacatgtgtaaagtcagcaaggactttgtaattgatgcagcttttacagaacacgcttctcgcttttttaaccacagttgtcaacctaactgtcggctggagaaatggtaagaatgtacttttccatctttagtatgctatggttgcttttccatctggacatgtcacttcaattctctccgtaggaatcagagggtctgctttgggccctcaatttgttgctaaaccacttgcacctgataaccctccactgaaggtaagatttattgacaacatcgatcctggtgggattgatcatcaaattgctcaactaggatctcaactggcaactagctactcttgtaattgtcatttctaagattttggaggcccaagtgagcaggccttcctgttatctagaacacaaaggccatttactccattgcagtggatggagttggagcaccaggctctcatgtacaatctcaatgcaatggccccgaacacttgagggagggggaactgctgaagcgtgtttcatcaagatccaagcagcacatgagctattgattcatgatgaaaggagaagggcatatgatagagaggatcatgtgaacccaatgaaggtcttataattttcttagccactcagattaccaccgtatcatgattcatcaactctaacatgcgtgagccaacactatgcttctccacttcaggacatggatatgactcttctatgtttaagccactacaacttggtgtatttatgccaaagattttttgagcactaacacaccaaaccagcgcctatgaagtgcttttgtatgatcaccttcttcttgcaccatccatggataatctacgtagctgcaaacagtcttagttacatattactgtactgaacatcctttcatagactacttgtacactgcctttttagaaccgttgtaaaacctcatgcgatacgtctgcgcctttgaaacagagatcaactgaacaacctgttcaatgtttccttctattgcatatgtattctgttgtcatactatgtccaacaatgcatttatattgctacaatatgtttatacttgatgcatgtgatacaaatccgttatttatacatacaaagacaagctcttctgacaccatagggcgccgcggagcgcaccccttttttctagtaagtttaacgttgcagttgctgaaggtgattgaatagaactcctgatttttttgtgttctatctaggaacttcagacatgatgtaaagatgaaccggagcatcaagcagcagctgggtgcctcttcactgatagtagatctctaatatagtgatgtatgttctatactttgaggttagcttttcccctctggtcccctttgttggagaaactgttgtacttcagttaagagataagttttcagagtaatttctcctaatcagtttagtagaggtttcaggttcactaacctgagcagtgatcaggcttttagcttatttatttatgttgtgcaacgctggaatggtttcgaatgcaaaattgtcgctgctgttgccgcattgccgtcttaactcgcaggggctgcatgctgatatcggtgtttgaacggaaagaggactcacaacaagaaatgaatgaacgatgttccat

SEQ ID NO: 209395 - DNA, 2399 bp, Zea Mays
caacaacttacaagttacagatgatgcaatatgtaaagataggcttcagcatatgagacaacatagagattagaatttctacatgtgtaaagtcagcaaggactttgtaattgatgcagcttttacagaacacgcttctcgcttttttaaccacagttgtcaacctaactgtcggctggagaaatggaatcagagggtctgctttgggccctcaatttgttgctaaaccacttgcacctgataaccctccactgaaggtaagatttattgacaacatcgatcctggtgggattgatcatcaaattgctcaactaggatctcaactggcaactagctactcttgtaattgtcatttctaagattttggaggcccaagtgagcaggccttcctgttatctagaacacaaaggccatttactccattgcagtggatggagttggagcaccaggctctcatgtacaatctcaatgcaatggccccggtaccgtaccttccagcctgctcatttcaatcagcaagaacttcatatcatccaatagagatatgcatattctgaatcataaggctaaggttctctacttcaaaactactagcatttgcaataaaacaaaaatagaagataaaaatattatttgcacaaatgaatgcctttgtaatgttacatggtaaataataatgttggcagctttgtagtatcagaaactacatgagccatttgctcattgtattggatgtttctatatctggagttgtgctgttagagtattaaagttctacactttacgatgtaatagtttgtagattcctctattcatattttttgagtttaggtaattaactttatggatcatcttaagtcctcatggttggggagtatgtactaacaactaaagtcaagactaggcaaaatgaatcaaacaagtaaagcgtgtggctgcctgtagcttactgacaaataaaaacgaatcaagttggcaccatagtaacacaagagaagctgtcattctccttttattccatatgattatgtgttatttcacagtttatgatggtaacagaacacttgagggagggggaactgctgaagcgtgtttcatcaagatccaagcagcacatgagctattgattcatgatgaaaggagaagggcatatgatagagaggatcatgtgaacccaatgaaggtcttataattttcttagccactcaggttatcatttcattttgtgcaagatgcagttccactccagttttattcttatttgtagttaacttttgttggtttctaagtttaggatttaatccatgtggaataaacgaataaacatagctgcttggattgcttaggttattttgctacataattgctctgatagtgtccctctattgtgtttcagattaccaccgtatcatgattcatcaactctaacatgcgtgagccaacactatgcttctccacttcaggacatggatatgactcttctatgtttaagccactacaacttggtgtatttatgccaaagattttttgagcactaacacaccaaaccagcgcctatgaagtgcttttgtatgatcaccttcttcttgcaccatccatggataatctacgtagctgcaaacagtcttagttacatattactgtactgaacatcctttcatagactacttgtacactgcctttttagaaccgttgtaaaacctcatgcgatacgtctgcgcctttgaaacagagatcaactgaacaacctgttcaatgtttccttctattgcatatgtattctgttgtcatactatgtccaacaatgcatttatattgctacaatatgtttatacttgatgcatgtgatacaaatccgttatttatacatacaaagacaagctcttctgacaccatagggcgccgcggagcgcaccccttttttctagtaagtttaacgttgcagttgctgaaggtgattgaatagaactcctgatttttttgtgttctatctaggaacttcagacatgatgtaaagatgaaccggagcatcaagcagcagctgggtgcctcttcactgatagtagatctctaatatagtgatgtatgttctatactttgaggttagcttttcccctctggtcccctttgttggagaaactgttgtacttcagttaagagataagttttcagagtaatttctcctaatcagtttagtagaggtttcaggttcactaacctgagcagtgatcaggcttttagcttatttatttatgttgtgcaacgctggaatggtttcgaatgcaaaattgtcgctgctgttgccgcattgccgtcttaactcgcaggggctgcatgctgatatcggtgtttgaacggaaagaggactcacaacaagaaatgaatgaacgatgttccat

SEQ ID NO: 209396 - DNA, 2363 bp, Zea Mays
gttttcttcttaagtggtgttgttccttaatcatcttattttttgtatacattgtaaggtacataaaaaaacttggattcatcatttaagttaaccaccaaccatgttgaagttcagcttttgccttaagcagtggttacagaagataatatatgtaatatccaatgaattctttctctaatgtgttttttgcatattatgactatcttatgtctttcaaacttatgaatgactttttaggatatattgtattgaggttccttttatagtaccaaaactgtcttacatactaagttttcctttatgtggctcttgcaatctgtttgctatcgagtttctcctaactcctgggattttctgatggtacaggttgattactgaaatattttctttaatattctactccataccttccaaattataaattgttttagatacacagatcttgttatgcacctagatatatataatatatttacaatttcgaatggaggtagtaaaacattgaatatttcctcatttcctaaacaagaccggagagctgtcatatgttagaagtaaaagttatgtcttatccacgtgtgcacaattgaaatggtatgctttacgtagttggtttacatgaaaaaattgtattaatgacaaggctagatttgtgatcaagttatatttcctttttaatgtcattgtttattataatccacatcatatttcgtattttaccgttaacatctctcttcagttacagatgatgcaatatgtaaagataggcttcagcatatgagacaacatagagattagaatttctacatgtgtaaagtcagcaaggactttgtaattgatgcagcttttacagaacacgcttctcgcttttttaaccacagttgtcaacctaactgtcggctggagaaatggaatcagagggtctgctttgggccctcaatttgttgctaaaccacttgcacctgataaccctccactgaaggtaagatttattgacaacatcgatcctggtgggattgatcatcaaattgctcaactaggatctcaactggcaactagctactcttgtaattgtcatttctaagattttggaggcccaagtgagcaggccttcctgttatctagaacacaaaggccatttactccattgcagtggatggagttggagcaccaggctctcatgtacaatctcaatgcaatggccccgaacacttgagggagggggaactgctgaagcgtgtttcatcaagatccaagcagcacatgagctattgattcatgatgaaaggagaagggcatatgatagagaggatcatgtgaacccaatgaaggtcttataattttcttagccactcagattaccaccgtatcatgattcatcaactctaacatgcgtgagccaacactatgcttctccacttcaggacatggatatgactcttctatgtttaagccactacaacttggtgtatttatgccaaagattttttgagcactaacacaccaaaccagcgcctatgaagtgcttttgtatgatcaccttcttcttgcaccatccatggataatctacgtagctgcaaacagtcttagttacatattactgtactgaacatcctttcatagactacttgtacactgcctttttagaaccgttgtaaaacctcatgcgatacgtctgcgcctttgaaacagagatcaactgaacaacctgttcaatgtttccttctattgcatatgtattctgttgtcatactatgtccaacaatgcatttatattgctacaatatgtttatacttgatgcatgtgatacaaatccgttatttatacatacaaagacaagctcttctgacaccatagggcgccgcggagcgcaccccttttttctagtaagtttaacgttgcagttgctgaaggtgattgaatagaactcctgatttttttgtgttctatctaggaacttcagacatgatgtaaagatgaaccggagcatcaagcagcagctgggtgcctcttcactgatagtagatctctaatatagtgatgtatgttctatactttgaggttagcttttcccctctggtcccctttgttggagaaactgttgtacttcagttaagagataagttttcagagtaatttctcctaatcagtttagtagaggtttcaggttcactaacctgagcagtgatcaggcttttagcttatttatttatgttgtgcaacgctggaatggtttcgaatgcaaaattgtcgctgctgttgccgcattgccgtcttaactcgcaggggctgcatgctgatatcggtgtttgaacggaaagaggactcacaacaagaaatgaatgaacgatgttccat

SEQ ID NO: 209397 - DNA, 1862 bp, Zea Mays
gcagtataatacttaatctttatgtttttgatgcacctgctaagcgctaccagtaccaaaaaggggttacattaaaatgtgatgtatcatgtatatattgttgggtctgcatgttgtgatcttcaagggcacaacaacttagatgaacccaagtcgaatatgattatgtatcctcttttactgttctatattagattacttcacaattgttgaatgatatttcgatggtcatatttgaatgttgtttgttatggaagaaagatgatattttggcactatatggtaccaagtttttattatcttgcaaaaaaatatctaaatgttactgacagatttcccatcagtctgttttggatcacttttccctttctttgattgtgtgccaaaagaggtgccatctttcaccatgaggccttacattttctgatggtgacaaactgacaatccattccaagtctatatgctcatattatttttagtatctttgtattttacttccgaaggggcgtgtttatatgatagaaaaagtattacaacactaagtctttgccaccagagtttagcagcaaattattttttgccatcatacatgcttagattttggaggcccaagtgagcaggccttcctgttatctagaacacaaaggccatttactccattgcagtggatggagttggagcaccaggctctcatgtacaatctcaatgcaatggccccgtttatgatggtaacagaacacttgagggagggggaactgctgaagcgtgtttcatcaagatccaagcagcacatgagctattgattcatgatgaaaggagaagggcatatgatagagaggatcatgtgaacccaatgaagattaccaccgtatcatgattcatcaactctaacatgcgtgagccaacactatgcttctccacttcaggacatggatatgactcttctatgtttaagccactacaacttggtgtatttatgccaaagattttttgagcactaacacaccaaaccagcgcctatgaagtgcttttgtatgatcaccttcttcttgcaccatccatggataatctacgtagctgcaaacagtcttagttacatattactgtactgaacatcctttcatagactacttgtacactgcctttttagaaccgttgtaaaacctcatgcgatacgtctgcgcctttgaaacagagatcaactgaacaacctgttcaatgtttccttctattgcatatgtattctgttgtcatactatgtccaacaatgcatttatattgctacaatatgtttatacttgatgcatgtgatacaaatccgttatttatacatacaaagacaagctcttctgacaccatagggcgccgcggagcgcaccccttttttctagtaagtttaacgttgcagttgctgaaggtgattgaatagaactcctgatttttttgtgttctatctaggaacttcagacatgatgtaaagatgaaccggagcatcaagcagcagctgggtgcctcttcactgatagtagatctctaatatagtgatgtatgttctatactttgaggttagcttttcccctctggtcccctttgttggagaaactgttgtacttcagttaagagataagttttcagagtaatttctcctaatcagtttagtagaggtttcaggttcactaacctgagcagtgatcaggcttttagcttatttatttatgttgtgcaacgctggaatggtttcgaatgcaaaattgtcgctgctgttgccgcattgccgtcttaactcgcaggggctgcatgctgatatcggtgtttgaacggaaagaggactcacaacaagaaatgaatgaacgatgttccat

SEQ ID NO: 209398 - DNA, 1453 bp, Zea Mays
gcagtataatacttaatctttatgtttttgatgcacctgctaagcgctaccagtaccaaaaaggggttacattaaaatgtgatgtatcatgtatatattgttgggtctgcatgttgtgatcttcaagggcacaacaacttagatgaacccaagtcgaatatgattatgtatcctcttttactgttctatattagattacttcacaattgttgaatgatatttcgatggtcatatttgaatgttgtttgttatggaagaaagatgatattttggcactatatggtaccaagtttttattatcttgcaaaaaaatatctaaatgttactgacagatttcccatcagtctgttttggatcacttttccctttctttgattgtgtgccaaaagaggtgccatctttcaccatgaggccttacattttctgatggtgacaaactgacaatccattccaagtctatatgctcatattatttttagtatctttgtattttacttccgaaggggcgtgtttatatgatagaaaaagtattacaacactaagtctttgccaccagagtttagcagcaaattattttttgccatcatacatgcttagattttggaggcccaagtgagcaggccttcctgttatctagaacacaaaggccatttactccattgcagtggatggagttggagcaccaggctctcatgtacaatctcaatgcaatggccccgtttatgatggtaacagaacacttgagggagggggaactgctgaagcgtgtttcatcaagatccaagcagcacatgagctattgattcatgatgaaaggagaagggcatatgatagagaggatcatgtgaacccaatgaaggtcttataattttcttagccactcagattaccaccgtatcatgattcatcaactctaacatgcgtgagccaacactatgcttctccacttcaggacatggatatgactcttctatgtttaagccactacaacttggtgtatttatgccaaagattttttgagcactaacacaccaaaccagcgcctatgaagtgcttttacatgatgtaaagatgaaccggagcatcaagcagcagctgggtgcctcttcactgatagtagatctctaatatagtgatgtatgttctatactttgaggttagcttttcccctctggtcccctttgttggagaaactgttgtacttcagttaagagataagttttcagagtaatttctcctaatcagtttagtagaggtttcaggttcactaacctgagcagtgatcaggcttttagcttatttatttatgttgtgcaacgctggaatggtttcgaatgcaaaattgtcgctgctgttgccgcattgccgtcttaactcgcaggggctgcatgctgatatcggtgtttgaacggaaagaggactcacaacaagaaatgaatgaacgatgttccat

SEQ ID NO: 209399 - DNA, 1498 bp, Zea Mays
cgccatcacttttctcccttttttctttgtttttttgtgggcctgtccacgtgcatttgatccgtcccggccgcctacacgatgtccaagtcgggagcgctggatcttgcttctggcctcggagggaagatcaacaaggtggaagtcaagtcggccgtcgatgagtatgagaaatatcatggatactatggagggaaggaggaagcaaggaagtccaactatactgatatggttaataaatactatgatcttgccactagcttctatgagtatggttggggtgaatccttccactttgctcacagatggaatggagaatccttacgtgaaagcatcaagcgacatgagcattttcttgccctgcaacttggtttgaaaccaggaatgaaggttttagatgtgggctgtggaataggtggaccactgagagaaattgcaagatttagctcaacttcagttaccggattgaataacaacgaataccagataaccaggggaaaggagctcaaccgtttagcaggaattagtggaacatgtgattttgtcaaggcggacttcatgaagatgccgttcgatgacaacacttttgatgctgtttacgccattgaggcaacatgtcatgcacctgatccagttggttgctacaaggagatatatcgtgtgttgaagcctggccagtgctttgccgtgtacgagtggtgcattacggatcactatgatcctaacaatgcaacccacaaaaggatcaaggatgaaattgagcttggcaatggcctgccagatatcagaagcactcggcaatgtctccaggcagtaaaagacgccgggtttgaggttgtttgggataaggatcttgctgaagattctcccttgccttggtacttgcccttggatccaagccgattctccctgagtagcttccgtttgacctctgtgggacgcatgattacccgcacaatggtcaaggccctggagtacgttggtcttgctccgcagggcagtgagagggtctctaatttcctggagaaggctgcagaagggctggtagagggcggaaagaaggagatcttcacgccaatgtacttctttcttgttcggaagcctcttctggaatgagctcttggatcaccttttcagagagagaaggcaagtggtcatttcgaagaagccgaggagagggaacctggaatcaagaaaaccttcagctctcctgtgtaggaggaaagttaacgaacagtgtagtaactgttcagctttgtgtttattcagttgttttgctgcttgaggttattcgtttctaggtgggggttggaatccttttcgccataaacctctcagtggcataaataagatggtttgcataagagtacttcatggataccgtaagggctactactgaaagagaaatgtttaagcagcatggtatgtgagcaactagtgataattattccatccttttttttaatataaagcaggagttttgtcatgcgtcatgtct

SEQ ID NO: 209400 - DNA, 1487 bp, Zea Mays
cgcctgcctgcctgcctgagcgccaatgcagtgcatttgatccgtcccggccgcctacacgatgtccaagtcgggagcgctggatcttgcttctggcctcggagggaagatcaacaaggtggaagtcaagtcggccgtcgatgagtatgagaaatatcatggatactatggagggaaggaggaagcaaggaagtccaactatactgatatggttaataaatactatgatcttgccactagcttctatgagtatggttggggtgaatccttccactttgctcacagatggaatggagaatccttacgtgaaagcatcaagcgacatgagcattttcttgccctgcaacttggtttgaaaccaggaatgaaggttttagatgtgggctgtggaataggtggaccactgagagaaattgcaagatttagctcaacttcagttaccggattgaataacaacgaataccagataaccaggggaaaggagctcaaccgtttagcaggaattagtggaacatgtgattttgtcaaggcggacttcatgaagatgccgttcgatgacaacacttttgatgctgtttacgccattgaggcaacatgtcatgcacctgatccagttggttgctacaaggagatatatcgtgtgttgaagcctggccagtgctttgccgtgtacgagtggtgcattacggatcactatgatcctaacaatgcaacccacaaaaggatcaaggatgaaattgagcttggcaatggcctgccagatatcagaagcactcggcaatgtctccaggcagtaaaagacgccgggtttgaggttgtttgggataaggatcttgctgaagattctcccttgccttggtacttgcccttggatccaagccgattctccctgagtagcttccgtttgacctctgtgggacgcatgattacccgcacaatggtcaaggccctggagtacgttggtcttgctccgcagggcagtgagagggtctctaatttcctggagaaggctgcagaagggctggtagagggcggaaagaaggagatcttcacgccaatgtacttctttcttgttcggaagcctcttctggaatgagctcttggatcaccttttcaggtcagcaagagagagaaggcaagtggtcatttcgaagaagccgaggagagggaacctggaatcaagaaaaccttcagctctcctgtgtaggaggaaagttaacgaacagtgtagtaactgttcagctttgtgtttattcagttgttttgctgcttgaggttattcgtttctaggtgggggttggaatccttttcgccataaacctctcagtggcataaataagatggtttgcataagagtacttcatggataccgtaagggctactactgaaagagaaatgtttaagcagcatggtatgtgagcaactagtgataattattccatccttttttttaatataaagcaggagttttgtcatgcgtcatgtct

SEQ ID NO: 209401 - DNA, 1809 bp, Zea Mays
agacacgcggaggcgcgttcctccccatcctcggcaaccacgagtctctccttcctctcccattccactagattaccaccacctccacctccggctcctagcagaggcgcaccaggtcccactgccaccgcaaccaagcgcaccttgccggccgccgctcgtcctcatcttcaaatcccctcttgcacggctgcacctcctagcccgtagtgtggatccatccccacacggccctcgccaaatctactcctccagtcggcaggaaaggaacccctctctacctcggaggctcggacagagtgaacgcgccacccgccccggcgagcattgtccgctgccgcgcgccaccttccgctcacgggtgcatttgatccgtcccggccgcctacacgatgtccaagtcgggagcgctggatcttgcttctggcctcggagggaagatcaacaaggtggaagtcaagtcggccgtcgatgagtatgagaaatatcatggatactatggagggaaggaggaagcaaggaagtccaactatactgatatggttaataaatactatgatcttgccactagcttctatgagtatggttggggtgaatccttccactttgctcacagatggaatggagaatccttacgtgaaagcatcaagcgacatgagcattttcttgccctgcaacttggtttgaaaccaggaatgaaggttttagatgtgggctgtggaataggtggaccactgagagaaattgcaagatttagctcaacttcagttaccggattgaataacaacgaataccagataaccaggggaaaggagctcaaccgtttagcaggaattagtggaacatgtgattttgtcaaggcggacttcatgaagatgccgttcgatgacaacacttttgatgctgtttacgccattgaggcaacatgtcatgcacctgatccagttggttgctacaaggagatatatcgtgtgttgaagcctggccagtgctttgccgtgtacgagtggtgcattacggatcactatgatcctaacaatgcaacccacaaaaggatcaaggatgaaattgagcttggcaatggcctgccagatatcagaagcactcggcaatgtctccaggcagtaaaagacgccgggtttgaggttgtttgggataaggatcttgctgaagattctcccttgccttggtacttgcccttggatccaagccgattctccctgagtagcttccgtttgacctctgtgggacgcatgattacccgcacaatggtcaaggccctggagtacgttggtcttgctccgcagggcagtgagagggtctctaatttcctggagaaggctgcagaagggctggtagagggcggaaagaaggagatcttcacgccaatgtacttctttcttgttcggaagcctcttctggaatgagctcttggatcaccttttcagagagagaaggcaagtggtcatttcgaagaagccgaggagagggaacctggaatcaagaaaaccttcagctctcctgtgtaggaggaaagttaacgaacagtgtagtaactgttcagctttgtgtttattcagttgttttgctgcttgaggttattcgtttctaggtgggggttggaatccttttcgccataaacctctcagtggcataaataagatggtttgcataagagtacttcatggataccgtaagggctactactgaaagagaaatgtttaagcagcatggtatgtgagcaactagtgataattattccatccttttttttaatataaagcaggagttttgtcatgcgtcatgtct

SEQ ID NO: 209402 - DNA, 1677 bp, Zea Mays
agacacgcggaggcgcgttcctccccatcctcggcaaccacgagtctctccttcctctcccattccactagattaccaccacctccacctcgtcgtctcccaccaccgccgagcgcgagccctagcccgatctagccggcggcaggcaccagatcccgccgcccgcggcgtcccgggacgcgccccgccgaatccgccgctcctcgcactgcaacacgcccggaccacggtgcatttgatccgtcccggccgcctacacgatgtccaagtcgggagcgctggatcttgcttctggcctcggagggaagatcaacaaggtggaagtcaagtcggccgtcgatgagtatgagaaatatcatggatactatggagggaaggaggaagcaaggaagtccaactatactgatatggttaataaatactatgatcttgccactagcttctatgagtatggttggggtgaatccttccactttgctcacagatggaatggagaatccttacgtgaaagcatcaagcgacatgagcattttcttgccctgcaacttggtttgaaaccaggaatgaaggttttagatgtgggctgtggaataggtggaccactgagagaaattgcaagatttagctcaacttcagttaccggattgaataacaacgaataccagataaccaggggaaaggagctcaaccgtttagcaggaattagtggaacatgtgattttgtcaaggcggacttcatgaagatgccgttcgatgacaacacttttgatgctgtttacgccattgaggcaacatgtcatgcacctgatccagttggttgctacaaggagatatatcgtgtgttgaagcctggccagtgctttgccgtgtacgagtggtgcattacggatcactatgatcctaacaatgcaacccacaaaaggatcaaggatgaaattgagcttggcaatggcctgccagatatcagaagcactcggcaatgtctccaggcagtaaaagacgccgggtttgaggttgtttgggataaggatcttgctgaagattctcccttgccttggtacttgcccttggatccaagccgattctccctgagtagcttccgtttgacctctgtgggacgcatgattacccgcacaatggtcaaggccctggagtacgttggtcttgctccgcagggcagtgagagggtctctaatttcctggagaaggctgcagaagggctggtagagggcggaaagaaggagatcttcacgccaatgtacttctttcttgttcggaagcctcttctggaatgagctcttggatcaccttttcagagagagaaggcaagtggtcatttcgaagaagccgaggagagggaacctggaatcaagaaaaccttcagctctcctgtgtaggaggaaagttaacgaacagtgtagtaactgttcagctttgtgtttattcagttgttttgctgcttgaggttattcgtttctaggtgggggttggaatccttttcgccataaacctctcagtggcataaataagatggtttgcataagagtacttcatggataccgtaagggctactactgaaagagaaatgtttaagcagcatggtatgtgagcaactagtgataattattccatccttttttttaatataaagcaggagttttgtcatgcgtcatgtct

SEQ ID NO: 209403 - DNA, 742 bp, Zea Mays
ttggctgccagcgccagtagattgtgtgtgatcgctggaaatatttctcctattgatgtgattacacatgttccgatactatgtgaggaagctaatgttccttacgtatatgttccatcaaaagaggatcttgcgaccgcaggaaccactaagaggccgacttgttgcgtcttggttctgaccaaaccaaacaagggggagctcagtggagaggtgaaggataaactgaagtcggactatgaccaagttgtaacggaagtcgctgaggctacatctgcaatgttctgaggaccacattatctgagaatccggcaattccctgtgcacgtctttcttggtgtagtatcctgcccagcttctgtgaaccgaaccaatatgttttgcacggtggctggagcgagatatgactatgagtttacctatatgctatggaccatccttgttggcggcatatgattctaccagtgattagatctagccaattacaatcagttctgtgagcagactgtttccttgtgttgtcagatctcggtagctagtgtgtgcgttccaggtctttttgatcttatcacaagatgtgctcgtgatacttgtgttgaaggaactgtggtatcttagcgccttatatcaagattagtttttggcttctgctcgtattgggtaaaacttggaatgtagagcatcccgtcaatgccctaaacaatgataagcaaaagatccagcggcaaaatggccttagttt

SEQ ID NO: 209404 - DNA, 443 bp, Zea Mays
gtggacccgacctgccattttatagcaacttcagtgagtaagctttcgctaaaaccctagctccaaaaaacgaactagaaacgaccgcgaagccacaggtcgaaggcggcggcggcgatggggagcgacacggagacggagaagaaggcctcggtggcgctgatgtccatcgcgaaacccctcgctggaaagaagctctgcaagcggaccctcaagctcgtgcgacgagcctccgaggcgaagtgcctcaagcgcggagtcaaagaggtagtcaagagcattcgccgcgggaacaaaggattgtgtgtgatcgctggaaatatttctcctattgatgtgattacacatgttccgatactatgtgaggaagctaatgttccttacgtatatgttccatcaaaagagttatttattcataccggatgcttatgatagaagacaag

SEQ ID NO: 209405 - DNA, 1254 bp, Zea Mays
tgggagatgacacaaacacaaagttttggaaggataagtggttatatgtaaatactcgcgtgttagtaaaaagactcttggattacaaggtggaggagaacaaattgctataatcagagcatctggaagtataacacggactcgtagcccattgagtgctcctagttcaggcattgtcgctgagcagttaattgagaagatacgaactgttagagaatcagaaaagtacaaagctgttatcctacgtatagacagccctggtggtgatgctcttgcttctgatctgatgtggagagaaatccgacttctagccaactctaaacctgtagttgcttcgatgtctgatgttgctgcaagtgggggctactacatggcaatggctgcaccagtaattgttgctgagaaactgactctcacagggtcaattggagttgttacagggaagttctgccttcaaaagttatatgagaggattgatttcaataaagaaattatatccaagggtcgatatgctgagcttaatgttaatgatcaacgacctttaagaccagacgaggcagagctttttgaaaagtcagcacaaaatgcttatgcattgtttcgtgataaagcagccatgtcgcgatcaatgagtgttgatcagatggagagtgttgctcaaggtcgagtgtggagcggccatgatgcgttttcaagagggttggttgattcagtaggtggactctcacaagctcttgctattgcaaaacagaaagctaatatacccaaggataagaagatccagctagttgaagtttcaaagccctctccatcattaccggagatcttatccggcattggaggttcgttgcttggagttgacagggcagtgaagggagtgctccaggacatgacctccctaagtggagtccaagctaggatggatggaattctgtttgaaagtttaggagacatgtcaggagaaaaccagttattgttgcttgtaaaagatatcatgaactattttgattaattctagcattcaggtccttatgttccaaacatttgtatttagagatgaggggaaattcataatgtcactacacatctatcttgcacagaaacaggtagcttgtgatttgtgtagttaatttagcattgtatatgccattttattcttttgcactgatgactaaaaatatcatgattgatatactgggcaaaagtaaaaggaactccaccttttcttatgcatgatattaactctaatcccca

SEQ ID NO: 209406 - DNA, 1382 bp, Zea Mays
acgccgcaaggcgaccacgttccctccctattctctcccatctcattatcggcggcaacctcaatcattaacagttaaactactggccaaacccggcaatatatacccctgcaggcccatctcctaagcacaccatcaaagtgcctgttcctgagccagcagcatctgtctcttgcttcatcagctaggcgcccggccgcgcggaccaggctccaggagaccaaaaatgaagctctcggtggcagtcctctgcgcgcttctggctgtccaggcggcggtgctcctcgccaccgtgccgacgtcgcaggccagcgagctggaggtcgggtactacagcaagaaatgcaagggcgtggagaacgtggtgaagtggcacgtgatcaaggcgctcaaggccagccgccgcaccggcgccgctctcgtccgccttctcttccatgactgcttcgtcaggggatgcgatggttctgtcctcctggacgcttcctacgacaaccctcatccggagaaggaggcgccggtgaacatcggcctcgccgccttcgacctcctggaggagatcaaggccgctgtcgagaagaggtgccccggcgtcgtctcctgctcggacatcctcatctacgcggcccgcgacgcggccagcgtcctcagcaacggccacgtccacttcgccgtccccgccggccgcctggacggcttcgtctccaaggccgaggaggcccaggcggagctcccggactccaaccaagacgtgcagcagctcatcgacaacttcgccaggaagaacttcacggtggaggagctcgtcatcctcaccggggcgcactccatcggccagggccactgctcgtccttcaccggccgcctctccgagccatcgcagcagatcaccccggcgtaccgcgacctgctcaactacaagtgctcccaggggtccaacccgcccgtggacaacaacgtccgcgacgaggactacgacgtggtggcgaggttcatgccggggttcaccagccgggtgcgcaagatccccgacttcctggacaactccttctaccacaacaacctggccaagatcgtcaccttccactccgactggacgctgctcacgcacaaggaggcgttcggccacgtcgtggagtacgccgagaacgccacgctatgggacgaggacttctcggactcgctgctcaagctcagcaagctgcccatgccgaaaggaagcaagggagagatcaggaagaagtgcagcgtcgttaaccaccgcttatactaagcctgccagatgccgtggaaatcgaagaaagaggtcgtgccagcacaacacatatatatcaaccatcggagatcagaaagccataagatcgcgtacgaggcgcgcaagc

SEQ ID NO: 209407 - DNA, 1766 bp, Zea Mays
cttttttggaggttctcttgtatggcttgcacaagtaaattgaagtaatggacttggaaccttcaagtgttccagtggaggtattaggagtggtggggaaaaagggattgtagaggtaacgatgttgagacagagctctagtagaaatcagagatccagaggtctgaagctgaagaaagctcttcagattagtctcttgcttctggtttctgtttggttgctctaccaagttaagcattcttacgagaagaaggcggcgtacagcgaaggtgaagtgaatgatttgcataaagatgacaagggccagggagaggcagtcagattgggcaggaaggatgtgcctccaaagatggaggctgattcttcaacactggatgagcgggttgaggatgaagagaacgatgaagtggagcaagaaatgaagcatgatgagaacgatgaggatcccatcgatgagcaagacctggagaaggacgaggatcttcccgagcctggcgagcattcttctgaaaaggatgaagatgtgggtgtgtttgaggacgaagagcggaaggagcggtcacaggaggatcaagagaagagcttccatggtgacgatgtgtctagtgctgttactcatgatcctcaatcgtccgagcaagatgagctgttccatcatgcccaagacacggtcctattcgtggatgatgcttcaactgcagtgcccaatgaaaaccatgtggctggaaacgacgaggaggaagtgcagagggctagggaaaggagtttcagaggcgatgatgtgtcaagctccgtggatcatgacgccaaggtggcaaagcctctcccagaggaacaactgaacagcatggataagatatttgaaggcaccacaaacttgtctaacggaatttcgtttcgagctcctggaataaatggatcatatgccggcatggacaatgtggctacagtaccaactaattcaccttcacagaaaaacgcaggcactcctagcaatgacatagaaagcaagacccacccatctccggcaaatttgaccggaccagagcaaagtaattcgactttgaaagatcacccagatcaacaagtgaattcaacagcagtgctgggcaaccaagtacagcctttgactaaccagacgccgtggcccgagttggattctccaaatggcaccttggctctggtaacagatgtccaaaagtccacatctggagctggagatgatggcagcagcactgtggacaagaggacggacggtagagatggtcccaaagaagacgtggatgtgtccacgaaaataatgaacagggcaatcagtgaggatgaagtcgttccagagtgacaaggagatctctcttgccggcttctggtgtaacctgtaagtttgtaggacttggtttcgtctcctagactagacttggagatgcgcaagcaggctgtctcgttgtgcacgccttttgtgtaagtttgatagatgtctgcttttgtactgccagttagtagtccatcacaatgatctgggtcgagtggagaacaagaagcatgtgtacccacagaaatatatgtagcgattctgcagctcttgaagcttcgctgctcgaatcaaatgccagagtaggcagctaaataccatctatcaatgaaatgtccatgcccatcgctgcccaattttgtgtctgaatatgtgtaggtgtgaatcgtggtgcttgactgcttgcaaagtggaaatgtgcccgatgttgtagtagtagtaacagtgcgctgtt

SEQ ID NO: 209408 - DNA, 1833 bp, Zea Mays
cttcgatggactgatgtgtttttgctcgttggttgggatgccttggccttgattctaagctacctgtatgagacggagaaatgtagccgcgtccttcttgtgttccgttttcagttatcctaggaaccttcaagtgttccagtggaggtattaggagtggtggggaaaaagggattgtagaggtaacgatgttgagacagagctctagtagaaatcagagatccagaggtctgaagctgaagaaagctcttcagattagtctcttgcttctggtttctgtttggttgctctaccaagttaagcattcttacgagaagaaggcggcgtacagcgaaggtgaagtgaatgatttgcataaagatgacaagggccagggagaggcagtcagattgggcaggaaggatgtgcctccaaagatggaggctgattcttcaacactggatgagcgggttgaggatgaagagaacgatgaagtggagcaagaaatgaagcatgatgagaacgatgaggatcccatcgatgagcaagacctggagaaggacgaggatcttcccgagcctggcgagcattcttctgaaaaggatgaagatgtgggtgtgtttgaggacgaagagcggaaggagcggtcacaggaggatcaagagaagagcttccatggtgacgatgtgtctagtgctgttactcatgatcctcaatcgtccgagcaagatgagctgttccatcatgcccaagacacggtcctattcgtggatgatgcttcaactgcagtgcccaatgaaaaccatgtggctggaaacgacgaggaggaagtgcagagggctagggaaaggagtttcagaggcgatgatgtgtcaagctccgtggatcatgacgccaaggtggcaaagcctctcccagaggaacaactgaacagcatggataagatatttgaaggcaccacaaacttgtctaacggaatttcgtttcgagctcctggaataaatggatcatatgccggcatggacaatgtggctacagtaccaactaattcaccttcacagaaaaacgcaggcactcctagcaatgacatagaaagcaagacccacccatctccggcaaatttgaccggaccagagcaaagtaattcgactttgaaagatcacccagatcaacaagtgaattcaacagcagtgctgggcaaccaagtacagcctttgactaaccagacgccgtggcccgagttggattctccaaatggcaccttggctctggtaacagatgtccaaaagtccacatctggagctggagatgatggcagcagcactgtggacaagaggacggacggtagagatggtcccaaagaagacgtggatgtgtccacgaaaataatgaacagggcaatcagtgaggatgaagtcgttccagagtgacaaggagatctctcttgccggcttctggtgtaacctgtaagtttgtaggacttggtttcgtctcctagactagacttggagatgcgcaagcaggctgtctcgttgtgcacgccttttgtgtaagtttgatagatgtctgcttttgtactgccagttagtagtccatcacaatgatctgggtcgagtggagaacaagaagcatgtgtacccacagaaatatatgtagcgattctgcagctcttgaagcttcgctgctcgaatcaaatgccagagtaggcagctaaataccatctatcaatgaaatgtccatgcccatcgctgcccaattttgtgtctgaatatgtgtaggtgtgaatcgtggtgcttgactgcttgcaaagtggaaatgtgcccgatgttgtagtagtagtaacagtgcgctgtt

SEQ ID NO: 209409 - DNA, 1822 bp, Zea Mays
cttgttcttgccttggagcactttgggtttattgagagcgaagtatctggtgttcgtgctgctgaaggtgttggataatggatttggggtgtgcggtgatcgttgagctggggaaccttcaagtgttccagtggaggtattaggagtggtggggaaaaagggattgtagaggtaacgatgttgagacagagctctagtagaaatcagagatccagaggtctgaagctgaagaaagctcttcagattagtctcttgcttctggtttctgtttggttgctctaccaagttaagcattcttacgagaagaaggcggcgtacagcgaaggtgaagtgaatgatttgcataaagatgacaagggccagggagaggcagtcagattgggcaggaaggatgtgcctccaaagatggaggctgattcttcaacactggatgagcgggttgaggatgaagagaacgatgaagtggagcaagaaatgaagcatgatgagaacgatgaggatcccatcgatgagcaagacctggagaaggacgaggatcttcccgagcctggcgagcattcttctgaaaaggatgaagatgtgggtgtgtttgaggacgaagagcggaaggagcggtcacaggaggatcaagagaagagcttccatggtgacgatgtgtctagtgctgttactcatgatcctcaatcgtccgagcaagatgagctgttccatcatgcccaagacacggtcctattcgtggatgatgcttcaactgcagtgcccaatgaaaaccatgtggctggaaacgacgaggaggaagtgcagagggctagggaaaggagtttcagaggcgatgatgtgtcaagctccgtggatcatgacgccaaggtggcaaagcctctcccagaggaacaactgaacagcatggataagatatttgaaggcaccacaaacttgtctaacggaatttcgtttcgagctcctggaataaatggatcatatgccggcatggacaatgtggctacagtaccaactaattcaccttcacagaaaaacgcaggcactcctagcaatgacatagaaagcaagacccacccatctccggcaaatttgaccggaccagagcaaagtaattcgactttgaaagatcacccagatcaacaagtgaattcaacagcagtgctgggcaaccaagtacagcctttgactaaccagacgccgtggcccgagttggattctccaaatggcaccttggctctggtaacagatgtccaaaagtccacatctggagctggagatgatggcagcagcactgtggacaagaggacggacggtagagatggtcccaaagaagacgtggatgtgtccacgaaaataatgaacagggcaatcagtgaggatgaagtcgttccagagtgacaaggagatctctcttgccggcttctggtgtaacctgtaagtttgtaggacttggtttcgtctcctagactagacttggagatgcgcaagcaggctgtctcgttgtgcacgccttttgtgtaagtttgatagatgtctgcttttgtactgccagttagtagtccatcacaatgatctgggtcgagtggagaacaagaagcatgtgtacccacagaaatatatgtagcgattctgcagctcttgaagcttcgctgctcgaatcaaatgccagagtaggcagctaaataccatctatcaatgaaatgtccatgcccatcgctgcccaattttgtgtctgaatatgtgtaggtgtgaatcgtggtgcttgactgcttgcaaagtggaaatgtgcccgatgttgtagtagtagtaacagtgcgctgtt

SEQ ID NO: 209410 - DNA, 2490 bp, Zea Mays
ttggaattggtggggacttttagaggtgatcagcatgatgatgttttataattgtttgcaaaagggctatagtacttgatgagatgaagtcaacagtgttttcaacagctgttgtttctattgggtatgcattgcttggatgggattttgcagcattatcagaagctaatcatcatatggaaaaagaatttgaattgttgaatggaccttctattgaaggtataacattagcagcctcaacatttggggctattgtgataacaatattctctggcgcgctattagattggctcggaagacgtgtcatactggtttactcgtctctggtattattttcgggtggcgtcttgatgctgtggtctcctaacatctacattgtacttctagctaggttaattgttggatcaggaagtgggttggttttcacctgtgtccctatttatatatccgaaacatctccttcaaatatgaggggcttacttggaactatgccacagtttatgttcttcataggaactatcttttcatattgcctgatattctggttaacattaatgtcttcacctagctggagaatcatgattggtgcaatctttgctccttccatcgtgtactttgctttgttggtttactacttgccagagtcacctaggtggcttgcaagtgatggaaagattagtgaggccagagtttctctgcagtggcttagaggaaagaaacatgatgtttcaggagagatagctgctattgtggaaggtgtggacatcatatcggactccactgttggcgctgctcgtgctcagagtttctctggaaccagtgctagccacacttggccccgtagtactttttattggcagctttcagacccactagttgatcttctcggaagcgttcatgagaatatgtcagaaggaggaagtagacggaatagtttcttcccagtcttcaacagtttttcttttccagagcatgaacatatgaatgaacacagggatggtaacagtgatcaacagactagggagacttattatgctggagaagctaataatggagatggtttaagggcttctctgctttctcaggcagcaagtgttgaagtaaatgatacaaatacctcttttacttctgaagggagctcttcatatttaagaaggcatggaacatcagtgcttgcacaagagtttatggcgtctatacatgattatgacattgaagaagaagaagaagaaatccatgggtttgcattgcctcaccagtctgcacctcgtgatatggaaagcaccgggagacatccattcagacatcaaatagtccggttatctgaaacagctgatatgaagtttaaatggcgggtgcttcttcaaccaggaatcaggcatgccttatgttatggcatgttaattcaagcccttcagcaatctacaggaatcagtggtcttctccgctgcgctcctgaaatatttgagcagtctggagtggctagtttgttttcagacattggactttctcctcattcaacatcaattctcatgagtacccttaatgctttgctgatactcccttgtataactgccgcaatgctgctgatggatgtctgcgggagaagggttattgtgctggccactactcctgtcctgatactatcattgagtgttatgtctatgtccaccctggtgaatatgggaccgttcgaaagtgccgtcctcttccacttcgcattaaccatttgcttctggtcctatgtcattggtttgggaccgataccaaacattctctgctccgagatattcccaaccaaggcccgtgcgacatgtgcaagtttctgttcgctttccttctggtttgggggcctgctttcagcgtactgcttcccggtgatgttgagcaccatcgggcttggcggagcgtgtgggatctatgcacttgtgtgctgcgctccgctttttctcgtctactatcgaataccagagacgaagatgcttaacctggagctcattgcggagctgttcaagctttcaaggcaggagcatgtacagtagattgtccaggaaccgaggtagcccaggctgagtgccgatggatggtgatgtgtgtacatatgacaaatgtaactttggatgctgaatttgtttttgctagttaggaggattggtgatagtgtacgaagtggtttactcttttgctgtccacaggttgctggcagtgtttgtagtgttttgtcttagggggaattcctgtactccactgtaattgtaatgtaccctataacttatttgtcatcgcaaatatcctaatgcaatttcttatccttccataccattgctagtggtatagaagggaccaggacatgcagttttcttatatttttttatgccgtcgccggtggcatggaaaggtaagaaattgcatccatccgagtgtcattacgagagattaggacatttgcgattggaaataaagtattagacaaaatttggcatatagaca

SEQ ID NO: 209411 - DNA, 1933 bp, Zea Mays
caactaatcatcatcgtctccagtctccctagtccctgctgccgctgccgcttgtcgctgacgccgtcgcgtatcctccgcatctaagctgccggcggcgaccaaacccgccccgcctctcctccgtccgcccccgcaccagctggttccctcccgtgaactcgcacgctcacaggagagatagctgctattgtggaaggtgtggacatcatatcggactccactgttggcgctgctcgtgctcagagtttctctggaaccagtgctagccacacttggccccgtagtactttttattggcagctttcagacccactagttgatcttctcggaagcgttcatgagaatatgtcagaaggaggaagtagacggaatagtttcttcccagtcttcaacagtttttcttttccagagcatgaacatatgaatgaacacagggatggtaacagtgatcaacagactagggagacttattatgctggagaagctaataatggagatggtttaagggcttctctgctttctcaggcagcaagtgttgaagtaaatgatacaaatacctcttttacttctgaagggagctcttcatatttaagaaggcatggaacatcagtgcttgcacaagagtttatggcgtctatacatgattatgacattgaagaagaagaagaagaaatccatgggtttgcattgcctcaccagtctgcacctcgtgatatggaaagcaccgggagacatccattcagacatcaaatagtccggttatctgaaacagctgatatgaagtttaaatggcgggtgcttcttcaaccaggaatcaggcatgccttatgttatggcatgttaattcaagcccttcagcaatctacaggaatcagtggtcttctccgctgcgctcctgaaatatttgagcagtctggagtggctagtttgttttcagacattggactttctcctcattcaacatcaattctcatgagtacccttaatgctttgctgatactcccttgtataactgccgcaatgctgctgatggatgtctgcgggagaagggttattgtgctggccactactcctgtcctgatactatcattgagtgttatgtctatgtccaccctggtgaatatgggaccgttcgaaagtgccgtcctcttccacttcgcattaaccatttgcttctggtcctatgtcattggtttgggaccgataccaaacattctctgctccgagatattcccaaccaaggcccgtgcgacatgtgcaagtttctgttcgctttccttctggtttgggggcctgctttcagcgtactgcttcccggtgatgttgagcaccatcgggcttggcggagcgtgtgggatctatgcacttgtgtgctgcgctccgctttttctcgtctactatcgaataccagagacgaagatgcttaacctggagctcattgcggagctgttcaagctttcaaggcaggagcatgtacagtagattgtccaggaaccgaggtagcccaggctgagtgccgatggatggtgatgtgtgtacatatgacaaatgtaactttggatgctgaatttgtttttgctagttaggaggattggtgatagtgtacgaagtggtttactcttttgctgtccacaggttgctggcagtgtttgtagtgttttgtcttagggggaattcctgtactccactgtaattgtaatgtaccctataacttatttgtcatcgcaaatatcctaatgcaatttcttatccttccataccattgctagtggtatagaagggaccaggacatgcagttttcttatatttttttatgccgtcgccggtggcatggaaaggtaagaaattgcatccatccgagtgtcattacgagagattaggacatttgcgattggaaataaagtattagacaaaatttggcatatagaca

SEQ ID NO: 209412 - DNA, 2639 bp, Zea Mays
caactaatcatcatcgtctccagtctccctagtccctgctgccgctgccgcttgtcgctgacgccgtcgcgtatcctccgcatctaagctgccggcggcgaccaaacccgccccgcctctcctccgtccgcccccgcaccagctggttccctcccgtgaactcgcacgctcacaggtttcatattttctaggttttataattgtttgcaaaagggctatagtacttgatgagatgaagtcaacagtgttttcaacagctgttgtttctattgggtatgcattgcttggatgggattttgcagcattatcagaagctaatcatcatatggaaaaagaatttgaattgttgaatggaccttctattgaaggtataacattagcagcctcaacatttggggctattgtgataacaatattctctggcgcgctattagattggctcggaagacgtgtcatactggtttactcgtctctggtattattttcgggtggcgtcttgatgctgtggtctcctaacatctacattgtacttctagctaggttaattgttggatcaggaagtgggttggttttcacctgtgtccctatttatatatccgaaacatctccttcaaatatgaggggcttacttggaactatgccacagtttatgttcttcataggaactatcttttcatattgcctgatattctggttaacattaatgtcttcacctagctggagaatcatgattggtgcaatctttgctccttccatcgtgtactttgctttgttggtttactacttgccagagtcacctaggtggcttgcaagtgatggaaagattagtgaggccagagtttctctgcagtggcttagaggaaagaaacatgatgtttcaggagagatagctgctattgtggaaggtgtggacatcatatcggactccactgttggcgctgctcgtgctcagagtttctctggaaccagtgctagccacacttggccccgtagtactttttattggcagctttcagacccactagttgatcttctcggaagcgttcatgagaatatgtcagaaggaggaagtagacggaatagtttcttcccagtcttcaacagtttttcttttccagagcatgaacatatgaatgaacacagggatggtaacagtgatcaacagactagggagacttattatgctggagaagctaataatggagatggtttaagggcttctctgctttctcaggcagcaagtgttgaagtaaatgatacaaatacctcttttacttctgaagggagctcttcatatttaagaaggcatggaacatcagtgcttgcacaagagtttatggcgtctatacatgattatgacattgaagaagaagaagaagaaatccatgggtttgcattgcctcaccagtctgcacctcgtgatatggaaagcaccgggagacatccattcagacatcaaatagtccggttatctgaaacagctgatatgaagtttaaatggcgggtgcttcttcaaccaggaatcaggcatgccttatgttatggcatgttaattcaagcccttcagcaatctacaggaatcagtggtcttctccgctgcgctcctgaaatatttgagcagtctggagtggctagtttgttttcagacattggactttctcctcattcaacatcaattctcatgagtacccttaatgctttgctgatactcccttgtataactgccgcaatgctgctgatggatgtctgcgggagaagggttattgtgctggccactactcctgtcctgatactatcattgagtgttatgtctatgtccaccctggtgaatatgggaccgttcgaaagtgccgtcctcttccacttcgcattaaccatttgcttctggtcctatgtcattggtttgggaccgataccaaacattctctgctccgagatattcccaaccaaggcccgtgcgacatgtgcaagtttctgttcgctttccttctggtttgggggcctgctttcagcgtactgcttcccggtgatgttgagcaccatcgggcttggcggagcgtgtgggatctatgcacttgtgtgctgcgctccgctttttctcgtctactatcgaataccagagacgaagatgcttaacctggagctcattgcggagctgttcaagctttcaaggcaggagcatgtacagtagattgtccaggaaccgaggtagcccaggctgagtgccgatggatggtgatgtgtgtacatatgacaaatgtaactttggatgctgaatttgtttttgctagttaggaggattggtgatagtgtacgaagtggtttactcttttgctgtccacaggttgctggcagtgtttgtagtgttttgtcttagggggaattcctgtactccactgtaattgtaatgtaccctataacttatttgtcatcgcaaatatcctaatgcaatttcttatccttccataccattgctagtggtatagaagggaccaggacatgcagttttcttatatttttttatgccgtcgccggtggcatggaaaggtaagaaattgcatccatccgagtgtcattacgagagattaggacatttgcgattggaaataaagtattagacaaaatttggcatatagaca

SEQ ID NO: 209413 - DNA, 3078 bp, Zea Mays
caactaatcatcatcgtctccagtctccctagtccctgctgccgctgccgcttgtcgctgacgccgtcgcgtatcctccgcatctaagctgccggcggcgaccaaacccgccccgcctctcctccgtccgcccccgcaccagctggttccctcccgtgaactcgcacgctcacaggttttataattgtttgcaaaagggctatagtacttgatgagatgaagtcaacagtgttttcaacagctgttgtttctattgggtatgcattgcttggatgggattttgcagcattatcagaagctaatcatcatatggaaaaagaatttgaattgttgaatggaccttctattgaagctggagaatcatgattggtgcaatctttgctccttccatcgtgtactttgctttgttggtttactacttgccagagtcacctaggtggcttgcaagtgatggaaagattagtgaggccagagtttctctgcagtggcttagaggaaagaaacatgatgtttcaggtgagattgttgccacttgacaatgcttccaaatttattcacaagctactatttcatctgaagatggttcagtcttaattagtagggaactgagtaaatagatgtcgttattgcggggacttgagaaatgtaaagttgtaaccaatgtttgacagcatgaccatacaaactaaatctgtagtttagaaatattactgttgtcagttgaattgtgggaccatgaacctgatttttgtggcatttaatgggtgatggatggtgctgttctatccaccgatttctttgtcttgtgtccacgcagtcagaactatgataattgaagagatacgatcttttaatttcagcttgtcactggaggtgctaattgaacaacctcttacattacatacaaaaggcctcctaacatagaagatactaacagaactatgtaagtaacatagtggcctagtaatacatgacttcatatcaaagaactgattgggaactaattcagtcctcttattcatgtcctagaacctttatggtgtaacattgtaaacataagggtcacttaacattacatacttaacatagagtttgtacaattggatgagggttttgttttacagttaaaggctgtgaagcaatgctgataaagtactgacaacaatatgtcaatataattgggggttgatggtgctttaattacacatgatgcattaacagactgtcttgttttggtaaatcgagccaatcacttgttcatttctattttgtcaagaattaagaagcataaatgcatcatgacatcacatagacctgcaggagagatagctgctattgtggaaggtgtggacatcatatcggactccactgttggcgctgctcgtgctcagagtttctctggaaccagtgctagccacacttggccccgtagtactttttattggcagctttcagacccactagttgatcttctcggaagcgttcatgagaatatgtcagaaggaggaagtagacggaatagtttcttcccagtcttcaacagtttttcttttccagagcatgaacatatgaatgaacacagggatggtaacagtgatcaacagactagggagacttattatgctggagaagctaataatggagatggtttaagggcttctctgctttctcaggcagcaagtgttgaagtaaatgatacaaatacctcttttacttctgaagggagctcttcatatttaagaaggcatggaacatcagtgcttgcacaagagtttatggcgtctatacatgattatgacattgaagaagaagaagaagaaatccatgggtttgcattgcctcaccagtctgcacctcgtgatatggaaagcaccgggagacatccattcagacatcaaatagtccggttatctgaaacagctgatatgaagtttaaatggcgggtgcttcttcaaccaggaatcaggcatgccttatgttatggcatgttaattcaagcccttcagcaatctacaggaatcagtggtcttctccgctgcgctcctgaaatatttgagcagtctggagtggctagtttgttttcagacattggactttctcctcattcaacatcaattctcatgagtacccttaatgctttgctgatactcccttgtataactgccgcaatgctgctgatggatgtctgcgggagaagggttattgtgctggccactactcctgtcctgatactatcattgagtgttatgtctatgtccaccctggtgaatatgggaccgttcgaaagtgccgtcctcttccacttcgcattaaccatttgcttctggtcctatgtcattggtttgggaccgataccaaacattctctgctccgagatattcccaaccaaggcccgtgcgacatgtgcaagtttctgttcgctttccttctggtttgggggcctgctttcagcgtactgcttcccggtgatgttgagcaccatcgggcttggcggagcgtgtgggatctatgcacttgtgtgctgcgctccgctttttctcgtctactatcgaataccagagacgaagatgcttaacctggagctcattgcggagctgttcaagctttcaaggcaggagcatgtacagtagattgtccaggaaccgaggtagcccaggctgagtgccgatggatggtgatgtgtgtacatatgacaaatgtaactttggatgctgaatttgtttttgctagttaggaggattggtgatagtgtacgaagtggtttactcttttgctgtccacaggttgctggcagtgtttgtagtgttttgtcttagggggaattcctgtactccactgtaattgtaatgtaccctataacttatttgtcatcgcaaatatcctaatgcaatttcttatccttccataccattgctagtggtatagaagggaccaggacatgcagttttcttatatttttttatgccgtcgccggtggcatggaaaggtaagaaattgcatccatccgagtgtcattacgagagattaggacatttgcgattggaaataaagtattagacaaaatttggcatatagaca

SEQ ID NO: 209414 - DNA, 3430 bp, Zea Mays
gtgcaactaatcatcatcgtctccagtctccctagtccctgctgccgctgccgcttgtcgctgacgccgtcgcgtatcctccgcatctaagctgccggcggcgaccaaacccgccccgcctctcctccgtccgcccccgcaccagctggttccctcccgtgaactcgcacgctcacaggttttataattgtttgcaaaagggctatagtacttgatgagatgaagtcaacagtgttttcaacagctgttgtttctattgggtatgcattgcttggatgggattttgcagcattatcagaagctaatcatcatatggaaaaagaatttgaattgttgaatggaccttctattgaaggtataacattagcagcctcaacatttggggctattgtgataacaatattctctggcgcgctattagattggctcggaagacgtgtcatactggtttactcgtctctggtattattttcgggtggcgtcttgatgctgtggtctcctaacatctacattgtacttctagctaggttaattgttggatcaggaagtgggttggttttcacctgtgtccctatttatatatccgaaacatctccttcaaatatgaggggcttacttggaactatgccacagtttatgttcttcataggaactatcttttcatattgcctgatattctggttaacattaatgtcttcacctagctggagaatcatgattggtgcaatctttgctccttccatcgtgtactttgctttgttggtttactacttgccagagtcacctaggtggcttgcaagtgatggaaagattagtgaggccagagtttctctgcagtggcttagaggaaagaaacatgatgtttcaggtgagattgttgccacttgacaatgcttccaaatttattcacaagctactatttcatctgaagatggttcagtcttaattagtagggaactgagtaaatagatgtcgttattgcggggacttgagaaatgtaaagttgtaaccaatgtttgacagcatgaccatacaaactaaatctgtagtttagaaatattactgttgtcagttgaattgtgggaccatgaacctgatttttgtggcatttaatgggtgatggatggtgctgttctatccaccgatttctttgtcttgtgtccacgcagtcagaactatgataattgaagagatacgatcttttaatttcagcttgtcactggaggtgctaattgaacaacctcttacattacatacaaaaggcctcctaacatagaagatactaacagaactatgtaagtaacatagtggcctagtaatacatgacttcatatcaaagaactgattgggaactaattcagtcctcttattcatgtcctagaacctttatggtgtaacattgtaaacataagggtcacttaacattacatacttaacatagagtttgtacaattggatgagggttttgttttacagttaaaggctgtgaagcaatgctgataaagtactgacaacaatatgtcaatataattgggggttgatggtgctttaattacacatgatgcattaacagactgtcttgttttggtaaatcgagccaatcacttgttcatttctattttgtcaagaattaagaagcataaatgcatcatgacatcacatagacctgcaggagagatagctgctattgtggaaggtgtggacatcatatcggactccactgttggcgctgctcgtgctcagagtttctctggaaccagtgctagccacacttggccccgtagtactttttattggcagctttcagacccactagttgatcttctcggaagcgttcatgagaatatgtcagaaggaggaagtagacggaatagtttcttcccagtcttcaacagtttttcttttccagagcatgaacatatgaatgaacacagggatggtaacagtgatcaacagactagggagacttattatgctggagaagctaataatggagatggtttaagggcttctctgctttctcaggcagcaagtgttgaagtaaatgatacaaatacctcttttacttctgaagggagctcttcatatttaagaaggcatggaacatcagtgcttgcacaagagtttatggcgtctatacatgattatgacattgaagaagaagaagaagaaatccatgggtttgcattgcctcaccagtctgcacctcgtgatatggaaagcaccgggagacatccattcagacatcaaatagtccggttatctgaaacagctgatatgaagtttaaatggcgggtgcttcttcaaccaggaatcaggcatgccttatgttatggcatgttaattcaagcccttcagcaatctacaggaatcagtggtcttctccgctgcgctcctgaaatatttgagcagtctggagtggctagtttgttttcagacattggactttctcctcattcaacatcaattctcatgagtacccttaatgctttgctgatactcccttgtataactgccgcaatgctgctgatggatgtctgcgggagaagggttattgtgctggccactactcctgtcctgatactatcattgagtgttatgtctatgtccaccctggtgaatatgggaccgttcgaaagtgccgtcctcttccacttcgcattaaccatttgcttctggtcctatgtcattggtttgggaccgataccaaacattctctgctccgagatattcccaaccaaggcccgtgcgacatgtgcaagtttctgttcgctttccttctggtttgggggcctgctttcagcgtactgcttcccggtgatgttgagcaccatcgggcttggcggagcgtgtgggatctatgcacttgtgtgctgcgctccgctttttctcgtctactatcgaataccagagacgaagatgcttaacctggagctcattgcggagctgttcaagctttcaaggcaggagcatgtacagtagattgtccaggaaccgaggtagcccaggctgagtgccgatggatggtgatgtgtgtacatatgacaaatgtaactttggatgctgaatttgtttttgctagttaggaggattggtgatagtgtacgaagtggtttactcttttgctgtccacaggttgctggcagtgtttgtagtgttttgtcttagggggaattcctgtactccactgtaattgtaatgtaccctataacttatttgtcatcgcaaatatcctaatgcaatttcttatccttccataccattgctagtggtatagaagggaccaggacatgcagttttcttatatttttttatgccgtcgccggtggcatggaaaggtaagaaattgcatccatccgagtgtcattacgagagattaggacatttgcgattggaaataaagtattagacaaaatttggcatatagaca

SEQ ID NO: 209415 - DNA, 2646 bp, Zea Mays
ctctgctaatctgtgcaactaatcatcatcgtctccagtctccctagtccctgctgccgctgccgcttgtcgctgacgccgtcgcgtatcctccgcatctaagctgccggcggcgaccaaacccgccccgcctctcctccgtccgcccccgcaccagctggttccctcccgtgaactcgcacgctcacaggttttataattgtttgcaaaagggctatagtacttgatgagatgaagtcaacagtgttttcaacagctgttgtttctattgggtatgcattgcttggatgggattttgcagcattatcagaagctaatcatcatatggaaaaagaatttgaattgttgaatggaccttctattgaaggtataacattagcagcctcaacatttggggctattgtgataacaatattctctggcgcgctattagattggctcggaagacgtgtcatactggtttactcgtctctggtattattttcgggtggcgtcttgatgctgtggtctcctaacatctacattgtacttctagctaggttaattgttggatcaggaagtgggttggttttcacctgtgtccctatttatatatccgaaacatctccttcaaatatgaggggcttacttggaactatgccacagtttatgttcttcataggaactatcttttcatattgcctgatattctggttaacattaatgtcttcacctagctggagaatcatgattggtgcaatctttgctccttccatcgtgtactttgctttgttggtttactacttgccagagtcacctaggtggcttgcaagtgatggaaagattagtgaggccagagtttctctgcagtggcttagaggaaagaaacatgatgtttcagacctgcaggagagatagctgctattgtggaaggtgtggacatcatatcggactccactgttggcgctgctcgtgctcagagtttctctggaaccagtgctagccacacttggccccgtagtactttttattggcagctttcagacccactagttgatcttctcggaagcgttcatgagaatatgtcagaaggaggaagtagacggaatagtttcttcccagtcttcaacagtttttcttttccagagcatgaacatatgaatgaacacagggatggtaacagtgatcaacagactagggagacttattatgctggagaagctaataatggagatggtttaagggcttctctgctttctcaggcagcaagtgttgaagtaaatgatacaaatacctcttttacttctgaagggagctcttcatatttaagaaggcatggaacatcagtgcttgcacaagagtttatggcgtctatacatgattatgacattgaagaagaagaagaagaaatccatgggtttgcattgcctcaccagtctgcacctcgtgatatggaaagcaccgggagacatccattcagacatcaaatagtccggttatctgaaacagctgatatgaagtttaaatggcgggtgcttcttcaaccaggaatcaggcatgccttatgttatggcatgttaattcaagcccttcagcaatctacaggaatcagtggtcttctccgctgcgctcctgaaatatttgagcagtctggagtggctagtttgttttcagacattggactttctcctcattcaacatcaattctcatgagtacccttaatgctttgctgatactcccttgtataactgccgcaatgctgctgatggatgtctgcgggagaagggttattgtgctggccactactcctgtcctgatactatcattgagtgttatgtctatgtccaccctggtgaatatgggaccgttcgaaagtgccgtcctcttccacttcgcattaaccatttgcttctggtcctatgtcattggtttgggaccgataccaaacattctctgctccgagatattcccaaccaaggcccgtgcgacatgtgcaagtttctgttcgctttccttctggtttgggggcctgctttcagcgtactgcttcccggtgatgttgagcaccatcgggcttggcggagcgtgtgggatctatgcacttgtgtgctgcgctccgctttttctcgtctactatcgaataccagagacgaagatgcttaacctggagctcattgcggagctgttcaagctttcaaggcaggagcatgtacagtagattgtccaggaaccgaggtagcccaggctgagtgccgatggatggtgatgtgtgtacatatgacaaatgtaactttggatgctgaatttgtttttgctagttaggaggattggtgatagtgtacgaagtggtttactcttttgctgtccacaggttgctggcagtgtttgtagtgttttgtcttagggggaattcctgtactccactgtaattgtaatgtaccctataacttatttgtcatcgcaaatatcctaatgcaatttcttatccttccataccattgctagtggtatagaagggaccaggacatgcagttttcttatatttttttatgccgtcgccggtggcatggaaaggtaagaaattgcatccatccgagtgtcattacgagagattaggacatttgcgattggaaataaagtattagacaaaatttggcatatagaca

SEQ ID NO: 209416 - DNA, 1452 bp, Zea Mays
gtgattgcgtccgcctccttcaaccctatccacatctggcacagaggaaaattggctacggtacaaaacaccgaggcatcgatggactcttccaccagctgacagctatgatttcccctgctcacctcgccttcgccgccgccttcctcctcgtcgtccggtcgtcggcgcctggcgctgctgccgcccgcccgatcttcgatggcaagccatccccctccgaggccaccgccactgcgaggtggctcgccgcccagaacacgtggggtgtcctcagcacaatatcaagtgacttaagtggagctccatttggcaatgtagtttcatatagtgatggagtaccaggcgagggccgtggaataccctacttttatctgacaactctggatcccagtgcaagagatgcactggaagatgaaaggacctcttttacccttagtgagttccctctgggaacttgtggggaaatagatcctgaaaaccccacttgtgcaaaacttactcttaggttaatggaaaggtactaaaaattacatccatgataagatgatcgatcactcgccgtttgtatgcatttagcctatttgtttagttgtgtttgaactgacaatgatctatttgggcctgaactggttttctacctataaatttcacagctgatgtttctgtagaatgaatacacgctgatgggcttgaactgtcactatttgggccatgggctgtatacttatagctgcatgtgtgttttcatttcatttgaagatggttgaccttcagtcatctgaagcagatttggccaagtcagcactttttaccaaacatcctgaaatgaagggtaaactcatgcttgtaatcttgcagtatgcagagaggctatctaccttatgttatctaaataaccatatgttattgtttgatagattggccaaagaatcatcatttcaaaatcttcaaaatggaaatcgaaaacatattcttgattgattggtttgggggtcctaaacccatatccccctcccagtaccttgaatttggaaggtgagctgcaaaaccttaaaaatctgggcttgtagtgtgcattttctctatgcaaagatatattttttttgtaaatacatagttctgcattgctgcacaaccattttatttaacatgctttcaatttattcagaaatcagggctcattgatgtactcataagcgaagaatgcttcatcgatcaatatcccgtctgtgtatgctcttctcaaaaatgaaatccatattgcacatattgtaaagacatctctgtgcacggaataaacctgtagtgttattaaaatgaaatccatatggcacatattgtaaagacatctctttgcatagaataaagttttagtgttattattattgattatgttgtttaattatcacatcttcgtgaacaattactttacaaaaaagaagtctacag

SEQ ID NO: 209417 - DNA, 2636 bp, Zea Mays
gtcggcgctttcgctcggccagtttcttcaaggagtgcccgcacccggacgacaagcagcgcaaggagctgagccgggagctggggctggagcccctccaggtcaagttctggttccagaacaagcgcacgcaaatgaagaaccatcacgagcggcaggagaactcgcagctgaggtccgagaacgagaagctgcgcgccgagaacatgcggtacaaggaggccctgagcagcgcgtcgtgccccagctgcggcgggccggccgcgctcggcgagatgtccttcgacgagcaccacctccgcgtggagaacgcgcggctgcgggaggaggtcgacaggatctcctccatcgccgccaagtacgtgggcaggcccatggtgcccttccccgtgctgtccagcccgctggccggggccggggcacgcgcccccgcgttgccgccgctggacatggcgccgccgtatggcgctgccgctgacatgttcggcggcggcggtgtcgtcgctgctgctggtgctgccggtgccggggacctgctgctgaggggcgccgccgtgcagtcggacgccgacaagcctatgatcgtggagctggccgtggcggccatggaggagctggttcggatggcgcagctggacgagccgctgtggaacgcgcccgcggggctcgatgggtccgctgaggaggagacgcttaacgaggaggagtacgcgcgcttgttccccggcgggctcgggcccaagccgtacgggctcaactcggaggcgtcgcgtgacagcgccgtcgtcatcatgacccatgccaacctcgtcgaaatcctcatggacgtgaaccagtatgcggccgtgttctcgagtatcgtgtcgagagccgcgacgctggaggtgctatcaaccggcgtggctgggaactacaatggtgcattgcaagtgatgtcggtggagtttcaggtgccttccccactggtgccgaccagggaaagctacttcgtgaggtactgcaagcagaacgccgacggaacatgggccgtcgtcgacgtctcgctggacggcctgcgccccggcgcagtcctcaagtgccggcgccggccgtcgggatgcctgatccaggaaatgcccaatggctactcgaaggtgacctgggtggagcacgtcgaggtggacgacaggtcggtgcacagcatctacaagctgctggtgagctcggggctggccttcggtgcacgccgatgggttgggacgctggaccgccagtgcgagcgccttgccagtgtcatggccagcaacatcccgaccagcgacatcggtgtgatcactagcgcggaggggaggaagagcatgctgaagctggcggagaggatggtgatgagcttctgcggcggcgtgacggcctctgcggcgcaccagtggacaacgctgtccggcagcggcgctgaggacgtccgcgtcatgaccaggaagagcgtcgacgaccctggcaggccgcccggcatagtcctcaacgctgccacctcgttctggctccccgtcccgcccaagcgtgtcttcgacttcctccgtgacgaaagctctcgcagcgagtgggacatcctctccaatggcggcgttgttcaagagatggctcacatcgccaacggccgcgaccatggaaactgcgtctcgcttcttcgtgtcaatagcacgaactcgaaccaaagcagcatgctgatcctccaggagagctgcaccgacatgtcgggctcgtacgtcatctacgccccggtggatgtggtcgccatgaacgtggtcctcaacggcggcgaccctgactacgtggcgctcctgccctctggcttcgcgatcctgcccgacggcccatcgtcagggagcagcagcatgctgcaaggcgacggcggcgtcggctcaggtgggtcgctcctgacggtggccttccagatactcgtcgactctgtccccaccgccaagatctcgctggggtcggtggccacggtgaacagcctcatcgcctgcaccgtggagcgcatcaaggcggcggtgatctccggccagagcaatccccagcagcagtagcttcgttgaatccaacagtgttcttatcctttgcattgaaggagcagcaaaattttagagctttcgtcagtgggaagtcaagaacgcacctcagactctcctgcttgccatgtggtgctcatagttccctttactttttcgcctagtttcccccaaaatttctggggttatttcaagaaacacttcagtcgccgaaggaaacgagtcaccacgacgcaagggtagttggttcgggtattgacttcctcttcatgttggcctctcggatgctgcttcctctgaatttaggcttcttctcttgtggtgtacaaaaccgttatttagcatgtaatttgtgctgctgctgctgctgcacctgttcagacttgttcagtatccaggattcccccaatagagatttgtgtcccttaatacctctgcacagtgcttgtgtctagccgccatttcagtcccaaaaatgtgcctgtgtaacgcggttgcatgcttgcattattgttcaatgtcttcgttgctattttgcagctttaagttcacaattaatttatggtgtgtttggtttgatgaata

SEQ ID NO: 209418 - DNA, 2318 bp, Zea Mays
gcgccgcggcgtatgggtcctcgtcggcgctttcgctcggccagccaaacctcctgctggacaaccagcagctccagctactgcagcagcaacacctgctggaccagatcccggcgacgacggcggagagcggcgacaacatggggcgcggcggcggcggggtgtccgacccgctgctgggcgacgagttcgagagcaagtccggcagcgagaacgtggacggcggcgtctccgtggacgagctgcaggaccccaaccagcggcccagcaagaagaagcgctaccaccgccacacccagcaccagatccaggagttggaagctttcttcaaggagtgcccgcacccggacgacaagcagcgcaaggagctgagccgggagctggggctggagcccctccaggtcaagttctggttccagaacaagcgcacgcaaatgaagaaccagtatgcggccgtgttctcgagtatcgtgtcgagagccgcgacgctggaggtgctatcaaccggcgtggctgggaactacaatggtgcattgcaagtgatgtcggtggagtttcaggtgccttccccactggtgccgaccagggaaagctacttcgtgaggtactgcaagcagaacgccgacggaacatgggccgtcgtcgacgtctcgctggacggcctgcgccccggcgcagtcctcaagtgccggcgccggccgtcgggatgcctgatccaggaaatgcccaatggctactcgaaggtgacctgggtggagcacgtcgaggtggacgacaggtcggtgcacagcatctacaagctgctggtgagctcggggctggccttcggtgcacgccgatgggttgggacgctggaccgccagtgcgagcgccttgccagtgtcatggccagcaacatcccgaccagcgacatcggtgtgatcactagcgcggaggggaggaagagcatgctgaagctggcggagaggatggtgatgagcttctgcggcggcgtgacggcctctgcggcgcaccagtggacaacgctgtccggcagcggcgctgaggacgtccgcgtcatgaccaggaagagcgtcgacgaccctggcaggccgcccggcatagtcctcaacgctgccacctcgttctggctccccgtcccgcccaagcgtgtcttcgacttcctccgtgacgaaagctctcgcagcgagtgggacatcctctccaatggcggcgttgttcaagagatggctcacatcgccaacggccgcgaccatggaaactgcgtctcgcttcttcgtgtcaatagcacgaactcgaaccaaagcagcatgctgatcctccaggagagctgcaccgacatgtcgggctcgtacgtcatctacgccccggtggatgtggtcgccatgaacgtggtcctcaacggcggcgaccctgactacgtggcgctcctgccctctggcttcgcgatcctgcccgacggcccatcgtcagggagcagcagcatgctgcaaggcgacggcggcgtcggctcaggtgggtcgctcctgacggtggccttccagatactcgtcgactctgtccccaccgccaagatctcgctggggtcggtggccacggtgaacagcctcatcgcctgcaccgtggagcgcatcaaggcggcggtgatctccggccagagcaatccccagcagcagtagcttcgttgaatccaacagtgttcttatcctttgcattgaaggtatgcgagatttcatcttattgtttagtccgagtactgatgaaatctgatcatcgttgcctttttttgcaggagcagcaaaattttagagctttcgtcagtgggaagtcaagaacgcacctcagactctcctgcttgccatgtggtgctcatagttccctttactttttcgcctagtttcccccaaaatttctggggttatttcaagaaacacttcagtcgccgaaggaaacgagtcaccacgacgcaagggtagttggttcgggtattgacttcctcttcatgttggcctctcggatgctgcttcctctgaatttaggcttcttctcttgtggtgtacaaaaccgttatttagcatgtaatttgtgctgctgctgctgctgcacctgttcagacttgttcagtatccaggattcccccaatagagatttgtgtcccttaatacctctgcacagtgcttgtgtctagccgccatttcagtcccaaaaatgtgcctgtgtaacgcggttgcatgcttgcattattgttcaatgtcttcgttgctattttgcagctttaagttcacaattaatttatggtgtgtttggtttgatgaata

SEQ ID NO: 209419 - DNA, 2988 bp, Zea Mays
ggagaaatgatgatcccggcgaggcacatgccgccgatgatcgtccggaacagcgccgcggcgtatgggtcctcgtcggcgctttcgctcggccagccaaacctcctgctggacaaccagcagctccagctactgcagcagcaacacctgctggaccagatcccggcgacgacggcggagagcggcgacaacatggggcgcggcggcggcggggtgtccgacccgctgctgggcgacgagttcgagagcaagtccggcagcgagaacgtggacggcggcgtctccgtggacgagctgcaggaccccaaccagcggcccagcaagaagaagcgctaccaccgccacacccagcaccagatccaggagttggaagctttcttcaaggagtgcccgcacccggacgacaagcagcgcaaggagctgagccgggagctggggctggagcccctccaggtcaagttctggttccagaacaagcgcacgcaaatgaagaaccatcacgagcggcaggagaactcgcagctgaggtccgagaacgagaagctgcgcgccgagaacatgcggtacaaggaggccctgagcagcgcgtcgtgccccagctgcggcgggccggccgcgctcggcgagatgtccttcgacgagcaccacctccgcgtggagaacgcgcggctgcgggaggaggtcgacaggatctcctccatcgccgccaagtacgtgggcaggcccatggtgcccttccccgtgctgtccagcccgctggccggggccggggcacgcgcccccgcgttgccgccgctggacatggcgccgccgtatggcgctgccgctgacatgttcggcggcggcggtgtcgtcgctgctgctggtgctgccggtgccggggacctgctgctgaggggcgccgccgtgcagtcggacgccgacaagcctatgatcgtggagctggccgtggcggccatggaggagctggttcggatggcgcagctggacgagccgctgtggaacgcgcccgcggggctcgatgggtccgctgaggaggagacgcttaacgaggaggagtacgcgcgcttgttccccggcgggctcgggcccaagccgtacgggctcaactcggaggcgtcgcgtgacagcgccgtcgtcatcatgacccatgccaacctcgtcgaaatcctcatggacgtgaaccagtatgcggccgtgttctcgagtatcgtgtcgagagccgcgacgctggaggtgctatcaaccggcgtggctgggaactacaatggtgcattgcaagtgatgtcggtggagtttcaggtgccttccccactggtgccgaccagggaaagctacttcgtgaggtactgcaagcagaacgccgacggaacatgggccgtcgtcgacgtctcgctggacggcctgcgccccggcgcagtcctcaagtgccggcgccggccgtcgggatgcctgatccaggaaatgcccaatggctactcgaaggtgacctgggtggagcacgtcgaggtggacgacaggtcggtgcacagcatctacaagctgctggtgagctcggggctggccttcggtgcacgccgatgggttgggacgctggaccgccagtgcgagcgccttgccagtgtcatggccagcaacatcccgaccagcgacatcggtgtgatcactagcgcggaggggaggaagagcatgctgaagctggcggagaggatggtgatgagcttctgcggcggcgtgacggcctctgcggcgcaccagtggacaacgctgtccggcagcggcgctgaggacgtccgcgtcatgaccaggaagagcgtcgacgaccctggcaggccgcccggcatagtcctcaacgctgccacctcgttctggctccccgtcccgcccaagcgtgtcttcgacttcctccgtgacgaaagctctcgcagcgagtgggacatcctctccaatggcggcgttgttcaagagatggctcacatcgccaacggccgcgaccatggaaactgcgtctcgcttcttcgtgtcaatagcacgaactcgaaccaaagcagcatgctgatcctccaggagagctgcaccgacatgtcgggctcgtacgtcatctacgccccggtggatgtggtcgccatgaacgtggtcctcaacggcggcgaccctgactacgtggcgctcctgccctctggcttcgcgatcctgcccgacggcccatcgtcagggagcagcagcatgctgcaaggcgacggcggcgtcggctcaggtgggtcgctcctgacggtggccttccagatactcgtcgactctgtccccaccgccaagatctcgctggggtcggtggccacggtgaacagcctcatcgcctgcaccgtggagcgcatcaaggcggcggtgatctccggccagagcaatccccagcagcagtagcttcgttgaatccaacagtgttcttatcctttgcattgaaggagcagcaaaattttagagctttcgtcagtgggaagtcaagaacgcacctcagactctcctgcttgccatgtggtgctcatagttccctttactttttcgcctagtttcccccaaaatttctggggttatttcaagaaacacttcagtcgccgaaggaaacgagtcaccacgacgcaagggtagttggttcgggtattgacttcctcttcatgttggcctctcggatgctgcttcctctgaatttaggcttcttctcttgtggtgtacaaaaccgttatttagcatgtaatttgtgctgctgctgctgctgcacctgttcagacttgttcagtatccaggattcccccaatagagatttgtgtcccttaatacctctgcacagtgcttgtgtctagccgccatttcagtcccaaaaatgtgcctgtgtaacgcggttgcatgcttgcattattgttcaatgtcttcgttgctattttgcagctttaagttcacaattaatttatggtgtgtttggtttgatgaata

SEQ ID NO: 209420 - DNA, 1664 bp, Zea Mays
ggagagagaagggggaggacgacgagggcgccggggcggtgatacgggcacacctgctctccgacttcaaggccgcgctatcgaagaaggtggtgaacatgggagagctgcggcgcttagcctgcctcggcgtccccgacggcggtactggtgtccgacccgtcgtctggaagcttcttttggggtatttgccaactgatcgttccttatggacttatgagttagaaaagaagcggagtcaatatagtgcatacagagaagagtttcttctaaatccttcagaaaaactacgaatgattgaggaaacaaagctgtcaagaaagaaagacacaagtattgagaggattggctttctttcgagattcgaagttactaatgaagagcatcctttaagctctggtaaatctagcctgtggaaccaatattttcaggattcagagttactagaacagatagaccgagatgtaaagcgaacacatcctgatatttcatttttctcatcaaagtctaaccaggaatccttgaggagaattttaattatattttcaaaattgaaccccagtataagatatgtgcaagggatgaatgaagttttggcacctttattttatgtattcaagaatgaccctgacccaagcaactcagcgtcagctgaagcagacgcatacttttgctttgtcgaattgttgagtggctttagagacaactattgcaagcatcttgacaatagcagcgtgggtattcgatctacactttcaaaattatcacaactcttgaagcgacatgatgaggaactatggcgtcacatggaggtcaccacaaaggtttacccacaatattatgcctttagatggatcacactgttgttgacgatggagttcagctttaacgtgtgtatacatatctgggatgctatcttgggtgatccagaaggcccatcggacacattgatgaggatatgctgtgccatgctcatcctagtccgaaagcgtctcttagctggagacttcaccgccaatgtccagctgctgcaacattacccagccaccaacatcgatcacctcctccacatcgccaaccggttgagaggaactgtacccggctagtgttttgttgcctttcctgcatacctgtacttcagttttgcccatgtgaccttcgtctggttaagtcgctaaatgcaatgttggtagcttgaaatatcactctgctccttgtgttctgttttgcctgtttcggtgtggccggagccggacgatgaatatcggagacacttcatgtgtcacagctctgagtagcgcttctgttttcattcacatggaaacacactattggagctccttccagcttgtagtacctgggaaagggaagaatggatgcattcctgaattgtgaaaactgaatatgggttctgctggatacgctcctctgtaccaaaagtcatatcctttgtagtgtactcttttaatgctttatgaattagagtatgtagaatgacttttgcaagaactgaaaataggaattgctgtgcaaagttattttgtcttgatgacatttgttgtgaaactggtgccaaatttcttgtcataaaaatatctagtgagagttggggtggttgttttaaagagtaaaatgcaatagtgatccccaaatttgcacttgta

SEQ ID NO: 209421 - DNA, 747 bp, Zea Mays
gaaacatggcgctggcggactgaagttgcagatgaacctgctcccgagaagcctgcccctgcgaagcaagggggctccaatgacagggatctcgctcttgcaagggtggaaacagagaagaggaactctttgatcaaagcttgggaagagaatgagaagacaaaagctgagaacaaggctgctaagaaagtatccgctattctttcatgggaaaacacaaagaaagcaaacatagaagctgaactgaagaagattgaggaacaactggaaaagaagaaggctgaatatgcagagaagatgaagaacaaggttgcaatgatacacaaggaagccgaagagaagcgagcgatggtggaggcaaaacgcggtgaggaggtcctgaaggccgaggagatggctgccaagtaccgggccaccggccacgctcctaagaagctcatcggttgcttcggagcctaagaaaccttccaagtcagaccgagcagaaagtgaaaaacgtcagccagtgattgcttggtcctctcgctctatcaagtgtgtagtgtgtcttcgaaagtttgtaaagcctactgctgctgctgtatatactgatatcgcttccaaggcaggcgtttggtggtgtacatgttgaatgcttgacgagaaacattcttgtgtgtagttaagaggtcacgctgttgttgttgttgttgacattcaagcagacattttgttttcttctggtttttaaatcataataagaaaaaa

SEQ ID NO: 209422 - DNA, 1246 bp, Zea Mays
ttgccttttgaagaaaagtcgccgcgttcctcttgcctgatgaaatccacttctcgtctagatctaagcctccgcgtggcttccggatcagatgcttggtccgatcaaacaacgctcgaagcgagacgaggctgcatggtttttgtgcctggaggtttctaatccgcgtggttaaggaaactgggtactacaatttgttgctacaagtgcccgatccgtcgaattgatgtctgccgaccttcagagctgcgacgttccgggaatctggggggatctggatcttggcggactggacaattgggaggcgtctaaagcatggctggacaattgtgagatgtgacatcttgaaggcctttgccatgttgggtgcgctcgcatggcaggcatcataataaagatgttggttttgtgtgctgggtgggagatcgcacggggaattgttttttcatccctgggttctcccgccctttgtgtccccgtgccctgcttcgtgttgtttggcttctcgttctacgcttcatcaccggtgctgctgcaaattgaacggatcttctcgtctcgctgcgtgctgcaaattgaacggggctacatcgcaacgcaacacaacacgcaaggtcattcatatgcagttcattcaccctacgtttatcccgtaaggctataaagcacatgcgaaaggcgttcattcactctgtaaggcgttcttcacccaacgcttctcgcacgggggtcttctattgaccattgaagataaacttttgaatatatgaatcagctgtgtattatttgctgtagcttcaaatgcgagacctatggttgcagtcatttttattgtagttagtttaaatgatacatcgtcgtcaccgcatgaagatctactgctgagccatatgaagacctgctgcctcatcatggtgtttgtatatgaagatcaactgccagtgcctacacgctggacggagtatttatatgatgtgaaggtcaactgttcggcatcgtcggtatgaaatggctatggccttcaaagcttccttggtcactggacagggaagaaattttctgctcaagctaaaaattagatacaagcttgttcaacttgcactatagttcatttgagtacttacctgttattgatctctattgagttgaagctaggtttcaagtatctcctaaggtttcgtataggtgaaaactagtgtttctttttttttttttttttgcactacaatctgtgacgtttcatgcc

SEQ ID NO: 209423 - DNA, 629 bp, Zea Mays
tgccttttgaagaaaagtcgccgcgttcctcttgcctgatgaaatccacttctcgtctagatctaagcctccgcgtggcttccggatcagatgcttggtccgatcaaacaacgctcgaagcgagacgaggctgcatggtttttgtgcctggaggtttctaatccgcgtggttaaggaaactgggtactacaatttgttgctacaagtgcccgatccgtcgaattgatgtctgccgaccttcagagctgcgacgttccgggaatctggggggatctggatcttggcggactggacaattgggaggcgtctaaagcatggctggacaattgtgagatgtgacatcttgaaggcctttgccatgttgggtgcgctcgcatggcaggcatcataataaagatgttggttttgtgtgctgggtgggagatcgcacggggaattgttttttcatccctgggttctcccgccctttgtgtccccgtgccctgcttcgtgttgtttggcttctcgttctacgcttcatcaccggtgctgctgcaaattgaacggatcttctcgtctcgctgcgtgctgcaaattgaacggggctacatcgcaacgcaacacaacacgcaaggaacgccgccgaaggg

SEQ ID NO: 209424 - DNA, 1356 bp, Zea Mays
tgggctttgagtttattcatgatgatggacgccacggatcttctgctgcaggagctgagccagatgaaggatgcggaatacaagataaacaaggtggagaaagaacagaatgctgctatgaaagcactgaagaagcaggagaagcgcaccaagaagactgccatcatgatgatgaagtgtgaagaagatgagtcatctgagtcgagcgagagcgattgtgaggacgaggcaaccatgaatgtcgagcagggcttggtgatctcaacagcggttcccgaggttgttgcatcaagcatctcagctgtccccgcgatggagtgtgataaggctgcagtgaaggccatgaagaaaatggagaaggaacaaatgaaggccatgaagaagatggagaaggaacagaagaaggctgctaagaaggccatgaagatggagaaggaagcaaagaagatggcaatggctacactgaatggctgcagggatgaagacgattcctcatgctcatcagagtcgagtgaaagtgaatgcgagggccaagttatgaggatgagccgctgcgttacaatcaccgcaccggaaatgccacctccaagcacgggtcttccaatcatagttcctcaaattccagaacctttggcaccacagccgtctcaatctcaaccttcagagccagcaaccgcagtgcaagccaccagagtcagcagcgttgcagtaactgagacatccacaaccagcagaattgaggtctgcatggggggcaaatgcaagaagtcaggcgcggttgctcttctgcaggagttcgagaagactgtgggcaccggaggtgcggtcgtcggctgcaagtgcctggggaagtgcggcctaggtcccaacgtgcggctgaggagcggtgcctctgcggaaggttctgcaaaggggaacccactctgcatcggtgtaggctttgaagatgttggcaccatcgtggctggtctctttggaggcgctgatctgggcatgacacccacctagacctggtggtactacctcgacctagtcgtacttcaagaaatcaagagcacaacttgtaatcacagatgttgcattgaacaaatgtatagtgcagctacggccttgctagtgctactgctaagtttatgtactctctgtctatatagaacacgtatggtaatcttgtttctggtatgtgatccatattggtcagtgattgttttcatggttttcagatttgagcatctgtggcaatatagggatggttaatgctaatgtcctccactgtatggacgaagaaatagctgaaactagctaggcgtcctgtgttgtttttctccgttagtacactacactggggtctctttg

SEQ ID NO: 209425 - DNA, 1995 bp, Zea Mays
gacggtggccatagtttagtcgcagcagtacaggctccacttgggagcgaggacgaggaggcgggtgccgctcctgtggcttcgccatgtgctctcgccccgcgtcctcggctcctccctcctcggtatctacatgccattatgccaagatctcccactctccgatctgaccagggccgggccaccgcagccatttgcgtctgctcttcccgaatccctgtctcgctttgccctccgtttctccagctataaagccggggggtcctgtggcgtgtgacctttttataccggatgtgcagcgcagggtcaacttcgtcaggtttcttggctccaacaaccttcctgggtcactctaaactgtaaagagatggggtgtggcccatcaatccccgacaagtacacgataggtgggaaggggcgcaagcgccggagcgtcatacaggaggttgccgtgttcgtgcccaccatccgcatcccagtggcctctgacatagctcatccgctcaggggaatagtttccaaggatcttgtcgaccgactctccacactccgtgcccatgtcgcctcgctggctgaagaaatctatcacgcggacgtatcagctgttcaagaactgcagcatgcgctagaggagtacttgccagttgttcttggtttaacaacgaaagagagccgtcttgaatcgtcagtacagttcagatggaagaccttagacgacgaccaggagtgttgtctggcgagcgcgtggtatgaggtgctctcggtggtccacatgatggccatgcttgcgttgtttgaggctaacctattgctcatcccaaagagcagccaaggtggtggtgaaaggaaggtagcagaagacgcaaagaaggatgtcgtcgattcattgctcagggcgtcgggatgcttagactactccgtgcatcgcatacttgttcagatacctgcgcaagtcaagaagggttttcccagttacttgcaggagggcatgcttgaggccatctcaattcaggcattggctcagtgtgtggaaatacagcttggcttggcttctgaatgtgagaaggcaacgctgtcagtaaagaggaggctagcttgtgagcaagtcagctatttttctcaggctcactattgtctgtcgggatgcgatacgagtgactcgtacgggaagaagcttctgctgttcctcaagtggaagtggatggaggccaaggctgtagcgtattactaccatggtctggtgctcgacaagggcggcgaaccggcaaaccatatcagtgcagtctgctgcctctctgcagctgatgacctgctctcagacagcaaaagggcttgcttgagtttttgcttggcaaatcctgtcacgagggtgcctcctccttggggtgtcatgaaaaacatgcacaaaaagatcccagatgtcgcttacaagaagttccaagcgcacgggcatctgtttgagcaaaacaagaacagcgcactccaatccgttcctgacctaccagagtttgcgctgtcgctgagaccggatggatacgagttgccaagcactgattcgatctgggataatgttgatggccaacctcagattcaaagcctcaaggagcatatgatagatgacgaagatgaagtaggcacaaaatgatagttctcacttccaaatgcttcttttcattgtaccaccaaaagtagcagagctcaaaaacgcttaatccaaaatgttttggattcagcatatggctcaactgaaaaaggaatcgcgatctctgtattattgcaagtattaccatatgatatagtaaagtcttatgtgtaatagaatcataaataatagttggtttcttgctgtaatcgcctttaattttattttcccaactggcagaatagagcatcacagaaaaaaaaaatacggcacgcatttcagtagaacaatagtctgcgtgtttggttgggtggctaagtggagaatgtagaagagtgaattattgtattgat

SEQ ID NO: 209426 - DNA, 3523 bp, Zea Mays
attataaccaccccgtcccacaaaaccactacgccgactcgccgaggctgcgagggagaacccagcagctcccattaatggactgcgcaacagcttaaactccgccgcccatttcaaacagaaccgaaccggccgcagcatcgcagcgcagcggtacgcgcctcggaggtggagggaatgtcggaggcggtggcgatcctctcgctctccgcgtccgccgtggtagaagacgtgctgcggcagcacgggtgccgcctcagcgaccgcgacctcgcgtcccgcagggccgaggaagctgcggggaggaggaacgaggcggcgggatggctgcgccgcacggtgggggccgttgccgcgcgcgatcttccggaggagccgtcggaggaggagtttcgcctcggcctccgcaacggccagatcctctgcggcgcgcttaatcgtgtccacccgggcgccgtcccgaaggtggtcgtgaatacggcggcggactccgtgctgcaggccgacggcgcggcgctgtcggcgtttcagtacttcgagaacgtgcgcaacttcctggtggcggcgcaggagatcggcctgccgtgctttgaggcctccgatttggagcagggagggaagagcgccagggtggtgaactgcgtcctcgcactgaagtcgtacggtgactggaagcaatgcggtggcaccgggccgtggaagtacggcgggaatcttaagccatcggtatccggcaagtccggccacgggaggaagaactctgaaccgttccggaggagccaatcgatcaatgaaggtgaagtgccctatgaggaagctgggttcaacggcgacgctcattttgattccagtgacatgtcaacatcccgcccccttaaaatgttggtcagtgcagttttgtccgacaaaaggccagatgaagttccacagctcttggagtccatgctgagcaaacttgttgaagaatttgaaaatcgtctaaacagccaaaatgaattggtcaaagcggctctaaaaagtggtattgataacaccaaatcattttcaaaatcaaaggtcctggttgagacccctcctaatactagtgggagaaagatggatacaggagatatttactgtaaccacaaaaaaacaaaaaaagaagcatcaagagaagtggcactgaagcaacatttaattttacaacaacagtcaaagaatgttgaggaacttaagagtgatctgataactacaagggcgggtatggagtatatgcaaatgaagtactctgaggatctcaaccttcttggaaggcacctgtttagcttggctcatgctgcttctggttatcacaaagttcttgaagaaaatagaaaactatacaaccaggtgcaggatcttaaaggaagtatcagggtatattgtagggtgcgtccctttttgcctggacaagcaagtccgtccactgtgggttccatcgacgagggcaacataaccattgtcaccccttccaagtctggaaaggaaggccggaaaacttttagcttcaataaggtttttggcccatcagcaacacaagctgaggtgttcttggatactcaacccctcattcgctcggtccttgatggatacaatgtttgtatcttcgcatatggccaaaccggatcagggaagacatacacgatgagtgggcccaagaacatgactgagcaaacccaaggcgtcaactatcgggcacttggtgatctatttaagcttgctgaacaaaggaaaggaaccttcatttatgatattgctgtacaaatgattgagatttacaatgaacaagttagggatctccttgtcagtgatggtctcaacaaaaaattagagattcggaataattctcaaaatgggctaaatgttccggatgcaagccttgttcgtgtggcatcaacaatggatgtcatggaattgatgaatgttgggcaaaagaatcgtgctgttggcgcgactgcactaaatgacaggagtagtcgttcccacagttgtttaactgttcatgttcagggaagggatctgacatcagggacaatctttcgtggttgcatgcatctagttgatcttgctggaagtgaacgggttgataaatcagaggtcactggagaaaggttaaaagaagcacaacatataaacaaatcattgtcagccttaggggatgtaattgcttcgcttgcccaaaagaattcacatgtaccttacaggaatagtaaattaacacaacttctccaagattcacttggaggtcaggccaaaaccttgatgtttgttcatataagcccagaaagtgatgctgtaggagaaaccatcagcaccttgaagtttgctgagcgtgtgtcaactgttgaacttggtgctgctcgattaaataaagaatctggagaagttagagagcttaaagagcagattgctcgacttaaatcagcattagctgcgaaaaatttaggatcggagcaaatcatcagtcatgactctgaggcatttaatataaagatgccttcgcctggtttttcaaacacacgacagggtagctgtgatctactctctagccaaagtaacttcagacaaccaatggaggatgttggaaacatagaggctagagccaatcatacactgaggcaaaagaaaccaagctttgatctccaggatttattaacagcaagtgattctccttcatggccagatagcaatttgagggtaaattttcagatgggagatgaaagagaagcaattggtggggactggatagataaggttgtagtgaacaacaataattcagccagtgattgggagggtgacaacacagctttacctgactttttttaccagagatatcattcaggtatgagggagaagcagtaccagaggaacaacatgagacaaaaggatgaccacgagtatgaacagcaaaggcctcgattttactctacaaatactgatgattctgatgacattgacatagcaacaagtgattcctcagaatcagatgcattatggcagctcaatgtccaaagcatgaataactcaattagtgagagtggttcaaaggttaagaaaccacaaataaagcttagagatggttcagatgccaggacaccgattcattctcaaataccatcagggtcgagaaaagtcgcaaacggttcgagtagatctgttaggcagcctttaagcagaagcgacagcagaaggctttcatcaaatggaagacaaactggtgcaaagtagggacttacaatgatcgcgtgcagtttttgcctttttcttttctgtgtttgtcacgagagattgtgaggttgctctcgagtacagcaatgagtgacaataaacccaattgagtgtgtcagtgtggtgagttgtgatctcaacaactggtgtgtgaggccattaactttttttccttattggcttatcaggctacgttgagttcttgctaattctctgtatcttgtccataatataaatacataatgaaaagaaaggaaattgattgatcaaaagctgg

SEQ ID NO: 209427 - DNA, 3505 bp, Zea Mays
cccatccattataaccaccccgtcccacaaaaccactacgccgactcgccgaggctgcgagggagaacccagcagctcccattaatggactgcgcaacagcttaaactccgccgcccatttcaaacagaaccgaaccggccgcagcatcgcagcgcagcggtacgcgcctcggaggtggagggaatgtcggaggcggtggcgatcctctcgctctccgcgtccgccgtggtagaagacgtgctgcggcagcacgggtgccgcctcagcgaccgcgacctcgcgtcccgcagggccgaggaagctgcggggaggaggaacgaggcggcgggatggctgcgccgcacggtgggggccgttgccgcgcgcgatcttccggaggagccgtcggaggaggagtttcgcctcggcctccgcaacggccagatcctctgcggcgcgcttaatcgtgtccacccgggcgccgtcccgaaggcaagcgctccttgtgccgacggcgcggcgctgtcggcgtttcagtacttcgagaacgtgcgcaacttcctggtggcggcgcaggagatcggcctgccgtgctttgaggcctccgatttggagcagggagggaagagcgccagggtggtgaactgcgtcctcgcactgaagtcgtacggtgactggaagcaatgcggtggcaccgggccgtggaagtacggcgggaatcttaagccatcggtatccggcaagtccggccacgggaggaagaactctgaaccgttccggaggagccaatcgatcaatgaaggtgaagtgccctatgaggaagctgggttcaacggcgacgctcattttgattccagtgacatgtcaacatcccgcccccttaaaatgttggtcagtgcagttttgtccgacaaaaggccagatgaagttccacagctcttggagtccatgctgagcaaacttgttgaagaatttgaaaatcgtctaaacagccaaaatgaattggtcaaagcggctctaaaaagtggtattgataacaccaaatcattttcaaaatcaaaggtcctggttgagacccctcctaatactagtgggagaaagatggatacaggagatatttactgtaaccacaaaaaaacaaaaaaagaagcatcaagagaagtggcactgaagcaacatttaattttacaacaacagtcaaagaatgttgaggaacttaagagtgatctgataactacaagggcgggtatggagtatatgcaaatgaagtactctgaggatctcaaccttcttggcacctgtttagcttggctcatgctgcttctggttatcacaaagttcttgaagaaaatagaaaactatacaaccaggtgcaggatcttaaaggaagtatcagggtatattgtagggtgcgtccctttttgcctggacaagcaagtccgtccactgtgggttccatcgacgagggcaacataaccattgtcaccccttccaagtctggaaaggaaggccggaaaacttttagcttcaataaggtttttggcccatcagcaacacaagctgaggtgttcttggatactcaacccctcattcgctcggtccttgatggatacaatgtttgtatcttcgcatatggccaaaccggatcagggaagacatacacgatgagtgggcccaagaacatgactgagcaaacccaaggcgtcaactatcgggcacttggtgatctatttaagcttgctgaacaaaggaaaggaaccttcatttatgatattgctgtacaaatgattgagatttacaatgaacaagttagggatctccttgtcagtgatggtctcaacaaaaaattagagattcggaataattctcaaaatgggctaaatgttccggatgcaagccttgttcgtgtggcatcaacaatggatgtcatggaattgatgaatgttgggcaaaagaatcgtgctgttggcgcgactgcactaaatgacaggagtagtcgttcccacagttgtttaactgttcatgttcagggaagggatctgacatcagggacaatctttcgtggttgcatgcatctagttgatcttgctggaagtgaacgggttgataaatcagaggtcactggagaaaggttaaaagaagcacaacatataaacaaatcattgtcagccttaggggatgtaattgcttcgcttgcccaaaagaattcacatgtaccttacaggaatagtaaattaacacaacttctccaagattcacttggaggtcaggccaaaaccttgatgtttgttcatataagcccagaaagtgatgctgtaggagaaaccatcagcaccttgaagtttgctgagcgtgtgtcaactgttgaacttggtgctgctcgattaaataaagaatctggagaagttagagagcttaaagagcagattgctcgacttaaatcagcattagctgcgaaaaatttaggatcggagcaaatcatcagtcatgactctgaggcatttaatataaagatgccttcgcctggtttttcaaacacacgacagggtagctgtgatctactctctagccaaagtaacttcagacaaccaatggaggatgttggaaacatagaggctagagccaatcatacactgaggcaaaagaaaccaagctttgatctccaggatttattaacagcaagtgattctccttcatggccagatagcaatttgagggtaaattttcagatgggagatgaaagagaagcaattggtggggactggatagataaggttgtagtgaacaacaataattcagccagtgattgggagggtgacaacacagctttacctgactttttttaccagagatatcattcaggtatgagggagaagcagtaccagaggaacaacatgagacaaaaggatgaccacgagtatgaacagcaaaggcctcgattttactctacaaatactgatgattctgatgacattgacatagcaacaagtgattcctcagaatcagatgcattatggcagctcaatgtccaaagcatgaataactcaattagtgagagtggttcaaaggttaagaaaccacaaataaagcttagagatggttcagatgccaggacaccgattcattctcaaataccatcagggtcgagaaaagtcgcaaacggttcgagtagatctgttaggcagcctttaagcagaagcgacagcagaaggctttcatcaaatggaagacaaactggtgcaaagtagggacttacaatgatcgcgtgcagtttttgcctttttcttttctgtgtttgtcacgagagattgtgaggttgctctcgagtacagcaatgagtgacaataaacccaattgagtgtgtcagtgtggtgagttgtgatctcaacaactggtgtgtgaggccattaactttttttccttattggcttatcaggctacgttgagttcttgctaattctctgtatcttgtccataatataaatacataatgaaaagaaaggaaattgattgatcaaaagctgg

SEQ ID NO: 209428 - DNA, 3532 bp, Zea Mays
ccacaaagcacccacttcaccttcccatccattataaccaccccgtcccacaaaaccactacgccgactcgccgaggctgcgagggagaacccagcagctcccattaatggactgcgcaacagcttaaactccgccgcccatttcaaacagaaccgaaccggccgcagcatcgcagcgcagcggtacgcgcctcggaggtggagggaatgtcggaggcggtggcgatcctctcgctctccgcgtccgccgtggtagaagacgtgctgcggcagcacgggtgccgcctcagcgaccgcgacctcgcgtcccgcagggccgaggaagctgcggggaggaggaacgaggcggcgggatggctgcgccgcacggtgggggccgttgccgcgcgcgatcttccggaggagccgtcggaggaggagtttcgcctcggcctccgcaacggccagatcctctgcggcgcgcttaatcgtgtccacccgggcgccgtcccgaaggcaagcgctccttgtgccgacggcgcggcgctgtcggcgtttcagtacttcgagaacgtgcgcaacttcctggtggcggcgcaggagatcggcctgccgtgctttgaggcctccgatttggagcagggagggaagagcgccagggtggtgaactgcgtcctcgcactgaagtcgtacggtgactggaagcaatgcggtggcaccgggccgtggaagtacggcgggaatcttaagccatcggtatccggcaagtccggccacgggaggaagaactctgaaccgttccggaggagccaatcgatcaatgaaggtgaagtgccctatgaggaagctgggttcaacggcgacgctcattttgattccagtgacatgtcaacatcccgcccccttaaaatgttggtcagtgcagttttgtccgacaaaaggccagatgaagttccacagctcttggagtccatgctgagcaaacttgttgaagaatttgaaaatcgtctaaacagccaaaatgaattggtcaaagcggctctaaaaagtggtattgataacaccaaatcattttcaaaatcaaaggtcctggttgagacccctcctaatactagtgggagaaagatggatacaggagatatttactgtaaccacaaaaaaacaaaaaaagaagcatcaagagaagtggcactgaagcaacatttaattttacaacaacagtcaaagaatgttgaggaacttaagagtgatctgataactacaagggcgggtatggagtatatgcaaatgaagtactctgaggatctcaaccttcttggaaggcacctgtttagcttggctcatgctgcttctggttatcacaaagttcttgaagaaaatagaaaactatacaaccaggtgcaggatcttaaaggaagtatcagggtatattgtagggtgcgtccctttttgcctggacaagcaagtccgtccactgtgggttccatcgacgagggcaacataaccattgtcaccccttccaagtctggaaaggaaggccggaaaacttttagcttcaataaggtttttggcccatcagcaacacaagctgaggtgttcttggatactcaacccctcattcgctcggtccttgatggatacaatgtttgtatcttcgcatatggccaaaccggatcagggaagacatacacgatgagtgggcccaagaacatgactgagcaaacccaaggcgtcaactatcgggcacttggtgatctatttaagcttgctgaacaaaggaaaggaaccttcatttatgatattgctgtacaaatgattgagatttacaatgaacaagttagggatctccttgtcagtgatggtctcaacaaaaaattagagattcggaataattctcaaaatgggctaaatgttccggatgcaagccttgttcgtgtggcatcaacaatggatgtcatggaattgatgaatgttgggcaaaagaatcgtgctgttggcgcgactgcactaaatgacaggagtagtcgttcccacagttgtttaactgttcatgttcagggaagggatctgacatcagggacaatctttcgtggttgcatgcatctagttgatcttgctggaagtgaacgggttgataaatcagaggtcactggagaaaggttaaaagaagcacaacatataaacaaatcattgtcagccttaggggatgtaattgcttcgcttgcccaaaagaattcacatgtaccttacaggaatagtaaattaacacaacttctccaagattcacttggaggtcaggccaaaaccttgatgtttgttcatataagcccagaaagtgatgctgtaggagaaaccatcagcaccttgaagtttgctgagcgtgtgtcaactgttgaacttggtgctgctcgattaaataaagaatctggagaagttagagagcttaaagagcagattgctcgacttaaatcagcattagctgcgaaaaatttaggatcggagcaaatcatcagtcatgactctgaggcatttaatataaagatgccttcgcctggtttttcaaacacacgacagggtagctgtgatctactctctagccaaagtaacttcagacaaccaatggaggatgttggaaacatagaggctagagccaatcatacactgaggcaaaagaaaccaagctttgatctccaggatttattaacagcaagtgattctccttcatggccagatagcaatttgagggtaaattttcagatgggagatgaaagagaagcaattggtggggactggatagataaggttgtagtgaacaacaataattcagccagtgattgggagggtgacaacacagctttacctgactttttttaccagagatatcattcaggtatgagggagaagcagtaccagaggaacaacatgagacaaaaggatgaccacgagtatgaacagcaaaggcctcgattttactctacaaatactgatgattctgatgacattgacatagcaacaagtgattcctcagaatcagatgcattatggcagctcaatgtccaaagcatgaataactcaattagtgagagtggttcaaaggttaagaaaccacaaataaagcttagagatggttcagatgccaggacaccgattcattctcaaataccatcagggtcgagaaaagtcgcaaacggttcgagtagatctgttaggcagcctttaagcagaagcgacagcagaaggctttcatcaaatggaagacaaactggtgcaaagtagggacttacaatgatcgcgtgcagtttttgcctttttcttttctgtgtttgtcacgagagattgtgaggttgctctcgagtacagcaatgagtgacaataaacccaattgagtgtgtcagtgtggtgagttgtgatctcaacaactggtgtgtgaggccattaactttttttccttattggcttatcaggctacgttgagttcttgctaattctctgtatcttgtccataatataaatacataatgaaaagaaaggaaattgattgatcaaaagctgg

SEQ ID NO: 209429 - DNA, 2058 bp, Zea Mays
cttggcttctagtgagatgaaaattgttgctacaccatgaattcgtcagcccgtgctcgttgtcagatccatacttgaacacagatgctggtacaatgtccccctttgagcatggcgaggtgtttgttcttgatgatggtggagaggttgacttggatttggggaattatgagcgtttcatagatgttactctgacaagggataacaacattaccactggaaagatataccagtctgtcattgagaaggagagaaggggtgattatcttggaaagactgtacaggttattcctcatgtcactgatgaaataaaacagtggatacagtcagtgtcttcggttcctgtggatgggcagactcgtccagctgatgtttgtgttattgaattgggaggcactgtaggtgatattgagtcgatgccattcattgaagctttgcgccaattatccttttctcttggcaaggaaaatttctgcctcatacacgttagccttgttccagtattgggtgtagttggtgagcagaaaactaaaccaacacaacatagtgtacgagaactgagagccttgggtctgactcctgatcttctagcatgccggtcagcacagccactaataggatctgttaaagagaagctttcacaattttgccatgtcccggtcgagaacatacttaacatccatgatgttccaaatttatggcatgtcccacttattcttagaaaccaaaaggctcatgaagctataatcaaacaactaaaccttgctagatctgctggaccacctgaattacgagattggacagatatggctgagtcgtatgacaacctcaataactctgttaaagttgctttggttgggaagtatactaatctgacagattcttacctatcagtggtgaaggctctcctacatgccagtgttgcctgttcgttaaagccatctatccagtggattgcagcttcggatcttgaagatgcaactgcaatatctgcaccagatgcccatgctgaagcctgggaaactcttaaaggttcatcatgcattttgatacctggaggatttggggatcgtggaatttcagggatgatattggctgcaaaatatgctcgtgagaatagagttccatatcttggtatttgcttgggcatgcagatatcagtgattgagatttccagacatgtcctgggcctggaagatgcagacagtgaggagtttaacaaggatacaccgaatcatgttgttatgtacatgcctgaggtttcaaaaacacatatgggaaacacgatgaggttgggctgcaggagaacattcttcagcaaacctgattgtcttacatcaaaattgtacggaagtcctccacatgtagatgagcgtcatcgtcatagatacgaggtcaatccctcttttgttcccatgcttgaaagtgctggtcttcattttgttggttgtgacgaaagtcgaaaccggatggagattgtggagctacaagatcatcccttctatgtaggtgttcagttccacccggagttcaaatcaaggcctcgaagaccttcacctccttttacaggtctaataatggcggccactaaacaactgggagcaaattcgaatagctcgaatggcttcgttggagcttctgactaatatggggatctcccgttgctgcagacacccaagttatttcttgtgcacattagatgtacaggaaaacaatctaagcctgaagcagagtgtttctctctctcgaccacctgagtggcgtaagctaacggtcttacagtgtattggggccgaaccgtcatggttttgttgactgtcatttcaattgagcttaacagcagtcagtgctcccatccttgtgattccaattgagattaacagtagtaagtgattatgatctctcttgccgtttgagtggaagtgaaagacactaccatccagtttttggttgttatttgttctgatttttttgtgtttgttttctatacaaatgtgaaaaacatagaatataaaaaacaaccgtgatgggtctttcaacccttttttttgaatgaac

SEQ ID NO: 209430 - DNA, 2021 bp, Zea Mays
aaaactcctgaatgactttatgtgatccatacttgaacacagatgctggtacaatgtccccctttgagcatggcgaggtgtttgttcttgatgatggtggagaggttgacttggatttggggaattatgagcgtttcatagatgttactctgacaagggataacaacattaccactggaaagatataccagtctgtcattgagaaggagagaaggggtgattatcttggaaagactgtacaggttattcctcatgtcactgatgaaataaaacagtggatacagtcagtgtcttcggttcctgtggatgggcagactcgtccagctgatgtttgtgttattgaattgggaggcactgtaggtgatattgagtcgatgccattcattgaagctttgcgccaattatccttttctcttggcaaggaaaatttctgcctcatacacgttagccttgttccagtattgggtgtagttggtgagcagaaaactaaaccaacacaacatagtgtacgagaactgagagccttgggtctgactcctgatcttctagcatgccggtcagcacagccactaataggatctgttaaagagaagctttcacaattttgccatgtcccggtcgagaacatacttaacatccatgatgttccaaatttatggcatgtcccacttattcttagaaaccaaaaggctcatgaagctataatcaaacaactaaaccttgctagatctgctggaccacctgaattacgagattggacagatatggctgagtcgtatgacaacctcaataactctgttaaagttgctttggttgggaagtatactaatctgacagattcttacctatcagtggtgaaggctctcctacatgccagtgttgcctgttcgttaaagccatctatccagtggattgcagcttcggatcttgaagatgcaactgcaatatctgcaccagatgcccatgctgaagcctgggaaactcttaaaggttcatcatgcattttgatacctggaggatttggggatcgtggaatttcagggatgatattggctgcaaaatatgctcgtgagaatagagttccatatcttggtatttgcttgggcatgcagatatcagtgattgagatttccagacatgtcctgggcctggaagatgcagacagtgaggagtttaacaaggatacaccgaatcatgttgttatgtacatgcctgaggtttcaaaaacacatatgggaaacacgatgaggttgggctgcaggagaacattcttcagcaaacctgattgtcttacatcaaaattgtacggaagtcctccacatgtagatgagcgtcatcgtcatagatacgaggtcaatccctcttttgttcccatgcttgaaagtgctggtcttcattttgttggttgtgacgaaagtcgaaaccggatggagattgtggagctacaagatcatcccttctatgtaggtgttcagttccacccggagttcaaatcaaggcctcgaagaccttcacctccttttacaggtctaataatggcggccactaaacaactgggagcaaattcgaatagctcgaatggcttcgttggagcttctgactaatgtaagatggggatctcccgttgctgcagacacccaagttatttcttgtgcacattagatgtacaggaaaacaatctaagcctgaagcagagtgtttctctctctcgaccacctgagtggcgtaagctaacggtcttacagtgtattggggccgaaccgtcatggttttgttgactgtcatttcaattgagcttaacagcagtcagtgctcccatccttgtgattccaattgagattaacagtagtaagtgattatgatctctcttgccgtttgagtggaagtgaaagacactaccatccagtttttggttgttatttgttctgatttttttgtgtttgttttctatacaaatgtgaaaaacatagaatataaaaaacaaccgtgatgggtctttcaacccttttttttgaatgaac

SEQ ID NO: 209431 - DNA, 5662 bp, Zea Mays
gccgaatctcacaaatgcaggctggaatgctggattgtcaacctctggagcccacgctccaacagaagcctccacctctgcggtcatgagggtcatctaaccttttcacagctccagcgaatgcacacagccgccgtcgtttcttcgtcttcctctcagcgccggcgctcccactcgtgctccctcccccactcgcgctcggcacgcaggccacgcggcggcgctcaggctcgggatatcagcgacggcggggcggtcccaggcttgtcgtcttcgtcagcggctccccctcctgcctctcgccaatcgcctcgcgccctcgcctctggttctccgcacacagcccggcgaccctgcgtgcgcccctaccgcctccggtggaccatcgacggctcctggcccggcggctgcgctgcacgccgcgcgcggccggcgggcagcgggagctagcagccgctgctgcaccaaggcggtcgcgccgctttgggagcgcttttgccccaaagcgaagcattaccagtccgcttaacgcttcagcgcgctgaagcgtgcgtttagttccgctttttggaaccctgtgctgacttctctttcgaggatctagagcgcacaatgatattttgctagcgttatgctcttcaactcgccaaaatcagcaaaacgaataggagtacagttcctatcagttgcaagtgcagactgctttggtcgagatgtctctccgacgcactttgcatccctgttaaaggaatgcaggtctgtgaatacagttcgtcaaattcatcagaagataattgcttgcggccttctttcgtatccatcatctttgttgtctgtgccactcgcaccacttccatcacattcatatgtatcaccaaaatctttgggcaccggtgttgtagcttcctatcttgcttgtggtgctacgaaggatgctctctcagtgttggagcgtgtcacaccatcaccagccgtgtggtggaatctactcgtaagagaacacatcaaggaaggccaccttgatagagcaattggtgtatcttgtcgcatgctgcgtgctggaactaagccagaccattttactctgccgtatgcgctgaaagcatgtggagagctaccttcatactgttgtggaagagcattacatggactcatatgttgcaatggatttgagtcaaatgtctttgtctgcaatgcattggtggcaatgtattcccgctgtggttctttggaggatgccagtctggtgtttgatgaaataacacggaagggaattgatgatgttatctcatggaattcaattgttgctgcccatgttaagggtagtaatccgcggactgcattagagctgttttcagagatgtcaatgattgttcacgaaaaagctacaaatgaaaggtcagatatcattagcattgtcaacattcttcctgcatgtgcttctctaaaggcattgcctcaaattaaggaaatccacagctatgccattcggaatggcacatttgcagatgcttttgtgtgcaatgctctgattgatacctatgcaaagtgtgggtcaatgaacgatgcggtaaaggttttcaatgtaatggaattcaaggatgtcgtttcttggaatgcaatggttactggatacacccaaagtgggaactttggggcagccttcgagcttttcgagaatatgcgcaaggaaaatatcccactagatgtcataacgtggagtgctgtaattgcagggtatgctcagagggggtgtagccaagaggcccttgatgcattccagcaaatgattcttgatggttcagagccaaattctgtcactatcatctctctattgtctgcttgcgcttccttgggagcattgtctcagggcatggaaattcatgcatactctctgaagaagtgtcttttatccttggataatgattttggtggtgacggtgacggtgaggatctaatggtgtacaatgcattaatagatatgtactcaaagtgcagaagtttcaaagctgcacgctccatatttgattccatacctcgaagagaacgtaatgtggtgacttggaccgtcatgattggtggatatgcacaatatggagactcaaatgatgccctcaagattttctcagagatgatttcaaaaccatacgcagttgccccaaatgcttatacaatttcctgcattttgatggcctgtgcacatctggcagctcttcgtatgggtaagcagattcacgcttatgtcacccgtcaccatgaatatgaaccatctgtgtactttgtggcaaattgccttattgatatgtactcaaagtgtggtgatgttgatactgctagaaatgtatttgatagcatgcctaaaaggaatgaagtatcttggacttcaatgatgtcagggtatggaatgcatggtcgtggtaaggaggctttagacatatttgacaagatgcagaaggcaggctttgttcctgatgatatttccttcctggttcttctttatgcttgtagccattctggcatggtggatcaaggtctgaattactttgatatcatgcgcagggattatgatgtagttgccagtgcagagcattatgcttgtgttattgacttactggctcgctgtgggcgattagataaggcatggaaaacaattcaggaaatgccaatggagcctagtgcagttatctgggttgcattacttagtgcctgtagagttcattcgaatgtggaacttgctgaatatgctctgaacaaactggtcaatatgaaagcagagaatgatggatcctacacacttatctccaacatatatgctaatgcaaggcggtggaaagatgtagcaagaatcagacaattaatgaagaaatcagggattaagaagaggccaggatgcagctgggtccaaggtaagaagggtactgcatcattctttgttggagatcgatcacaccctctatctccagagatatattctcttttagagagattaattggccgcatcaaggttatgggttatgtccccgagacaaactttgcactgcatgatgttgatgacgaggagaaaaataatcttctcagtgaacacagcgagaagcttgctctcgcatatgggctcctcacgacttcccctggttgtcccatacggatcacaaagaaccttcgtgtttgcggtgattgtcatagtgcattcacctacatctccaagattgttgaccatgagatcattgtacgagattccagtcgcttccatcatttcaagaatggctcttgttcctgtggtggctattggtgataccttgttctgtgaaagcagcaggggtggattcaggccctgggccacctgggccatgacgtaaatgcctagggtttcagagatgaacagggcaactcatgagctgggcagcgggagacaagcggcgcgtgggagcgggagcgaggtgacgagcgggcggcacgggctgcaggccgacggccaacgggactcgggagcctagcccagagccacaagataacgcaggcgggagatactagcgcgtgcagcaaccaggtctagaagaaaggaagcccagctttatcctggagccaagaagccgaggtgagattgtggttggactggaagggagcgagggagcagccaggcatggaggagcctgttccggctgatccccaagattttcttgaagccaaggagatcaggttcagggatcagatatgagcaataataatcttgaggcagtgacactccttataatcttccttcgaatctccagagcttgtgagtcatttagttatgtttatatgtgtacttaactattcccatttatgttttaaaaatatttttgggggtcttacttacctgctatttagaaatcttgttgtaaataacttcatgtgggacagtaccttactccatcttccccttactgacttgtaagttcatccttaccacctactctatttacaagtttacgttcttaaaccaacatttagcaatctttgcagaaatgtcaaaaacaaccaattcaccggttgagtacctgataaactaaaggggatcgataatctccaataagtacctttactgcaacagttgtggtgacttttatttgacacactatgttttgtataaaaccggctcagggcttttttaaatcctagatccgccaccgtccgcaagggtgaagcagctgtccttcctaaggttatgccctttgttcctagttcttctctgctttagtttattatgtatgtctaaaggtatttctttttcaaatttagttgtcatcagctgtttgaggatttgttaaactgctggtcaaatttcttagctgtagaatggatgaaagggaggagagcgctcacatccggtcgaccggtcgttttggtggaacgggagcatttcaactatttatggtaaatttttatatggagactctagtagccgctccggtcctcttttattggaaaccaaacatccaaaaataggaatgtagtcacttcattctccttcactcctcaaccaaacacacccaaagccaggagccaggatctaattcaattggtgcatcatctattcatctagaatgtcatcccaagccaggcttctttgctttgtggtgactgccattgcaaagctagcaacatgccatattgagttgcttcgggaagcacgggtgtcattgggtaagtttgctcgttcccgaacctcagacaggagagtctggcaatgggcctgtgactatttagggctcatgaatgaaccagccatctgtttatcagtactgggaccgtccactgcccaaggtaatggtcctggtgttgtgcattggcgtggaggaggaacagcgatggtagttcacgttccttttttaccttttagcagagcaaaaaggtaaaaattctgcaagcacttctttagttaaatgtggaataagcatcctttcatattctttaagggagctgtatatatgcttacaatctgagcacagcgatgtgaaatatttgcactttgactgaggtactaaaactgaagtgtcatagcatcaaggggagacactagctaaacaaacctgttgtttgcttatgtaaaatatcatgcttgttttgtatctattggtagttcataatattatcttatatagaaaatgccaaagtttgtattgcaggtccaccgtttcatgattttcatttaccgacctcctcccaacaaaatgaagatcggttcagtctggcatgatttctctagcagaatgccttgtgcatatatatagcgaccttattttgtgatcgtagcgacgtagcatgctgaagatccaagctccttttcgagaaaaggtctggtctggacatccaagcagagagtcttgtacacatggttgactatttcagaggcacactcaggtgcacccgtgtttgtacatggagcgcctgattggctaattggatgagcgtcgcgtggctttacgctgcagctgctcgtgcagtctctgccttgtgtatataggaaccaaacactgtcatgcgtcataaagattaaagagctgttttgtatgaaatacatgctcagatgtgatacctggtgacgaaatctcagacatcgagttggcattgctaaggaatgaagccatattatattactcagcaagtcagcaggcatgcttat

SEQ ID NO: 209432 - DNA, 1178 bp, Zea Mays
gtcacgtacccaatatacacctataacgcactgcccctgttccccttcccactcaccggctccacggccacgccccaccttccacggccacggcggcgaggacgaacgggagtgcggcggcgaggctccggtttgagtacacaatgagaagaagcaacgcagtacataatgagaagaagcaacgaatatgaactgcagcatcagttagatgacagagggatggcccaaacactaccaagcactttaactagttgttgctgatgcatcgagctatctcatcatcgagccatgcactttgcctgttttagtgttttgtatgcgtactgattatgctgctcaaagcttacctcctgtttcgcttcagaatccatgtttagaactgacaggccctgcgcgtgctgtcatgatgtatggtcgtgtgatatttgaggcttcattgtatgtgaaaggtgctactagatctgatgacaaagaattgagccttctagctattacttcattggggaatttgtctgatgctcactcatccttgattgagtgttcttgcagtagcagacttagcacactggaactgatgcttggtaaaatcttacttactctgtggaagctacaattcacttgcgggacatggccagctgatggttttcgttgcatctttgtggccaatgctggcatagggacaatggattgtgttgcttgagactgcagatgatcgcgctggtgataagatcagccttgcacggcaggttgtttgtgttgactgtgatagagagctgaaggttgtggccagcattacgaatggttctgctacctatacagatgaaaagggcttcaaacctctgaaaatgggtgcaagctccaaggaacttgtatcggtggcttacgggacgtttggtttgaggaatcacttcatccaaaatatggtggtgcatcatgggtctattcctcaaatttggtggaatgaccccattcctcatattagtactaactaaataactataaggaatgaggtgatgatggatcaactcaatccattccacaaaccaaacaaaaaagtaaggagcgagaagacgatggactagatcattcctcaaaccaaacagcttattagggttggaagtcactgtttattggtcctgcttcccatttgcaccggtttagtttcgttgaaagtgctg

SEQ ID NO: 209433 - DNA, 3656 bp, Zea Mays
cagagatcgcggtaaagctagcgttgcggtgagggagactctgagacgacggcgtcggcgtgcgtgctccacgcaacggctcatggctctagggtttcctctccgcctacgcctatatagcggcactctctccccgcccacctgctcaccctctctcctctgatctccctggttcctacccactgccaaggaaaaaccaccaaccccagacccagccagaggcctctgcctcagcccgtcttcttcttcttctcccatggcttaccgcggcggcggcggccggggaggaggaggccgcgacggggaccagcagcgcccgccgcacgtccacggacgaggagccggggggcccggaggcggccgcaccttcgtctggcctccaccgccttcttccacgccgcggccggtgccgccgtaccaccaccaccaccaccaccaggtgcccatgggctaccgcgcgcccatagtgctgccgcaccaggccgcgtacggggtgccgatggccgtgtaccggggggcgccggcgcccgcgtacagggtgcccgcgccagcgtcccctcggcctcgcgtctccttctcgcctgcgcctccggcgtctccggtcactatcagggcgccgccgccatcaccgacgacgccgccagctgctcccaccactccggcgcctccacgccagcccgcgcccgcgcccgcgcccgagccggccccggccccgccccccgcgccgtcgctcgcggccctggcgaaggaggtcgagaagaagctcttcgtctccgagaccgcgctggcgccggccgcggcggcggcagcggcagcggcagcgcagggcacagctggtgccggcgctgacgacgcggcgtcggacgtcgacctggcgccggtctccaagaaggggctcgcgcacccggctcggccggccctcgccaccgtggggaggaatgtgtttgtccgcgcgaaccacttcctcgtccacgtcgccgacaacaacttgttccactatgatgtcgctattaatcccgagtcaaagtcaagagcaacgaacagggaagttctcaatgaactcatcaagttgcacgggaagacatctctgggcggcaaattgcctgcctatgatggcaggaagagtctctatactgctggttcacttccttttgaatcagaggagtttgtggttactcttgttgatcctgaaaagaaggagaaagaaagggtggagagagagtacaaaatcacaattcgaattgccgggagaacagatttctaccaccttcagcagtttctgcttggaagacagagggatatgcctcaggaaaccatacaagtacttgatgttgtcctcagggagtcgccgtcttggaattatgtcacagtgtccagatcctttttctctacaacttttggtcacagaggtgatatcggtgaggggcttgagtgttggaggggttactaccaaagcctgcgcccaacacaaatgggcctttcgctgaatatagatatttcagcaacatccttttttaagcctgtgacaattatcaaatttgtggaggagttcctgaacctgcgtgatacatctcggccgttgtttgacagagatcgtgtgaagataaagaaagcattgcgcggtgtccgaattgaaacaactcaccaacaggaccaaatcagaagatacaagataacagggattactcccatccctatgagccagctgatattccctgttgatgataaaggaacaagaaagactgtagtgcagtacttcttggacaaatatgactacagattgaagtatgtctcttggccttgccttcaggctggcagtgattcacgacctgtatatttgcctatggaggtttgcaagattgtagaagggcagagatactctaagaagcttaatgacagacaagtgacgaacatacttagagcaacttgtaaacgtccccaggagagagagaagagcatacgtgatatggttctgcataacaagtatgcagatgataagtttgctcaggagtttggcatcgaagttagcagtgatctagtgactgttccagcccgtgtgctgcctccacccctgttgaaatatcatgactctggtagggagaaaacttgtgcaccaagtgttggacaatggaacatgatcaataagaaaatgatcaatggtggaactattgataactggacttgtttgaacttttcacgcatgcgccctgatgaggtacaaaggttctgtatggatctgactcatatgtgcaatgccactggaatggttgtcaatccacgcccatttattgaagtccggtctgctgctcctaaccatatagagaatgctttgagagatgtacacaagagagccacccaaatacttgcccaacaagcagtgggaaatcagctccagcttttgattgtaattcttcctgaagttagtggttcttatggtaaaattaaaagagtctgtgagactgacattggaattgtatctcaatgttgcttgccaaagcatgctagcaggccaaacaagcaatatttggaaaatgttgcactcaaaatcaatgtcaaggttggtgggcgtaacacggttcttgagcgagccttttcacacgatggtataccttttgtctctgaagtcccaacaatcatctttggcgcagatgtcacacaccccccaccaggagaggactctgcatcatccattgctgctgtggtggcatcaatggactggcctgaaatcaccaagtacagaggtctggtttctgctcaaccacaccgacaagagataatagaagatttatttactgtcagtaaagatccacagatggggcacaacgttaatggtggcatgatcagggacggtgtaagtgaaggtcaattcagccatgttctccttcatgaaatggatgctatcagaaagaaaaggcatcacacaaggcttttccctgaggttcacggaaggcgtgatatgactgataaaagtggaaacattcttcctggaactgtggttgaccaaatgatttgccaccctactgagtttgatttctacttgtgtagtcatgctggcattcagggaacaagtcgcccgacccattaccatgtgctctatgatgagaacgaatttactgctgatgcactgcagtcactgaccaacaatctttgctacacctatgctcgttgcacccgtgctgtatcagtggtcccaccagcgtactacgcccaccttgccgcattccgcgcacgctactatgtggaaggagaaagctcagacggtggctcgacacctggcagcagcgggcagacagtagcccgtgaggggcctgtcgaggtgcgtcaacttcccaagatcaaggacaacgtgaaggacgttatgttctactgctgagctgctccaagtttagcattcaagctttcttattttcgtaacttatccttgatatggagctggttgctcttattttcgtctctcggtattcggagtagctaggctatgactggagcatggtcttgaaggcctaacactctgtttggatgaaatcaatgcaaatactctataattttttttgtatttgtgttctttctgttcgatcagttattatctaatctgctttgctgcttagtctggttgattgacaagttattttttttaagatgaagtatcttcccag

SEQ ID NO: 209434 - DNA, 3766 bp, Zea Mays
ggtaaagctagcgttgcggtgagggagactctgagacgacggcgtcggcgtgcgtgctccacgcaacggctcatggctctagggtttcctctccgcctacgcctatatagcggcactctctccccgcccacctgctcaccctctctcctctgatctccctggttcctacccactgccaaggaaaaaccaccaaccccagacccagccagaggcctctgcctcagcccgtcttcttcttcttctcccatggcttaccgcggcggcggcggccggggaggaggaggccgcgacggggaccagcagcgcccgccgcacgtccacggacgaggagccggggggcccggaggcggccgcaccttcgtctggcctccaccgccttcttccacgccgcggccggtgccgccgtaccaccaccaccaccaccaccaggtgcccatgggctaccgcgcgcccatagtgctgccgcaccaggccgcgtacggggtgccgatggccgtgtaccggggggcgccggcgcccgcgtacagggtgcccgcgccagcgtcccctcggcctcgcgtctccttctcgcctgcgcctccggcgtctccggtcactatcagggcgccgccgccatcaccgacgacgccgccagctgctcccaccactccggcgcctccacgccagcccgcgcccgcgcccgcgcccgagccggccccggccccgccccccgcgccgtcgctcgcggccctggcgaaggaggtcgagaagaagctcttcgtctccgagaccgcgctggcgccggccgcggcggcggcagcggcagcggcagcgcagggcacagctggtgccggcgctgacgacgcggcgtcggacgtcgacctggcgccggtctccaagaaggggctcgcgcacccggctcggccggccctcgccaccgtggggaggaatgtgtttgtccgcgcgaaccacttcctcgtccacgtcgccgacaacaacttgttccactatgatgtcgctattaatcccgagtcaaagtcaagagcaacgaacagggaagttctcaatgaactcatcaagttgcacgggaagacatctctgggcggcaaattgcctgcctatgatggcaggaagagtctctatactgctggttcacttccttttgaatcagaggagtttgtggttactcttgttgatcctgaaaagaaggagaaagaaagggtggagagagagtacaaaatcacaattcgaattgccgggagaacagatttctaccaccttcagcagtttctgcttggaagacagagggatatgcctcaggaaaccatacaagtacttgatgttgtcctcagggagtcgccgtcttggaattatgtcacagtgtccagatcctttttctctacaacttttggtcacagaggtgatatcggtgaggggcttgagtgttggaggggttactaccaaagcctgcgcccaacacaaatgggcctttcgctgaatatagatatttcagcaacatccttttttaagcctgtgacaattatcaaatttgtggaggagttcctgaacctgcgtgatacatctcggccgttgtttgacagagatcgtgtgaagataaagaaagcattgcgcggtgtccgaattgaaacaactcaccaacaggaccaaatcagaagatacaagataacagggattactcccatccctatgagccagctgatattccctgttgatgataaaggaacaagaaagactgtagtgcagtacttcttggacaaatatgactacagattgaagtatgtctcttggccttgccttcaggctggcagtgattcacgacctgtatatttgcctatggaggtttgcaagattgtagaagggcagagatactctaagaagcttaatgacagacaagtgacgaacatacttagagcaacttgtaaacgtccccaggagagagagaagagcatacgtgatatggttctgcataacaagtatgcagatgataagtttgctcaggagtttggcatcgaagttagcagtgatctagtgactgttccagcccgtgtgctgcctccacccctgttgaaatatcatgactctggtagggagaaaacttgtgcaccaagtgttggacaatggaacatgatcaataagaaaatgatcaatggtggaactattgataactggacttgtttgaacttttcacgcatgcgccctgatgaggtacaaaggttctgtatggatctgactcatatgtgcaatgccactggaatggttgtcaatccacgcccatttattgaagtccggtctgctgctcctaaccatatagagaatgctttgagagatgtacacaagagagccacccaaatacttgcccaacaagcagtgggaaatcagctccagcttttgattgtaattcttcctgaagttagtggttcttatggtaaaattaaaagagtctgtgagactgacattggaattgtatctcaatgttgcttgccaaagcatgctagcaggccaaacaagcaatatttggaaaatgttgcactcaaaatcaatgtcaaggttggtgggcgtaacacggttcttgagcgagccttttcacacgatggtataccttttgtctctgaagtcccaacaatcatctttggcgcagatgtcacacaccccccaccaggagaggactctgcatcatccattgctgctgtggtggcatcaatggactggcctgaaatcaccaagtacagaggtctggtttctgctcaaccacaccgacaagagataatagaagatttatttactgtcagtaaagatccacagatggggcacaacgttaatggtggcatgatcagggaactactgattgctttccgcaagaagacaaacagaaagcctgagaggataatattctatagggacggtgtaagtgaaggtcaattcagccatgttctccttcatgaaatggatgctatcagaaaggcttgtgcttctttggaggagggatatctacccccagtgacgtttgtggttgttcagaaaaggcatcacacaaggcttttccctgaggttcacggaaggcgtgatatgactgataaaagtggaaacattcttcctggaactgtggttgaccaaatgatttgccaccctactgagtttgatttctacttgtgtagtcatgctggcattcagggaacaagtcgcccgacccattaccatgtgctctatgatgagaacgaatttactgctgatgcactgcagtcactgaccaacaatctttgctacacctatgctcgttgcacccgtgctgtatcagtggtcccaccagcgtactacgcccaccttgccgcattccgcgcacgctactatgtggaaggagaaagctcagacggtggctcgacacctggcagcagcgggcagacagtagcccgtgaggggcctgtcgaggtgcgtcaacttcccaagatcaaggacaacgtgaaggacgttatgttctactgctgagctgctccaagtttagcattcaagctttcttattttcgtaacttatccttgatatggagctggttgctcttattttcgtctctcggtattcggagtagctaggctatgactggagcatggtcttgaaggcctaacactctgtttggatgaaatcaatgcaaatactctataattttttttgtatttgtgttctttctgttcgatcagttattatctaatctgctttgctgcttagtctggttgattgacaagttattttttttaagatgaagtatcttcccag

SEQ ID NO: 209435 - DNA, 2404 bp, Zea Mays
gtcaatccacccagaacttggcaatttccttcgcacttcactgtcgctattaatcccgagtcaaagtcaagagcaacgaacagggaagttctcaatgaactcatcaagttgcacgggaagacatctctgggcggcaaattgcctgcctatgatggcaggaagagtctctatactgctggttcacttccttttgaatcagaggagtttgtggttactcttgttgatcctgaaaagaaggagaaagaaagttatgtcacagtgtccagatcctttttctctacaacttttggtcacagaggtgatatcggtgaggggcttgagtgttggaggggttactaccaaagcctgcgcccaacacaaatgggcctttcgctgaatatagatatttcagcaacatccttttttaagcctgtgacaattatcaaatttgtggaggagttcctgaacctgcgtgatacatctcggccgttgtttgacagagatcgtgtgaagataaagaaagcattgcgcggtgtccgaattgaaacaactcaccaacaggaccaaatcagaagatacaagataacagggattactcccatccctatgagccagctgatattccctgttgatgataaaggaacaagaaagactgtagtgcagtacttcttggacaaatatgactacagattgaagtatgtctcttggccttgccttcaggctggcagtgattcacgacctgtatatttgcctatggaggtttgcaagattgtagaagggcagagatactctaagaagcttaatgacagacaagtgacgaacatacttagagcaacttgtaaacgtccccaggagagagagaagagcatacgtgatatggttctgcataacaagtatgcagatgataagtttgctcaggagtttggcatcgaagttagcagtgatctagtgactgttccagcccgtgtgctgcctccacccctgttgaaatatcatgactctggtagggagaaaacttgtgcaccaagtgttggacaatggaacatgatcaataagaaaatgatcaatggtggaactattgataactggacttgtttgaacttttcacgcatgcgccctgatgaggtacaaaggttctgtatggatctgactcatatgtgcaatgccactggaatggttgtcaatccacgcccatttattgaagtccggtctgctgctcctaaccatatagagaatgctttgagagatgtacacaagagagccacccaaatacttgcccaacaagcagtgggaaatcagctccagcttttgattgtaattcttcctgaagttagtggttcttatggtaaaattaaaagagtctgtgagactgacattggaattgtatctcaatgttgcttgccaaagcatgctagcaggccaaacaagcaatatttggaaaatgttgcactcaaaatcaatgtcaaggtggtggcatcaatggactggcctgaaatcaccaagtacagaggtctggtttctgctcaaccacaccgacaagagataatagaagatttatttactgtcagtaaagatccacagatggggcacaacgttaatggtggcatgatcagggacggtgtaagtgaaggtcaattcagccatgttctccttcatgaaatggatgctatcagaaagaaaaggcatcacacaaggcttttccctgaggttcacggaaggcgtgatatgactgataaaagtggaaacattcttcctggaactgtggttgaccaaatgatttgccaccctactgagtttgatttctacttgtgtagtcatgctggcattcagggaacaagtcgcccgacccattaccatgtgctctatgatgagaacgaatttactgctgatgcactgcagtcactgaccaacaatctttgctacacctatgctcgttgcacccgtgctgtatcagtggtcccaccagcgtactacgcccaccttgccgcattccgcgcacgctactatgtggaaggagaaagctcagacggtggctcgacacctggcagcagcgggcagacagtagcccgtgaggggcctgtcgaggtgcgtcaacttcccaagatcaaggacaacgtgaaggacgttatgttctactgctgagctgctccaagtttagcattcaagctttcttattttcgtaacttatccttgatatggagctggttgctcttattttcgtctctcggtattcggagtagctaggctatgactggagcatggtcttgaaggcctaacactctgtttggatgaaatcaatgcaaatactctataattttttttgtatttgtgttctttctgttcgatcagttattatctaatctgctttgctgcttagtctggttgattgacaagttattttttttaagatgaagtatcttcccag

SEQ ID NO: 209436 - DNA, 961 bp, Zea Mays
aagctgcctcccctcccccctatggtgttgtctgtgtagcagcaaagccaaaaaaacaacactgctcctccaaagaccttttccaccctcactctctctctctcctctcccctctcctcgccctctctctctctctcaaattcattcctagctgtacccacatctctctcccccggcccttttgttttgtttattcacaactctcctccgtcctcgctctcatctggtccgcactccggaggagtgatttacctccccctccggcctccaatcttatatagagatgcctcaattccattgccccattcccatcgcagactgatctagcgagaaggagaggcacacaagtgacggcagtgccgtgcgcgcggcgccacccccaccacaccatgttgagttcttgcgcgccaacgacggcctttccgcccccagaggcgggggccgccgcgccaccggagccgttccggtctctgcagatcgccacgaccaccagcgccgccggggccaagaagaagcggcgtcccgccggcactcctgaccccgacgcggaggtggtgtcgctgtcgccgcggacgctgctggagtcggaccggtacgtgtgcgagatctgcgggcaggggttccagcgcgaccagaacctgcagatgcaccggcggcggcacaaggtgccgtggaagctgctgaagcgggaggccggggaggcggcgcggaagcgcgtgttcgtgtgcccggagccgagctgcctgcaccacgacccctcgcacgcgctgggcgacctcgtcggcatcaagaagcacttccgccgcaagcacagcggccaccgccagtgggcctgcgcccgctgctccaaggcctacgccgtccactccgactacaaggcccacctcaagacctgcggcacccgcggccacacctgcgactgcggccgcgtcttctcccgagatttggcagaagaatgagg

SEQ ID NO: 209437 - DNA, 2080 bp, Zea Mays
cgccagcgctggctgcctgtatcagtggtggagagctttatcgagcaccaggacacgtgcaacgccggccggacgcgggccgagacgtcgtcgtccccggctagtggtggtggctacggcggcggcaccggcgccgggttctgcgtggccgcagctgcctccacgtcccagcaacgtcacctgcatgccgccgccgccgcggcggcggcgttgtctcggacggcgtctagtgcgagcccatcaagcggcggcgagtttggggtgagccagcaggtcgcctgctggcctggtccggcgatggcgagccccacggccgccgcgacgttccacaggttcgaccaggctctgtcgcctccgacgccgcacgagcgtcctggaggcatccacaacctggagctccagctcatgccgccgcgcggcagcgccgccagctactacgagggggctgcaggtgcagctcctgcagctgccgtcaggtgctgcgcctcgccgcattattcgcctgctgtacatgttccgcagccgggcgccgacccgatgcggctgcagctgtcgatcgggttcggcggcggcgacggcgagacgtcggcgccggcagcggcggcgaggctgaaggaggaggcccgggagcagctgcggctggcgatggcggagaaggcggcggccgacgacgcccgggcgcaggcgcggcggcaggcggagctggccgagcaggagctggcggccgcccggcgcatgcggcagcaggcgcaggcggagctgggccgcgcgcacgcgctccgggaccacgccgtgcggcaggtggacgccacgctgctgcaggtcacctgctacagctgccgctgcaagttccgggcgcgtgtgactggcggcggcgccatgagctccgaggtggccagctacgtctcctccgttgtcacggccgagggcggcgacgccgaggtggacgacgacgacccgtaccgccaccaccggcagctcaccgccgacgacgacgcgccgagccacgctaggatgatggacatcaactagcggccggccggcgcccggccatctcgtactcgtacgtcatgcatgcaacatttctttccctcctcctccttcctccccagctcgcccatgcatgcactcctttctggctagcaggcatggacgagaggccgtgatggatggatcgtggatgtgcgatgtggtagcagctgcttggtggtggtctctgactagatgtggtgatagtgcagagtgctagtctagactctcacggccggcggccggcggggagtcatgcttgagcgcaaaagtgaagctagtagctaattacgacgtgcatggaatctttcgcttgtttgcttgctgttggactttcttacaataacatttgttcgatcgatccggactcagcaggagcattccggctgcagctggtgctgtcgaaaccgagaaagaatgcatgcatggcagctcttgtcacttcttgtcatcgtttcagctaaactaacatctcgatagatgcagttaggctacaagcctacaacagttttgctactgtgctaccggttttacgatttgtttttctggttacactatggcagcagggaagagggattggagttgggtagtaggggtaaaaggcatatatagttgacatgagaaggcatattttaagtgttaacgacaatgcatctccggggcattcacgatagtattgcatgtttttgtgtgcgttggggagtctatgtagcatctccaacaacgcgacctagaaaaatatcatataatttaaaaggagtatattttataaaatttagggcaccaacaaaacatcccgctccaacagtaaagtctcaaatctagattataggacaacccagtatatttgaggcacttaataggctgctctataattttttgaccaaattttatgaaatgaggcactgttggagtatttttttccctacgtatttcagtttgatgcactgatttgaggcattgttgaagatgctcttatagttatagaacattgcaagacaaggtgatttctcactaattttgcacaaggggaaaattcatgacatctgac

SEQ ID NO: 209438 - DNA, 1917 bp, Zea Mays
tctggctgcgccgttacgttagatgctctgctctcagtcgtaatgtcacagggacgcacagagagagaaacagtcgaaccaagcttctgacgataaaagctcacacacaagcttccctctgtcgcagagacacgcaccgatctagagagaggagccaatgctgttgtgcttcgagccttgtgttgcgcatcggttgtagcgtcgtcgacgacctaacaagctcgttctgtcgcatcgggattcattcctcacgcgtgatcccgccagacgaaggaacagcaggggaaacacgatgacccttccatctcatagaagagaatcagatctggagatcaatggggcttcgcaagatacagtcggcgcaaagaaaactgcatgcaagacgacgcagcggcaaatattgcgatctgaaatagaaaaattgaagaaccgcgtccgagcattcaccggagcattcgtagttatgatttcccccgtgctccttgccatcgtgctcaagaaagtcagcttgactggcaccggcgggaggtatcaggggaggatacgactacgagcgctggaagcattcgtcgacctcgtccaaagaaggttcgcccacctcgcagccgtgactctgcagatgggcataatgcccttcctgtgcgtgatggtcgcggaagcgtgcgccagcttgccgccgctcagctacgtcgccccaaggctggtggccgcgtgcagagtgctggtgttcctctccaacttgctgctcatggccctgggctgcgggatcctcctcctcttccacagcaacgccctgctagtgctcactatctgctccgccatggcgctcggtgtcgctgccgtgcaaattcggtacctctgccgcggcgtcgccgatgccggggccgccgacgacgcggaggcggaggagtaccacagcaagctggagcagttgcttgagctgtcggccgggatgaccgtcatgatgttcctggtgctggaattcgtggcactggagagcctgctgaggaacactcgtcaggggcaggctgtcaaaagagggcagacgttcctcggcgtcgccttgctcgtcagcttcatggccagcacgctgggcgtctcgctcatgaacgtatggaccacgccccacgtcatcagcggctgcgtcgtcttgaccgccgagttcatgagggtcctgaatttctccttccatgctctgccgatcgccgcggtggtggtcttgatcacgctggatgtgcttccgcacgcgtggaagctggcagtgtggctgccgttcttccctctggtcatagtgctcctggtgctgctggcgcggtacagccgtgaggcgatgaaacagcaggagccagcagcaagaggaagagggaagcaaggaccagaagcaacgggcagcagcacagcatcggatccatcgtcatcaggtgaaaagaagcctgatgatccaaagccggcctcgttggagttgaccaaggtggcattcacgggcttcttggccgtggcagtacccagcgtcaccagtgcttctttctgcgtcccgtctgcattctttgtgttattcagtgcagcgaccgttctcctgggcctcttgtggaggctcctcacgcacgaggcggaaccaccttcgtgtgtcctccaagctgccaatcatgcttccttctccgcgcacatgtccattttcttggccgggattgcattctgggtcatggctgcctttgctcttcattaatgctcgacgtcatcctttcacagtttaacatcgtattcacggtctgctgtaccgtacgctttttttaatggtgtaacggagaatgtggaacagcctaccaatcgagcgcaaaattctttaattatttgtattttccatacaactttgttcttactatcatcaattgattagaagtcggcaatctcgtggac

SEQ ID NO: 209439 - DNA, 751 bp, Zea Mays
tgaacaaaaggaggtacaggagttggtttctaaaacaacaggtgaccgatatcaaacgattcaacaacatgatgagtgaccatggcatctattcgagggagaggcttctggttccgatcagcaacccagaaatccttcttggcagcacctgctacatcgagatggaccataacgctaagagagaggttgcaatcttttaccccgagggacgcccaggtggcaaaactgactctgtggcaagcattgtctctgcggagaggagaaacaaaaggattctcgagtcggtgaggcggagcctgcacgtcgatgatggcactgctgcgtactacttatctgttactgagggtgatccgagggctgccatgacggagtactccgaggacctgaggtgggagcagcaacgcgcaggtcggtagattcatatatattccaatggcatatgttaagatcatggtgcttgatccttatcatttggtgtatatattgtacaatctggatggttgtaagtataaatacaaactttggtctaatgaatatagatgcatgtacatgataacaattgccaaatggcatcggtgctgagaacaaaaatcgcgccgggtgataattggctggtgaaaagtattacatgacattcgtgaacctgcttgtttgtaagtaacattgtttgttgttgctaaattccttgcggaatactcgattatgctgccgatttttagtttctgtatttaataatttaaagataaaaata

SEQ ID NO: 209440 - DNA, 1950 bp, Zea Mays
gattatattgttgcctcaagctgggtccgcccgtcttcttcttcctcctcagctaatttccattattccgttccaatttccaaccgcacccaggagcaagtctgggttcgcgccacagttggagtttcgacgggtctcggtcgggggtggtgccttcgtcgcggccgttcgacctacaccatggaatcgccgcagcagcaagccccaccgccgagccagggagctagctctggaagctgcgacgctcctctgcagctagcagctcgatatggtgccaccgtaccacgtacatcctcgccacctgcctcagtcactcggccggaagtcaacaatagaatggagctaaagagcagcaacagtgagacactatgtgacagcttgacgctaaatacggtatccgtgatgctaaccgtcagcttcttcagagaagacggggacggtggtactgacgtgtttcttggcttctcatgcgtgctcggtttcatcattcgcaagtatctgtgggtgctgcgctccgagagcgcccggttcacgggtctggatatctacacgaacacggtcgttctagtggtcaccgcatatgcaatgctgctcgcgaacagtttgcagtacatcatccttgctcccttcccgatcagtgtggctgccttcatcgcttacctgtacaaggaaagactggagcaccatggcagtagtggagctgatcagcaggataataaggacggatgcaaacctggggacggcaatggcaagaaagccggggagctcgaaatggtggtagcgccgtactctatgctgctgatcagtgcaatagtgatgccgtacgaagatagccctgtcctcctgtctcacttcctgctcttctcatgttgcgcgctcgggacgctggcgctgctctactccagactggcggaagcaagtccggccttgagaccagcgttggagtgcatccagatggcctacatggtgacgctgttcataacggtgcacacggtggccgcagaatggctgggagacgtcatggcgctggtcaccatgccggagttgatcgcagggcttgtctggttctgtaatcttctccacggcgacactgcttgtaatactgcagcagtagcccacattctcagatcagatgaaggttccagcagtagttcggatgcaactcatcatcaagtcccaacaaattcggaaacaagacaagggttcgtcttcgatgggtccatgttcactcccctcggagctgttttggcagggttagtaacatccactttcgcacatgacgaagaactcctggccagctggaacaccaaggcgaccgtcgcctgcagcattgcagggtgtttgccatatctcagcatatggatggtgtcgaggtggcccgggcgcatacctagctcagacaaggcgactcggctgctcaagtttgctgcaaatgtgtgcttgactggagcttttctgatgctgtttgccttgcttgatgaaaaggcactggcctatcgtctctttggtttggatgagattattgatcctagtcaactcaaatatcttccggctgttcacttcagtacagcggtagccctgtatttctttcggaagcatcttgctggtgcgttggcaaatttaggggaggagctagggaatctcctatccctccttattgctgcttctccaacagagaagcaggggagaaagagaaggaggaagaagaagacaaaaagtatagatgtgagaagacgtcgataatgaagagcagctatagatgagcttcgttctaacatgagtccggcctctgttttaactgttttgttgctgagtgtaaaagcactccggctaagcgaccatgcaaaaaaggtgtaaaatcggacattgattgctctgagatggatggacgtttgtaaattgtaatccccgtccaattgtatgtttatggcattctttgtagatgttatg

SEQ ID NO: 209441 - DNA, 1358 bp, Zea Mays
gcgagaggattggttgccggccgaggagatgttcttcccttgtgtacgagaggattccttgtccacatttgatagcagagcagcactgcaatgatcgcgcacgtccctgtccggagagtccagaccagccctatcgccgccggagccgcacgcagccacaggaagctgatggccgcgccgaaaagcagtccaatcagccagccattcaattcaatacaagtggcctgaatcgaaaacaggacaggcgcgcacctctggagactggactcatccgttcgggtcgtcatgaaaagccagtccacgccactgccacaaactccgacgccgacggcggccccaggaggaggaggaggaggacatgagcagcccgtggctccgggcggccggctcgccgcgctcctgccaaggactacaacgtgaccgtcgtgtactacctgacgcactacctggtggacctcgtgacggagccgcacaccggccggcgcgtcctcaagctggacgccatcgaccaggcccgcgactggctcgccgccgacgtgctcgtcttcgactcctggcactggtggccgcgcaccggcgccacgcagccctgggactacatccaggtgggcgacacggtggtgaaggacatggaccgcacgcaggccttcgccaaggcgctgcacacctgggccaggtgggtcgacgccaaccttgtccagaccgacaccaaggtcttcttccaggggatctcgccttcccactacaggggccaggactggggcgcgtcgccgaagaagacgtgcatgggggagacgcggccgctcaacgccacggggccctacccgggcggcccgatcccgcagcaggcgatcctgcgcggcgtgctggcggccatggccaagcccgtctacctgctcgacttcacctacctctcgcagctgcgcaaggacgcgcaccccaccaagtacgacggcggcatcttcggcggcgactgcacgcactggtgcgtcgccggcctccccgacacctggaacgtcctcttctacgccgcgctcaccgccgggcaggggcacaactgatggatgagtactacgttttttctttctttcctttttctttttaccgacacgcagtgttacgtagctcaataagtaaaggaaaagaaaaagatagcagattgatttcgtatagttacgagggggccttcaaaagatttttcaacctaaatgagttgatagaagaatatcaaaagagaatattgtaattcattcccgaattcagttggcatttttcctgggggtgctggcatttaatttcctgaattcaattgcaaatttatccagttttcttggatggctcattttcgttcaaacgaa

SEQ ID NO: 209442 - DNA, 1397 bp, Zea Mays
gaccggtgattggagcacgcaaagtaatccacgattcggtcccaacggaggaactcacaagacatcgttctacatctcaaggcgacccttctcagcacggtcatatgatttgcagcattgcataattttcctctcgaccattacaattgcagcagtgcgtattttgtcccttcaattctaaccattcattcgacggcctgacaggttgcgatgaatgcggatgagctagataatgaaacgaaacatcgtggttctgtccaagggcaccgagtacttcaacgagatagacatgctggacatcagaggttgtatcaagattatttttcagagaatcctacgtatggacataatttgtttcgtcgaagaaaaggaacgctgctggtattcttggcctatctagtctgcaaaaaattaccgcggcatttcgaatgttatcttatggagtagcagctgatgctactgatgattatgttcgcattggtgagagtactgcaattgagagtctacgaaggtttgttagtgctgttgttgaggtttttggagaagaatatttgagatcacctaatgaagacgatattgcaagattactggccatcggagacagtagaggttttcctggtatgcttggttcaattgattgtatgcattggaagtggaaaaattgtccttcagcttggcaaggtatgtataccgggcacgtgcatgagcctacaattatacttgaagctgttgcggataaagatctttggatttggcatgcattttttgggatgcctggttcccacaatgacatcaatgttttgcatcgatcctctttgtttgcacgcctagcagaaggtgaagctccaaatgtgaattatacaattaataacaatgattacacgatgggttattatcttgctgatggcatctatccatcgtgggctacttttgtcaagaccattccagaaccacaaggcaataagaagaaatatttcgctattgcacaagaagcttgcagaaaggatgtggaacgagcgtttggagttctgcaagctcgattcgcaatcgttcggggtccagctcggttttgggatgaagacactctcggactaatcatgagagcttgtatcattatgcataatatgatcgtcgaggatgagcgagatgacgaacatgatataatttacgaaggcgtaggagaaaaggtaaatttgtcgcatgaagggacaccagaacttgaggaatttattcaaaactacaagaatataaaggataaagaaattcacactcagcttcaagctgacatcattgagcacttgtggcaacatcatccagacctttacaaatgattttatatattttactattattatttggttcttgtaacaattgtgactcatgattacaaagttatt

SEQ ID NO: 209443 - DNA, 918 bp, Zea Mays
atcgggccttagacacagaccatggtcacaccgcagactgctacacgggccgtcgttcggtgctcctcctagtcctagcctcagccagcgctcctcctagcctcggcttgccgcagcctgcatcacggatcccctcccatcacggatcgacgctccccatcacggatcccgctgggcgctgggcgctccccatcacggatcagcctgcatcacggatcccgctgggcgctggcctcggcttcacggatccactgccagcggcctagctccccatcccgtcgtggctggcgagcagaggcgtcgccggctcccctgccagcggcctagctccccatccctccctggctggcgagcagatgcgtcgtcggctcccctgccagctcccccgccatctctacgccagaggcccagagtcgtggcaagcagagcgcgattgaacgcctgtcaccagcacgactgaacgtccgccgccctacaacagcaacagcatcctcctgtaactggattgtggctgctccgttgctgtttgactcagtgaagttcagcttgaaggacagagaactgacaccggtgatattacaaaacacgattgagtggagatggatttaaggatatctgagggttctggtactaataccaccttggatgaccaatcgatacaatcgccgaccagaagggcaaaggtttgggagtattttctacaagagttagttgaggttgatggagtgatgaaggctgtttgcaaatactgtggggcgaagctgacaagtaaaaggaattcaggaacaaatagccttagaaaccatgttgcggatacatgtcctaaaattccagttgaggaccgcaagcaattcattgctacaatgagaaaaaggacaggagaaggttcatttgtgtttgaccctcgaaagactcgtg

SEQ ID NO: 209444 - DNA, 675 bp, Zea Mays
ctgccaccatctatgcttcagcgcttccttttgtggagattcctttagtttctgttggtgacgatggtaaattatttactgttggaggcaatgacggaaaaaacaaatttgaattggtaaacagagaaaagaggaaactgacacttggcgacattccattgtcccttacatgtgcacttcataaaggatctatactaacggacccaacttctgaagaagaatcaattatagagacctatgtgactgttgtcgttgattcttcagaccgcctagtgtcattacaaaaagttggaggcacagtgacatccatggcaactattaaggagtgcattagcttggcgaaagaaaggaggctgaggctaagagaaattctgatagactctgtcaaagccatggaagtcgaccatactgaataattctgcaaatacattcagttaatctaaccggattatttcttgatggttctctgtgcctcggctgcactgattgtaacagcatttttgttgggttagtccaagtatgtagctatttgtactccgcacatgatttttgacttaagtagccagacaattttatctgatgagcatgtctgcaatgcaccatttctcgcaagttgctatcttgtaacaccctaattcacattttgcagtattttaatttatttttcaagatttc

SEQ ID NO: 209445 - DNA, 1207 bp, Zea Mays
ccgccccctgccctgccattcaaactgtcatcttcttccagctctgtcgtcgtcgtccagtcatggggagagagagaaaagctagctagtagctagctaccctctgtctctgtgtccgccatgcccagcccaacagggtgttgctgctcagtgctcaggggcaacacccaagtcagttcttgagctcatggacgtgaaggatctcaccctggctcatgtcaagtctcacttgcagatgtacaggaccgtgaagaacaccgaaaggccggcagcttcgtcagatctagctgatgggttcgagaacgggtcggcaggcgagatctgcgacgacaactcgctcgatctgcacggcgccggcaggccagagtcgggggcggcgcggcatggaagggaagactggaccggctttcccagcgagtccaacaccgggcgcatgagcatgcattctcgatctctcaaggatcagacgatgcagtccaagagcctggagatcctctcggacatgaactcctcctgcgtgtcggagacgacgtcgtgtgccagcgagttgaacctggagttcaccctaggcccacgcatcaggcactagcgtgcaaagcgaccagaggacgatataatcggaggaggattagctataggctactatataagacggggtgctttgcattgcgtgcgtgcgtgttcatgggatcgtgttaagacggaggatgcactcatggtcccagagagagagaggcagcatatatgcatctttcatcgttaaaagaagctaggccatggacagacaccagcagcagcagcagccaggaaaaaggattaaaggtgtagcatcagcagcagctagctctagggtagtggtagtagtagtggtagagtgaggtgatcgttcgaaagctagctaaacacagatgcaatgtgtgtaatggatggagttgttgtgttagatcgagcgcgtttgcgtttaggatcggaccatctgtttaaagggcttttttcgcagcaacaatgcatgcatatgagcttgcatttgctaggggccgcaggagtacgtgcaaaggaaaaaagggcgggggtgacctgtgttgttgctttctcctgcatcagtcacatgcccttgagcgctccatttgcattttgagctcagcttttctttgtcgtgatgggataaggcgatcaccaaacccttgcaatatatgcttatttgaag

SEQ ID NO: 209446 - DNA, 2415 bp, Zea Mays
aacgcaacgccgatcgtgcgcctcctccctcaccgcgcgccgccgtcgctgccatcggttcctttcaaccggtggatcaccccgctttccataaccgtttatccttggttgtgctcagcgtctggttccgccattggtcccatggctgccccgcgcgccgcggcggcgtcggcgaagcaggtgacgaggcagaactttgcggaggccgtgctggagctgagggcccacctggaggcatgcgactacgtggccgtggcggcgcagaagaccggtgccccgacgggatggcgccgcgcgttgccggtggacactgcggaaacggcgtatctcaaggccaagctcgccgcagagtcctttcagccactccagatcgccgtctgccccttcaggcagcgcaactcttacccgtctaccctcgtcgcctacccgtacaattttcacttatttcctagagatgaactacagctcggaatgccttcatacagtttctcttgtcaaccatgttatttatcaactatagctaatgatggttttgatttcaatatgtgcatatatgatggtatttcttatctatcaagggttcaagaatccttagcaagggaaaagatctttactcctcgtcctcaccaattgttgtcatcaccaaacacatcagttgctgactcagttttcatgaatagaataaagtctaggatagtgaactggcgaaaaagatatgctgacccaagtaaaaaacatgatggctctttggttagttcccttagcagattaatattgggtgctgaaacgtatggttccaggcccagtatgagtattgatgtctgcagtgatcggcaagttcaattggtcttggaggcagtaaacccatatctctgatgaccttgtatctctcgttccacacaaagctggagttggtagggctgtgcgtgtgatctttactaattcgaaagaggataagaatcttctcctgatggatatccagaaattagaagatgaacaaaactttaaattccgtgggtttcgagaagttattgatctactatcatcttcacagaagccaatcatatcatacagttgcttgaatgatctgacaatgctgcacaccaaattcattgcacctcttccgccaaacatgcatgaatttatgtgttctctaaaaatggtcttccctaatgttgttgatatcagccacctgtggaggcaaattggccctttgagaaaagcgaagaatatacaagccgctctcagttacttacaaagacagtactttgtgccaattgaaatagaaataccacagcaagatggtacaagcagtataacaaaaaatgagcaaaatgttctgagaataacaaagttatttgctaaactaagcaatttactgaaaatcagtcctgagtgccaactgcaatctcgtgaacagtgcactgcagttgaagagtattgtaacatcttctatccaagttgtgtggtcggaggttctgacgatgctaactttgcttttgagtcagacaccacagaaactgtgagcactgataacatcatcttcttgtggggctttagggaaaaatctgtgaaggagttaaaatcgtaccttattggcttacatcaagccttttcagaggattttgaggtcaagttgttggataagacatgctcagcttttgatattccgtgattctaatactgcaatgcagttactaaaagaaataggctcagaaggcccctcactaaacagattcttctcagaaggtctgaaagctgcaggttttgaagtgtacaaaaaggtctgcaggttaggactttgggattcagatttagctgaggtcctcgaggatgtttcatctgagctaggtgttccgacacttcctgagtgcagcacctctcagatatactggaatagtgaattaatgctggatctgaaggagtatctggaatgatagaacattatatagcccttaatatatttttaccaggttctaagattaatgagagctcccctcaagaagcagtagcaggccacagcaggcacctccatgttcaaagatgattattgctttattatgatgttacatgactggcttgaatgtcatcattttggagtgtctgacctatatgcttctcgtgctttgtgcagcccgaatagtagcaatgatattctggcatcagtccggcttaaatgaacagtatgtatgtacgagggcagtgaggtacccttgtgacgaccacggagatatagagagtttgtattgtattcttcatctgtgttgggctttggttagctaagtcattagcagtaatctcgtgtatttgggcctaggtttagcccggcccaaacgttttcgtataaagagtctgtaatagggaggatttgaacagaatagaaaatacagaaagaaaaggcagttgaacctccat

SEQ ID NO: 209447 - DNA, 2701 bp, Zea Mays
cggctcggcgactccgaacgcaacgccgatcgtgcgcctcctccctcaccgcgcgccgccgtcgctgccatcggttcctttcaaccggtggatcaccccgctttccataaccgtttatccttggttgtgctcagcgtctggttccgccattggtcccatggctgccccgcgcgccgcggcggcgtcggcgaagcaggtgacgaggcagaactttgcggaggccgtgctggagctgagggcccacctggaggcatgcgactacgtggccgtggcggcgcagaagaccggtgccccgacgggatggcgccgcgcgttgccggtggacactgcggaaacggcgtatctcaaggccaagctcgccgcagagtcctttcagccactccagatcgccgtctgccccttcaggcagcgcaactcttacccgtctaccctcgtcgcctacccgtacaattttcacttatttcctagagatgaactacagctcggaatgccttcatacagtttctcttgtcaaccatgttatttatcaactatagctaatgatggttttgatttcaatatgtgcatatatgatggtatttcttatctatcaagggttcaagaatccttagcaagggaaaagatctttactcctcgtcctcaccaattgttgtcatcaccaaacacatcagttgctgactcagttttcatgaatagaataaagtctaggatagtgaactggcgaaaaagatatgctgacccaagtaaaaaacatgatggtagtaatactttgagttttgacaaatgcttacagctcaccgcccttgcatttcactttgatggctcttagtcttcttattgtgcaggctctttggttagttcccttagcagattaatattgggtgctgaaacgtatggttccaggcccagtatgagtattgatgtctgcagtgatcggcaagttcaattggtcttggaggtgtgattgtacaacacaagtttgatgttttctctagttaaggaagaaatggttttgtacttaaggaagcaaaatatgagtccctagctcaggttctttggtgcggttatcaatcctgcaaagagttgaatgatcaaaatttcatgtcatgcttttaatatgaagatgtagttgaaataagctgcattgctgaaaaattgtttgctccaaatgtcgcttttgaattacctcttctttacagatgaaatggtaatcccactctactggtttaaccatttgagttattctgcaggcagtaaacccatatctctgatgaccttgtatctctcgttccacacaaagctggagttggtagggctgtgcgtgtgatctttactaattcgaaagaggataagaatcttctcctgatggatatccagaaattagaagatgaacaaaactttaaattccgtgggtttcgagaagttattgatctactatcatcttcacagaagccaatcatatcatacagttgcttgaatgatctgacaatgctgcacaccaaattcattgcacctcttccgccaaacatgcatgaatttatgtgttctctaaaaatggtcttccctaatgttgttgatatcagccacctgtggaggcaaattggccctttgagaaaagcgaagaatatacaagccgctctcagttacttacaaagacagtactttgtgccaattgaaatagaaataccacagcaagatggtacaagcagtataacaaaaaatgagcaaaatgttctgagaataacaaagttatttgctaaactaagcaatttactgaaaatcagtcctgagtgccaactgcaatctcgtgaacagtgcactgcagttgaagagtattgtaacatcttctatccaagttgtgtggtcggaggttctgacgatgctaactttgcttttgagtcagacaccacagaaactgtgagcactgataacatcatcttcttgtggggctttagggaaaaatctgtgaaggagttaaaatcgtaccttattggcttacatcaagccttttcagaggattttgaggtcaagttgttggataagacatgctcagcttttgatattccgtgattctaatactgcaatgcagttactaaaagaaataggctcagaaggcccctcactaaacagattcttctcagaaggtctgaaagctgcaggttttgaagtgtacaaaaaggtctgcaggttaggactttgggattcagatttagctgaggtcctcgaggatgtttcatctgagctaggtgttccgacacttcctgagtgcagcacctctcagatatactggaatagtgaattaatgctggatctgaaggagtatctggaatgatagaacattatatagcccttaatatatttttaccaggttctaagattaatgagagctcccctcaagaagcagtagcaggccacagcagcccgaatagtagcaatgatattctggcatcagtccggcttaaatgaacagtatgtatgtacgagggcagtgaggtacccttgtgacgaccacggagatatagagagtttgtattgtattcttcatctgtgttgggctttggttagctaagtcattagcagtaatctcgtgtatttgggcctaggtttagcccggcccaaacgttttcgtataaagagtctgtaatagggaggatttgaacagaatagaaaatacagaaagaaaaggcagttgaacctccat

SEQ ID NO: 209448 - DNA, 2443 bp, Zea Mays
gaccatcttcctgtactcatggatcctaacttaggactcggaagacagctgttgtccctgatgctaaggtcatatctgaacaccaggcggtcagggttggcattgtcttctgtggcagacaatccccaggaggccacaatgttgtttgggggctctatgaggctatcaaggcccacaaccaaaacagcaaactcattggtttccttggtggatcagatggtctgctagcacagagaaccttggagatcactgataaagttattgcttcatataaaaatcaaggtggatatgacatgcttggtcgaacaaaggatcagattaggacgacagagcaggtcaatggtgctatggctagttgccaagctttgaagttggatgctctggttatcattggaggtgtcacttccaacactgatgctgctcaacttgccgagacatttgctgaggcaaagtgtgcaacaaaggttgtaggtgttcctgtaactttaaatggggaccttaagaaccagtttgttgagacaaccgttggctttgacaccatatgcaaggtgaacgcacaacttatcagcaatgtatgcactgatgctctatctgctgagaagtattactactttattcgcctgatgggacgcaaggcttctcatgtggcattggaatgtgctcttcaatcacatccaaacatggttatcctaggagaggaggtggctgcttccaaacttacaatttttgatattacgaagcagatttgtgatgcagttcaggcaagggctgaaaaagacaagaaccatggggttattcttattcctgagggccttgtggagagtattcctgaactatatgctctgcttcaggaaatccatggcctccatggcaaaggtgtttctgttgagaatatctcttctcagctttcaccttgggcatctgcactctttgagtttttgcccccttttatcaggaagcagctactactacatcctgaatctgatgattcagctcaactttcccagattgagactgaaaagctgctagcccagttagttgagactgagatgaacagacgtttgaaggagggcacttacaaaggaaagaagtttaatgcaatctgtcacttctttggctaccaagctaggggagcactgccttcaaagtttgattgcgattatgcctacgttttggggcatgtgtgctaccacatcatagctgccggattgaacagttacatggctacggtgacaaatcttaagaatccagtgaacaagtggcgatgcggcgcgactcctatttcgtctatgatgactgtgaagcgatggtcgcgtggcccttcagccacccaaattggaaagcccgctgttcacatggctagcgttgacttgaaaggaaaagcatacgatgtgttgagacagaattcttccagctttttgttggaagatgtctacagaaacccaggcccgctccagtttgaaggaccaggtgccgattcaaagcctatttcattgtgcgttgaggatcaagactatatgggcagaataaaaaagttgcaggaatacttggagaaggtgaagaggattgtgaagcctgggtgctcgcaggatgttcttaaagcggcgctgagtgccatgtcttctgtgacggaaacactgaacatcatgacttcatcttctaccggccagactccactgagtcattaggtaccatttcatgccttttggagagttctatcggttttggattcggtagtttatgaaggcttgttgatgagtttgagctcgaatagcttttgaaacagccggatgatgccatctttaataaaccaaattctgtgactgcattcacatttctgtcagtcacctgagtgagaaaatgtgataaatcactcagggaagctatgaagaatatgtcaattggagctatcaaaccaaaagaagatgaatatgaggtgcaagatatcagcatgccttttttatcaaatgtatcatgagaaagatgttgatgctcaagcaatggtacaagccaaagatgttgatgctccaaaatctttttaccaagtggttgagaaaagaaattcatcactactacaatcacatccacaagatctcatcattgggaatccttcaaaaggggttatttcttgttcaaaaaatgctttatttattgaacatcactgctttatttcttgtgttcttgtatagatgaggtgctacaggatccagactggtgaatgttatgcatgaagaattaaacaacttcatctagaatcaagtctagacccttgagaagcctctacacgatgcaagagtcattggaacaaagtgggtgtttagaaacaaacaaaatggtcaagaggtaattgtgcggaacaaggcaaggctagttgtaaaggagttctctcaaattgaatgcttggactttggagagacctttgcaccggttgctcgacttgaag

SEQ ID NO: 209449 - DNA, 2796 bp, Zea Mays
gagagctcatggcgtgagcgaggggttgcaggcagcgctcgcctccgcccttctggtataaaagcctctcacgccgcacccacatttctcacatcacagtgcgggcggcgggcgccactctcacacctaccaggaaaccaatcaaaacttaaaaccaatcgaaattagaccggcgacgaggattagcgctcgccggcgatggattctgactacggcgtgcctcgcgagctctcggaggtgcagaagaagcgcacgctctaccagcccgagctgcccccctgcctccagggtggagtatggtgatgctgcaattgcagctgacccggcaggtgctcatgtgatcagccatgcattccctcatacctatgggcagcctattgctcattttctcaggaagacagctgttgtccctgatgctaaggtcatatctgaacaccaggcggtcagggttggcattgtcttctgtggcagacaatccccaggaggccacaatgttgtttgggggctctatgaggctatcaaggcccacaaccaaaacagcaaactcattggtttccttggtggatcagatggtctgctagcacagagaaccttggagatcactgataaagttattgcttcatataaaaatcaaggtggatatgacatgcttggtcgaacaaaggatcagattaggacgacagagcaggtcaatggtgctatggctagttgccaagctttgaagttggatgctctggttatcattggaggtgtcacttccaacactgatgctgctcaacttgccgagacatttgctgaggcaaagtgtgcaacaaaggttgtaggtgttcctgtaactttaaatggggaccttaagaaccagtttgttgagacaaccgttggctttgacaccatatgcaaggtgaacgcacaacttatcagcaatgtatgcactgatgctctatctgctgagaagtattactactttattcgcctgatgggacgcaaggcttctcatgtggcattggaatgtgctcttcaatcacatccaaacatggttatcctaggagaggaggtggctgcttccaaacttacaatttttgatattacgaagcagatttgtgatgcagttcaggcaagggctgaaaaagacaagaaccatggggttattcttattcctgagggccttgtggagagtattcctgaactatatgctctgcttcaggaaatccatggcctccatggcaaaggtgtttctgttgagaatatctcttctcagctttcaccttgggcatctgcactctttgagtttttgcccccttttatcaggaagcagctactactacatcctgaatctgatgattcagctcaactttcccagattgagactgaaaagctgctagcccagttagttgagactgagatgaacagacgtttgaaggagggcacttacaaaggaaagaagtttaatgcaatctgtcacttctttggctaccaagctaggggagcactgccttcaaagtttgattgcgattatgcctacgttttggggcatgtgtgctaccacatcatagctgccggattgaacagttacatggctacggtgacaaatcttaagaatccagtgaacaagtggcgatgcggcgcgactcctatttcgtctatgatgactgtgaagcgatggtcgcgtggcccttcagccacccaaattggaaagcccgctgttcacatggctagcgttgacttgaaaggaaaagcatacgatgtgttgagacagaattcttccagctttttgttggaagatgtctacagaaacccaggcccgctccagtttgaaggaccaggtgccgattcaaagcctatttcattgtgcgttgaggatcaagactatatgggcagaataaaaaagttgcaggaatacttggagaaggtgaagaggattgtgaagcctgggtgctcgcaggatgttcttaaagcggcgctgagtgccatgtcttctgtgacggaaacactgaacatcatgacttcatcttctaccggccagactccactgagtcattaggtaccatttcatgccttttggagagttctatcggttttggattcggtagtttatgaaggcttgttgatgagtttgagctcgaatagcttttgaaacagccggatgatgccatctttaataaaccaaattctgtgactgcattcacatttctgtcagtcacctgagtgagaaaatgtgataaatcactcagggaagctatgaagaatatgtcaattggagctatcaaaccaaaagaagatgaatatgaggtgcaagatatcagcatgccttttttatcaaatgtatcatgagaaagatgttgatgctcaagcaatggtacaagccaaagatgttgatgctccaaaatctttttaccaagtggttgagaaaagaaattcatcactactacaatcacatccacaagatctcatcattgggaatccttcaaaaggggttatttcttgttcaaaaaatgctttatttattgaacatcactgctttatttcttgtgttcttgtatagatgaggtgctacaggatccagactggtgaatgttatgcatgaagaattaaacaacttcatctagaatcaagtctagacccttgagaagcctctacacgatgcaagagtcattggaacaaagtgggtgtttagaaacaaacaaaatggtcaagaggtaattgtgcggaacaaggcaaggctagttgtaaaggagttctctcaaattgaatgcttggactttggagagacctttgcaccggttgctcgacttgaag

SEQ ID NO: 209450 - DNA, 2904 bp, Zea Mays
gagagctcatggcgtgagcgaggggttgcaggcagcgctcgcctccgcccttctggtataaaagcctctcacgccgcacccacatttctcacatcacagtgcgggcggcgggcgccactctcacacctaccaggaaaccaatcaaaacttaaaaccaatcgaaattagaccggcgacgaggattagcgctcgccggcgatggattctgactacggcgtgcctcgcgagctctcggaggtgcagaagaagcgcacgctctaccagcccgagctgcccccctgcctccaggaagacagctgttgtccctgatgctaaggtcatatctgaacaccaggcggtcagggttggcattgtcttctgtggcagacaatccccaggaggccacaatgttgtttgggggctctatgaggctatcaaggcccacaaccaaaacagcaaactcattggtttccttggtggatcagatggtctgctagcacagagaaccttggagatcactgataaagttattgcttcatataaaaatcaaggtggatatgacatgcttggtcgaacaaaggatcagattaggacgacagagcaggtcaatggtgctatggctagttgccaagctttgaagttggatgctctggttatcattggaggtgtcacttccaacactgatgctgctcaacttgccgagacatttgctgaggcaaagtgtgcaacaaaggttgtaggtgttcctgtaactttaaatggggaccttaagaaccagtttgttgagacaaccgttggctttgacaccatatgcaaggtgaacgcacaacttatcagcaatgtatgcactgatgctctatctgctgagaagtattactactttattcgcctgatgggacgcaaggcttctcatgtggcattggaatgtgctcttcaatcacatccaaacatggttatcctaggagaggaggtggctgcttccaaacttacaatttttgatattacgaagcagatttgtgatgcagttcaggcaagggctgaaaaagacaagaaccatggggttattcttattcctgagggccttgtggagagtattcctgaactatatgctctgcttcaggaaatccatggcctccatggcaaaggtgtttctgttgagaatatctcttctcagctttcaccttgggcatctgcactctttgagtttttgcccccttttatcaggaagcagctactactacatcctgaatctgatgattcagctcaactttcccagattgagactgaaaagctgctagcccagttagttgagactgagatgaacagacgtttgaaggagggcacttacaaaggaaagaagtttaatgcaatctgtcacttctttggctaccaagctaggggagcactgccttcaaagtttgattgcgattatgcctacgcaagtccctcaccagctcatttaataaagcatattgattgttgttggtttaacacgtgggttgttggttttaggttttggggcatgtgtgctaccacatcatagctgccggattgaacagttacatggctacggtgacaaatcttaagaatccagtgaacaagtggcgatgcggcgcgactcctatttcgtctatgatgactgtgaagcgatggtcgcgtggcccttcagccacccaaattggaaagcccgctgttcacatggctagcgttgacttgaaaggaaaagcatacgatgtgttgagacagaattcttccagctttttgttggaagatgtctacagaaacccaggcccgctccagtttgaaggaccaggtgccgattcaaagcctatttcattgtgcgttgaggatcaagactatatgggcagaataaaaaagttgcaggaatacttggagaaggtgaagaggattgtgaagcctgggtgctcgcaggatgttcttaaagcggcgctgagtgccatgtcttctgtgacggaaacactgaacatcatgacttcatcttctaccggccagactccactgagtcattaggtaccatttcatggtatggatcataatccccacttttttcagtggtggcgattaacgagtttaggaacagcaaccctggtatcatacgggttattcttttgtagccttttggagagttctatcggttttggattcggtagtttatgaaggcttgttgatgagtttgagctcgaatagcttttgaaacagccggatgatgccatctttaataaaccaaattctgtgactgcattcacatttctgtcagtcacctgagtgagaaaatgtgagtctcagcaatctcttcatctgaaattgtttgcttgttgctttttgcatggaggcttcaagcgatttgatcgttggtctgagcttaatctctttcatggcgtactacatgtcatagtgtaaaattaggtatttatagtgtgcttcttttgggaaataagctagtttatcttctcacccacttttttgttttgtttgtcgaatggaatgagttggtccatcatcacctcattcctcatagttagttatagggtatttggtttgaggaataagttagtccaccattttcatacttctcacttttttgtttggttttgtggaatgaaataagttgatccagcaccacctcatttttattaggatgtttggtttgaggaatgagctagtccatcatcttctcacacatttttgtttggtttgtagaatgtgatgagttgatccatcatcacctcgtcccttatagttaattagttaatactaatatgaggaatggagcaatcccactaaatttgaggaatagattcatgatacatcacattattttggatggagtgatttctcaaaccaaacatccctatagttagttagtactaacatggggaatgaggtcattccaccaaatttgag

SEQ ID NO: 209451 - DNA, 1252 bp, Zea Mays
cgtgcagactgcagaggctcacggggacggagagcgacgggcgcctctccttcgatttgagtcccattcaggaagagtgcttgcataggttgcagaaccggatagaggtgcagtatgatggttcaaatctagagcatcagaaagcactggtggccctttggcatgcttcttttcctggaactgaacttctaggattagtatcagaccagtggaaggagatgggatggcaagggaaagatccatctacagatttcaggggtggtggttttatatctttggagaatttactgtatttctctaagaaatatccaaaatccttccatgagctccttcgtaagcagaatggtgatagagcattgtgggaatacccctttgctgtagctggtgtaaatattacattcatgctaattcagatgcttgatcttcaagcagctaagccaacgtcattggttggagcagttttcctaaatctactcttagaaaatgatcgagcgtttgacattctttactgcataaccttcaaactgatggatcagaaatggcttgaaatgcacgccagttacatggatttcaatgtggttattaaatctacacggcgccagctcgagagggagctgttgctagaagacatccagaggatccaggacatgccatcatacatgcttctcacctgctagcaattgaacttggtcatacctaacattgcagcaaggtagtgcatctccatacactcgaagaagttgcgacgttggaaccacgtataccgagctcagtatggggggcgtgggcgatctaggttcatggactgtggatgtgctgctttaaattgtcgtgtttacctacttgacaacgaccttaacaccgaatgccttttcgtttggacgatgcgctgcatcttggagctaactttcgttgtaaacaggactacaggaggatcgtggaaacttgtctgaatatgatttgtagccatgtgtatgcataatcttgccgctttactgaaaaaaggcagattaaggctaattatagccttatagtcatttgagttgggctgggtaccttgtgtggggcccataacgaacacagacatgccttatttatttcggcctaatagcctattgggttggttggtcctgattagcttgggatcggagtaaaatagttgaaacatcactgcagtgcatactgttgcagatccgggattcaaatctacctatggcgaagctctcaaaatctgagattaatgtaatgtaat

SEQ ID NO: 209452 - DNA, 1790 bp, Zea Mays
cacaccacgatctgagcaaaaggctctttaaagggcctgtcatgtccagacctcccgtctgggccaccccatagaccataccaagctcaagcttgtccaccacttcctttctttagacagaaatcttcctcggcatctcccattctcactcactcacctactcatgccccccaataccactttgacccaccccatcgatcaattgatcaccaccacaacccacaccccgcacggtcgatctatcttgttatatgcgtgcatggaggggagcagcagccagctgctggagacctgccttcctgctagcctctacgcggttactcctcctccatgcgcccatcctcatccccttcttgccccgctgccgaaccagcagcacatgcttctgcagatgccgtttgtcaaggagcaggctgcgaataatcatggcctgatgctctcttcggaccaccaccaccacagcggcctcctgtacccgctgcttcttcccggcatccctttctgcccctccgtcgccgccgcctgcgagaagactaccaccaccggctccggggcgctcgatgccggcgaggcgggcaccagctcggcggcggcgaaagccaccggcgagatcgctagtaccgccgccaccgcatgcaacagcccaagttcctgcaattggtacgtacgtatgacgattatggcctcacaccataactcacttgttgcttcttgcgcgcttgggagttgctgggagcaatagtggagtacgtagtgtggttgaccgattgttagggtttctagtgcgcggcgcggggctcgttcgttcgcgctgatgatctgattgggaacacatctacatctgttgatatgatgagctgagcacgcaggtggaagggcccggcggcggcagcagcgggggagaaaggaggacggatgaaggtgaggaggaagatgagggaaccgaggttctgcttccagacaaggagcgacgtggatgtgctggacgacggctacaagtggagaaagtacggccagaaggttgtcaagaacagcctccatccaaggagctactaccggtgcacccacagcaactgccgcgtgaagaagcgagtggagaggctatcggaggactgccgcatggtgatgaccacctatgagggtcgccacacgcactccccctgcagcgacgacgccgacgccggcggcggcgatcacactggcagctgcgctttcacgtcgctctagagaccgatgcatagctttgtgcatctgaacgaacctgctagcacctagcagcgcagtgctttagagacgatcgatcgatgcaccaatatatccatgcatgcaagtttgtagaaagtaaatcaatcaaatggatcagcacggtacgcgtgcctgcttaaagcctgacatctgccatgcatgaaggcacagaaagcgaggccaggccaccatgctggcttgctgctgtagctgtagcctgtaggcagtacacacattggtaatcacctggttaattgtacaaagaaggcagctcgttgttcatcgtgcgtgcagctgctaatgattgcgaaactgcaccatagcagtttctgcgagcctgcaggcaaacgaacctgagcttgcagacaaactaagcagtgtttggttgaaaagacaggtagaacggagtcgttctgtcttagttttgttgttgtttggttataaagtaactagaacggagtgactccaattagataatattcttttcagatccggaaccatccaactccaaaaaaatcaacgggacggagccgctccgttcccag

SEQ ID NO: 209453 - DNA, 1738 bp, Zea Mays
cacagatatcgctcggaggcccgcgggtacgcagaccaccacggcgccgttacttatacgctcccctttcgcccacgatgaaataccgagacgaaatcctcaagccccaaccccaaccccaaacccaaacctctctcggaagttcctctcgcgtggccggtttcctcaacctccgtgtcggctcaatagtttcgcgagcgggcggggcgggggtctgagctcgatggccacttctggcgagcaatcggctggcggtgggtaaagccatcttcagatgtcagcaagagcatgtgtttagacctttctgtgaaggataagtctgtcaagcctccacggaggcactcaatacaaactaagccaggagctagcccaaggccaataccttctggaactgtgactccggtgtctggggttcggtcaaagagatcggacggccaggggaggtttgatactccgacatcagaagtgtccatgtccatgtcaaggcgcaagttcagcacgctttcttcaatctcgtactggatgacacagatcaggcttgcagaggctgcttccaaacactcagtttctctgggcttctttaagcttgctcttgaatcagaatgtgagcctttggaccggatgagggaagaactcaagtcctatgtagtccgccattgcttagcgacagaattggaggacccagtcaaggacattcttcaggtttatgatattgtggacgattttgagaagctgaagatctctgcagagccctcagagcaacaaaaaaagtctgaaaaggctgctcgtaatgtctccaatgtgtcagccaattgtaatctgaagccaaggtcactaaactctggtgctactgaaagtaaggaagctgggaagaaagagggcattcagaaagcgaaacctgatgcaagggtcagaggctccaataacaggaatccagtaaaatgcaccaccgcaaaggaagtagttgctaagaacactggtaagaaaaccaagaaagaggccaagggtcaggaggaagttagcaatggagatagcgatgcatcctcagcccttccagatcaggaatctgttgatgttgtgaaggagatcacccatgaagataaagagaacatggacgagaatgaaatggctatggatgttgccatagcgcaagaattctagaacagccggaccagcttcagattcaatcgttttttattgctgaagatgaagtattagtgtgtggttgcttattttggttttcatcattgttaatatgatagtagagcttgtctgtgtgattgctgaaccatatacgctcctgaagagtgtgtcataagttgatgattgcctgtattcctttttcaagtttgcagctttgcatgtggtaatcgtgcatctgaatatagtcggatttatcttttctcgcgattcgaaccgacagaagatcctccctggtatttgtgttgtgttaatcgcgtcaagagttgttgtacgagatgttgagggatgccaggctggtgagctcaccgaggatcgagatgctgccgcagaggccattgctcgcgaggctgagtgactgcagctgcgtcagaccggacatctcgtcaggcagctcgccgacggacctgttcgagctcaggtccaggctgatgcccaggttcgacagcgcgccgatctccggcggtatggggccggagaagctgttgttgctcaggtccagcattgtcagcttcttcaggttccgaatcgacttggg

SEQ ID NO: 209454 - DNA, 4793 bp, Zea Mays
cgccgtccgcgcctgcggcttccgcagtccgcacagctgacagcagtccattcgccgtccgcgcctccggtctccggacagcagtgagcgttagcaacaccttcattttggcgcgtcctccgccactggcgcgagcgcgtggcgacagcagctgagcggcggtgccagcgtgagcaaccgagcaggcgcgggcagccgagcgaggcagcagctgctgcgctaatggcacggccgttctcgtcgctggtggactcctcgtatcgccgcaggatcatcgagtgcaaagcggcggcttactccttgcggctcccttcctgcgctaggccgcccgcacgcccccgtttcgctgccagctccgacaacactccagcgcatggaattgatagtagcatcattaccattcagactatgacgcggtgggagaccctgaatcacatggcttacaaatttgggagccttggctcaaatgcattcacaagcaatgtcagtgttgaagcatcttgctgtgacgggcttctcctgcactgctatttttacctccctcttgcggaccatttcacgttttgatcccaccaaccatgtcgtttttgaactccttgtcaaagcatatgtcaaggaaagaaaagtgctagatgcagctgtggcagttctctttatggatgattgcggctttaaggcttcacctgtttcttgcaataccatcctcaatgctcttgttgaggaaggggaatcaaagcatgtttggttgttcttgagagagagtttggcccgtaagtttcctttgggtgttaccacttgcaatattcttctgaattccctatgcaccaatggagaatttagaaaggctgaagatatgcttcagaagatgaagagctgtcacatatctaattctgtcacatataatacaatcctacattggtatgttaagaagggaagatttaaggctgccctgtgtgttctagaagatatggagagggatagtgtacaggcagatgtatatacatacaacatcatgatagataaattatgtagaataaagaggagtacacgtgctttccttttgctcaaaagaatgaggaaagatgacttaacacctgatgaatgtacctacaatactttgattaatggtttttttcgtgaaggtaagataaatcatgctcgctatgtcttcaatcatatgctgagacaaaatttggttccaagtgtagctacttacactacaatgattgatgggtattgccgaaacaggagaattgataaggccctaagtattctatcggaaatgcaaattactggtgtcatgccaagtgaactaacttatagtgctttgttgaatggttactgcaaagtttccatgctgggacctgctatatatcttatggaagatctgaaatcaagaggtataaccatcaataagacgatgcgtactattctcattgatgggttctgtcaagtgggtgagatttccaaggctaaacaaattttgaagagtatgtttgaggatggaattgatccagatgtcatcacttattcagcattgatcaatggtatgtgcaggatggctaagatgcatgaaacaaaagaaattttgtcaaggatgcagaaaagtggaattttacctaatgatgtcctatatacaactctgatttgttactattgtaaggcagggtatgtcaaggaagcactaaagcattttgtggacatttatcgaagggggctagttgccaatccagttatccataatgcattattacatgctttctatagagagggaatgattacagaggctgaacacttcagacaatacatgtctaggatgaatatatcatttgattctgtctcctttaaccgcataattgatagttattgccacagaggtaacatagttggggcattttcagtttatgatgatatggttagatatggctattctccaaatgtttgcacatatcagaatttgcttagaggattatgtcaaggaggccacttggtacaagcaaggcaatttatgtcctgtcttcttgacataccttttgctattgatgagaaaactttcaatgcactacttcttgggatttgcagatatggaaccctagatgaagctttggatctatgcgagaaaatgataaaaaacaactgtttacctgatatccatacctacaccattcttctcagtggtttttgcaggaaaggtaagattttgcctgcgttagtcatcttgcagatgatgttggagaaaggagtagtccctgatactgttgcgtatacctgcttgctgaatgggttgatcaatgaaggccaagtgaaagctgcttcttacgttttccatgagatcatatgcaaggaaggcctgtatgcagattgtattgcctataattcgttgatgaatgggtacctcaagagtcgaaatgtgaataccataaaaaggatgatgtctgatatgtatcagaatgaggtttatccaaactctgctagctataacatacttatgcatgggtatgtcaagaggggacaattttcaaagtcattatatctgtacaaatatatggtgaggaaaggaatcaggccagacaatgttacatatcgtttgctcattcttgggctttctgagtgtgggttgattgacattgcagttaagtttttggagaagatggtcttagaaggcattttccctgatcggttagttttcgatatattgattacagctttcagtgagaaatccaagatgcataatgcactacaagttttcaattgtatgaagtggttacatatgtcacccagcagtaaaacttttagtgccatgataaatggattgatcagaaaaggttacttggaccatagtcacaaagttttacatgagatgttacaagtagggcttcaaccaaaccatacacactatattgcattggtcaatgcaaaatgtcgggttggtgagattgatagagcgtttaggctaaaagaagaaatgaaagctattggcattgtgcctgctgaagttgcggagagttcaattattcgaggactttgtagatgtggaaaacttgaggaggcagtcatagttttcagtagtatgatgcgttcaggaatggtgccaactgttgctaccttcactactctaatgcacagtctttgcaaagaatccaagattgctgatgctttgcacttgaagaggctgatggagttgtgtagattgagggttgatgttgtcagttataatgttttaattactggtttatgcaaagacaaacatatctctgacgcactagatctttatggagagatgaaatctaagggtctttggccgaatattactacctatatcacactcactggagctatgtattcaacagggagagtgcagaatggagaggaactactggaggatatagaagaaaggggacttattccggcatataagcagcctgaaaatcttgaaagacggatggaggatgcaattattaggctgaacatgataagaaactgcagaaaggaagtgccttttagaggggttgagctactacctctagaccctaaacccgtgtgtagtgctgctagtgattgtaaccccactgaaactcggcaacacaaaggaatttgagcatttgaccaatatggttggtacaaaactattggtatcttttctgagtagtgcttgtgatgccttacattgttgtgttcctccactgagggatccatggatccatctctagatatgttgaatatgtgattttccttaaaaagctaattcagaaatacaaaattacctagggaggaagaggaccctcacatatttcagtggatcctgggggcaggtaaaaagggattatgagtgctgatgcgtgatgttaggtatgatatgcataagttacagcaggcattcgaagcataggaacaaagcaacggctggcattgagtctggcagtggaggcaacaaaggatactggtatcagtgcttgcagctacatcttcagacaactgatgttcttgaagacgaagatttatatgcaaacctgggtgcctccacaaaagtctaaacccttatacatcttgttatatttcctctccaaatgatgctgtggtgttcagacctcacaaaggctgcaggcttggcgtagagatggatttctaagaaaagaaaaaaaatggtgcttcctgcttacaatttattagttatcaaccacaaacactgtgagcttttgcagacagaaattgccttatttatatttacagaaacagatcacactggttgcaacctgcactgcatgatgaaaatgatgtctacgagagaaggggggaaacagaagaagaatctgaagatttagtgaaaccaaaacagaaaggtacataaggtctgatagagattgagaatccaaacctggtgaaattaaagaatataaaggtcaaggacattgatgtggtaatgtattgtggaatcctgttttacaacttcaaccattgattccagtgaagctaatgccatggaatggaattctcaccacgtttgctggctgtacgagtacacaaatctgatgaatggattcagctaaaatgtcatagaatggacccggaatttatgctctttttttgtgctctctcagcatgtgctagctggttaagtactagcattgctattgggcgctattttgtatgcttgttctgctgtcttttggatgtaaacgaacaagtttgcatgcttgttctgctattggataagaagtattagcattgctatttgcatgcttgttctgctggttaagaagttaagaagtattagcatgtgacttgtggagatg

SEQ ID NO: 209455 - DNA, 5763 bp, Zea Mays
gtccctggagcggtacaaagcccgctatgtgctccggggcttcacccagcgccccggggttgactatgacgagaccttcagtccggtggtcaagcctgccaccgtctggactgttctggctctgtccagggactggtcagtccaccaactcgacgtggcgaacgccttcctccacggcaccctgacggagacggtctactgcactcaacccgttgggtttgtcgaccctgctcaccccgacatggtctgcaagctcaacaagtccctctacggcctcaagcaggccccccgggcttggtatagtcgcttcgccactttcttgtgttcgcagggtttcgtcgaggccaagtcggacacgtccctgttcatcctccgtcgcggtccggacactgcgtacctcctctacgtcggtgatatcgtgctcaccgcctcctcccctgggctcctgcgtcacatcatctcctgcctccagcaggagtttgcgatgaaggacctcggggccctccaccacttcctaggggtcaccgtcgagcgcaggccccagggcatgttccttcaccaacggcagtacaccgtcgacctcctcaagcgcgctggcatggtcgagtgcaagccatgcgtgaccccagtggacacccagggcaaggtctctgccgcaggcacccccgtcgctgatccgaccggctaccgcagccttgctggggccctgcagtacctcatcttcacccggcccaacatcgcttacgccgtccagcaagtgtgccttcacatgcacgaccctcgggagccgcacctcaccgcgctaaagcgcgtcctgcggtacttgcgtggcaccatcgactttgggctcctccgccgctccccgaccacggagcttcgcgtctacaccgatgccgactgggcaggctgtccagacacgggccggtccacctcgggctatgccgtcttcctaggggacagcctcgtctcctggtcatcgaagcgccagccgatcgtctcccgctccagcgccaaggccgagtaccgtgccgtggcaaacgacgtggctgaggcgacttggctccgtcagctgcttcaagagctccacagtccgctagcacggagcaccctcgtcttctgcgacaacgtcaacgccgtccacctctccaccaaccctgtccaacactagcacacgaagcatgtcgagatcgatcttcactttgtccgcgagagggtcgcctgtggagatgttcgcgtcctccacgtcccgaccgcctcccagttcgccgacgtcttcaccaaagggcttccgtccgcggtgtttgcagagtttcggtccagtctcaacatctgcagtggctagagtttcgactgcgggggggtgttacagatatatgtatatgggcctggcccattaggacaccagtactgtagccgcactgtagctagggtttactagtactgtaactgcagccgcactgtagctagggtttctgtaacaacagacattctcacattgactacaaactttgataatatattttctcaaatttaaagcaccctaatcatgaggtctatatgaccaattggctgcatctaagctattagacaaactaatgatgcatcattctgactcggactattaatgttttaaaaacatggtgagaacaaaaccaactaagagtgtacctgagcataagtagtagaagtatagtgcatctggctcttaggggaatgaacaaactattacctgatctcatctggaccacggttcaccatcctgttgagaacccatttctcgctcatcaccgagaacgaaatttcgacgaaaaccgtccaaaaaacactaatcctgagcaatttgcaattttcaattttgaaatcatcttttttcatttttcttgctgaaaaccaccgcttcccgattggttttcgctaaaaaacaaccgagaaaccgattttcaattttttcgaccgacttacgtttcaaattcaaataaaatagtttatcggatttctcggcgagataccgctgtttttaccgattttcgctgtttgtttaccgttttttcaaataatttttttgattttttgaattttgaatgattaaaaaaaaaccgctggaaaactgttatcggtctggtccagtaacgggaaaccggactggttttcgccggttttcgagatgttttgtaatccgtggtctggacacatggcaagcatttatcagtaggcaattagatctgctatcagcaataaatagatctgattccctgtgttcctgctatagtaacatttttccaatgtctgtacccttcgatattgttgtaccagtgaggcaatgtgggcaaaccttgtggcttgtgccctcccacctgctatctggtggcattaccgaaagtagaactgctgtcatattatttataagtgattgtttattcttgcaggcatcaaaatgcgcaacattctactcaacatttttatgatcacttagtgcccttatgtcattaatgagttagtatctttttttttctcgaaaaaacgcaggaggactgcgttttagatatatattaagaagagagagacaaaggtctaagagaccaaaaaaacaacaacaacgcactccctatggaggccagtaacactcgtacatgaaaggatccataaaaacacccacacacactccttacaacaacctatgcagggggcagccaagaaggagagccctttggctccagcaatttcccagcctcttctttcctcatctgcatgctccataatcaaaggaaggctgggagaccctccataaaaaatgactctattacgatgcttccaaatcatccacgaccctaaaatgatgagggagtcaagaccttccctgaccagaccatttactgtctctgaaaccatctcccaccaatccataaaggaaactgcatctggctgtggggctaaactatgcagcccgaactttcttagtaggttgtaccagaaaatccttgagaagacacaattcacaagcaagtggttcagagtttccccttgctggtcacataaaggacatctgatagggtgattcaatccccttcttaccaagcgatcagctgtccaacatctattttgggccaccaaccaaatgaaaaaacaacattttggtggagcccaagatctccaaacccttttatagtgcccaaaggtggtagacccaaggaaaagacccatataagctgactttgcagagtatctaccattcgaatataagctgaaaatatgtctatcctcagtgttaggctgcagcacaaaatctgcgagaatattccagaggtgtagataatctacaatggcaccaactgtaagagcccctttgatgtctgcaatccatcgtctgttcaatagggcctgctgcacagttcttctgttaataattctttttggaataatgctgaataatcttggagcaatatcagatacccttttgccatggatccatttatctatccagaacatggtgttggtcccattccccacctcagagatcaacaccttggagaaggaatgggccgtgctaggaatttgaatggacaggctagaccatgggcgtcttgggtcagttttttgcaaccaaagccatcgcatgtggagggcccaacagagcttaggaaggccgtgtgttggcccaagagatctaaagcccgctgctatgcattcgggcgcgtgtgtcgtggcccgacggcctgggtgggcgcgccgtgtgtgcggtggcccgacgggcacgccgtgtgtcggcggtccggttccaagttccaacagccctttgagtgtgctgcttgagttggcaatacagaggaatgaggagataccggccttggtctatgaggccaggccggtggatccccgccatggccgaaattggcgttgtggatggggaagggatgcaagatttggatgccagttgcacggttgaggtgattggggagttctctcttccagcaggagaaaccctagccgccgcctcttcaatggaccgggttcctccggttgaagctgtagccgacgcgtacaacgccgcacgagcagctgccgttgctgcagtagaagcgcattcggcggccatcattgcggaggaggcaatcgctgctgtgaagtatgctgcaattgctcgcgaaaagtttgaaggagctgttgattcagtgaagaactcaacctttgtctatgctaatgccactgttgaggctttggtaatatttctgcacactgtttattttctagagatcgaccccgtttatgctgccgggtcacccgaaacaagatcgaccccgtaatgcctggtcacccgaatcaaaacttgtttattgtctagaaggcaccgtgttgtttgtattccattgtagctggtacttgtttcttggttgtttacaggacaatgttgatttgaagtatcatgttagcatcaagaattctctgcgatacgcgattcaagagatgaggagacaatcaacactgctacatacaattaattctatctgttctagtatcccagaagttgaggggggcaagatagggaaggttgttggccacctggaccatgtctgcaagatgctagagaagacttctattgtttgcgaacaagatttggataataagtgtcctagttgggacctatttgaccccccttcggatgttgaagatcaccctgatgttgatgaactacttgaaggatacaactcagaagatccggagctgtgggaaatggcgtttgaggaccggaagtgggaggagaataaagtggcagtctccttggctgagcattgtcgtattatgggttacaattacgaagagatttatgatcgtactgtttgagtcgacaaggggcagcataggaacaaagcaacggctggcattgagtctggcagtggaggcaacaaaggatactggtatcagtgcttgcagctacatcttcagacaactgatgttcttgaagacgaagatttatatgcaaacctgggtgcctccacaaaagtctaaacccttatacatcttgttatatttcctctccaaatgatgctgtggtgttcagacctcacaaaggctgcaggcttggcgtagagatggatttctaagaaaagaaaaaaaatggtgcttcctgcttacaatttattagttatcaaccacaaacactgtgagcttttgcagacagaaattgccttatttatatttacagaaacagatcacactggttgcaacctgcactgcatgatgaaaatgatgtctacgagagaaggggggaaacagaagaagaatctgaagatttagtgaaaccaaaacagaaaggtacataaggtctgatagagattgagaatccaaacctggtgaaattaaagaatataaaggtcaaggacattgatgtggtaatgtattgtggaatcctgttttacaacttcaaccattgattccagtgaagctaatgccatggaatggaattctcaccacgtttgctggctgtacgagtacacaaatctgatgaatggattcagctaaaatgtcatagaatggacccggaatttatgctctttttttgtgctctctcagcatgtgctagctggttaagtactagcattgctattgggcgctattttgtatgcttgttctgctgtcttttggatgtaaacgaacaagtttgcatgcttgttctgctattggataagaagtattagcattgctatttgcatgcttgttctgctggttaagaagttaagaagtattagcatgtgacttgtggagatg

SEQ ID NO: 209456 - DNA, 4933 bp, Zea Mays
ggccggtccacctcgggctatgccgtcttcctaggggacagcctcgtctcctggtcatcgaagcgccagccgatcgtctcccgctccagcgccaaggccgagtaccgtgccgtggcaaacgacgtggctgaggcgacttggctccgtcagctgcttcaagagctccacagtccgctagcacggagcaccctcgtcttctgcgacaacgtcaacgccgtccacctctccaccaaccctgtccaacactagcacacgaagcatgtcgagatcgatcttcactttgtccgcgagagggtcgcctgtggagatgttcgcgtcctccacgtcccgaccgcctcccagttcgccgacgtcttcaccaaagggcttccgtccgcggtgtttgcagagtttcggtccagtctcaacatctgcagtggctagagtttcgactgcgggggggtgttacagatatatgtatatgggcctggcccattaggacaccagtactgtagccgcactgtagctagggtttactagtactgtaactgcagccgcactgtagctagggtttctgtaacaacagacattctcacattgactacaaactttgataatatattttctcaaatttaaagcaccctaatcatgaggtctatatgaccaattggctgcatctaagctattagacaaactaatgatgcatcattctgactcggactattaatgttttaaaaacatggtgagaacaaaaccaactaagagtgtacctgagcataagtagtagaagtatagtgcatctggctcttaggggaatgaacaaactattacctgatctcatctggaccacggttcaccatcctgttgagaacccatttctcgctcatcaccgagaacgaaatttcgacgaaaaccgtccaaaaaacactaatcctgagcaatttgcaattttcaattttgaaatcatcttttttcatttttcttgctgaaaaccaccgcttcccgattggttttcgctaaaaaacaaccgagaaaccgattttcaattttttcgaccgacttacgtttcaaattcaaataaaatagtttatcggatttctcggcgagataccgctgtttttaccgattttcgctgtttgtttaccgttttttcaaataatttttttgattttttgaattttgaatgattaaaaaaaaaccgctggaaaactgttatcggtctggtccagtaacgggaaaccggactggttttcgccggttttcgagatgttttgtaatccgtggtctggacacatggcaagcatttatcagtaggcaattagatctgctatcagcaataaatagatctgattccctgtgttcctgctatagtaacatttttccaatgtctgtacccttcgatattgttgtaccagtgaggcaatgtgggcaaaccttgtggcttgtgccctcccacctgctatctggtggcattaccgaaagtagaactgctgtcatattatttataagtgattgtttattcttgcaggcatcaaaatgcgcaacattctactcaacatttttatgatcacttagtgcccttatgtcattaatgagttagtatctttttttttctcgaaaaaacgcaggaggactgcgttttagatatatattaagaagagagagacaaaggtctaagagaccaaaaaaacaacaacaacgcactccctatggaggccagtaacactcgtacatgaaaggatccataaaaacacccacacacactccttacaacaacctatgcagggggcagccaagaaggagagccctttggctccagcaatttcccagcctcttctttcctcatctgcatgctccataatcaaaggaaggctgggagaccctccataaaaaatgactctattacgatgcttccaaatcatccacgaccctaaaatgatgagggagtcaagaccttccctgaccagaccatttactgtctctgaaaccatctcccaccaatccataaaggaaactgcatctggctgtggggctaaactatgcagcccgaactttcttagtaggttgtaccagaaaatccttgagaagacacaattcacaagcaagtggttcagagtttccccttgctggtcacataaaggacatctgatagggtgattcaatccccttcttaccaagcgatcagctgtccaacatctattttgggccaccaaccaaatgaaaaaacaacattttggtggagcccaagatctccaaacccttttatagtgcccaaaggtggtagacccaaggaaaagacccatataagctgactttgcagagtatctaccattcgaatataagctgaaaatatgtctatcctcagtgttaggctgcagcacaaaatctgcgagaatattccagaggtgtagataatctacaatggcaccaactgtaagagcccctttgatgtctgcaatccatcgtctgttcaatagggcctgctgcacagttcttctgttaataattctttttggaataatgctgaataatcttggagcaatatcagatacccttttgccatggatccatttatctatccagaacatggtgttggtcccattccccacctcagagatcaacaccttggagaaggaatgggccgtgctaggaatttgaatggacaggctagaccatgggcgtcttgggtcagttttttgcaaccaaagccatcgcatgtggagggcccaacagagcttaggaaggccgtgtgttggcccaagagatctaaagcccgctgctatgcattcgggcgcgtgtgtcgtggcccgacggcctgggtgggcgcgccgtgtgtgcggtggcccgacgggcacgccgtgtgtcggcggtccggttccaagttccaacagccctttgagtgtgctgcttgagttggcaatacagaggaatgaggagataccggccttggtctatgaggccaggccggtggatccccgccatggccgaaattggcgttgtggatggggaagggatgcaagatttggatgccagttgcacggttgaggtgattggggagttctctcttccagcaggagaaaccctagccgccgcctcttcaatggaccgggttcctccggttgaagctgtagccgacgcgtacaacgccgcacgagcagctgccgttgctgcagtagaagcgcattcggcggccatcattgcggaggaggcaatcgctgctgtgaagtatgctgcaattgctcgcgaaaagtttgaaggagctgttgattcagtgaagaactcaacctttgtctatgctaatgccactgttgaggctttggtaatatttctgcacactgtttattttctagagatcgaccccgtttatgctgccgggtcacccgaaacaagatcgaccccgtaatgcctggtcacccgaatcaaaacttgtttattgtctagaaggcaccgtgttgtttgtattccattgtagctggtacttgtttcttggttgtttacaggacaatgttgatttgaagtatcatgttagcatcaagaattctctgcgatacgcgattcaagagatgaggagacaatcaacactgctacatacaattaattctatctgttctagtatcccagaagttgaggggggcaagatagggaaggttgttggccacctggaccatgtctgcaagatgctagagaagacttctattgtttgcgaacaagatttggataataagtgtcctagttgggacctatttgaccccccttcggatgttgaagatcaccctgatgttgatgaactacttgaaggatacaactcagaagatccggagctgtgggaaatggcgtttgaggaccggaagtgggaggagaataaagtggcagtctccttggctgagcattgtcgtattatgggttacaattacgaagagatttatgatcgtactgtttgagtcgacaaggggcaggaacaaagcaacggctggcattgagtctggcagtggaggcaacaaaggatactggtatcagtgcttgcagctacatcttcagacaactgatgttcttgaagacgaagatttatatgcaaacctgggtgcctccacaaaagtctaaacccttatacatcttgttatatttcctctccaaatgaggtagtagaatgttagaggtttgattcaactgtcaactgctgtgtccctaaagcatgattaccctgttggaaatccatttggcgacggcgacgatgctgtggtgttcagacctcacaaaggctgcaggcttggcgtagagatggatttctaagaaaagaaaaaaaatggtgcttcctgcttacaatttattagttatcaaccacaaacactgtgagcttttgcagacagaaattgccttatttatatttacagaaacagatcacactggttgcaacctgcactgcatgatgaaaatgatgtctacgagagaaggggggaaacagaagaagaatctgaagatttagtgaaaccaaaacagaaaggtacataaggtctgatagagattgagaatccaaacctggtgaaattaaagaatataaaggtcaaggacattgatgtggtaatgtattgtggaatcctgttttacaacttcaaccattgattccagtgaagctaatgccatggaatggaattctcaccacgtttgctggctgtacgagtacacaaatctgatgaatggattcagctaaaatgtcatagaatggacccggaatttatgctctttttttgtgctctctcagcatgtgctagctggttaagtactagcattgctattgggcgctattttgtatgcttgttctgctgtcttttggatgtaaacgaacaagtttgcatgcttgttctgctattggataagaagtattagcattgctatttgcatgcttgttctgctggttaagaagttaagaagtattagcatgtgacttgtggagatg

SEQ ID NO: 209457 - DNA, 5285 bp, Zea Mays
ggccggtccacctcgggctatgccgtcttcctaggggacagcctcgtctcctggtcatcgaagcgccagccgatcgtctcccgctccagcgccaaggccgagtaccgtgccgtggcaaacgacgtggctgaggcgacttggctccgtcagctgcttcaagagctccacagtccgctagcacggagcaccctcgtcttctgcgacaacgtcaacgccgtccacctctccaccaaccctgtccaacactagcacacgaagcatgtcgagatcgatcttcactttgtccgcgagagggtcgcctgtggagatgttcgcgtcctccacgtcccgaccgcctcccagttcgccgacgtcttcaccaaagggcttccgtccgcggtgtttgcagagtttcggtccagtctcaacatctgcagtggctagagtttcgactgcgggggggtgttacagatatatgtatatgggcctggcccattaggacaccagtactgtagccgcactgtagctagggtttactagtactgtaactgcagccgcactgtagctagggtttctgtaacaacagacattctcacattgactacaaactttgataatatattttctcaaatttaaagcaccctaatcatgaggtctatatgaccaattggctgcatctaagctattagacaaactaatgatgcatcattctgactcggactattaatgttttaaaaacatggtgagaacaaaaccaactaagagtgtacctgagcataagtagtagaagtatagtgcatctggctcttaggggaatgaacaaactattacctgatctcatctggaccacggttcaccatcctgttgagaacccatttctcgctcatcaccgagaacgaaatttcgacgaaaaccgtccaaaaaacactaatcctgagcaatttgcaattttcaattttgaaatcatcttttttcatttttcttgctgaaaaccaccgcttcccgattggttttcgctaaaaaacaaccgagaaaccgattttcaattttttcgaccgacttacgtttcaaattcaaataaaatagtttatcggatttctcggcgagataccgctgtttttaccgattttcgctgtttgtttaccgttttttcaaataatttttttgattttttgaattttgaatgattaaaaaaaaaccgctggaaaactgttatcggtctggtccagtaacgggaaaccggactggttttcgccggttttcgagatgttttgtaatccgtggtctggacacatggcaagcatttatcagtaggcaattagatctgctatcagcaataaatagatctgattccctgtgttcctgctatagtaacatttttccaatgtctgtacccttcgatattgttgtaccagtgaggcaatgtgggcaaaccttgtggcttgtgccctcccacctgctatctggtggcattaccgaaagtagaactgctgtcatattatttataagtgattgtttattcttgcaggcatcaaaatgcgcaacattctactcaacatttttatgatcacttagtgcccttatgtcattaatgagttagtatctttttttttctcgaaaaaacgcaggaggactgcgttttagatatatattaagaagagagagacaaaggtctaagagaccaaaaaaacaacaacaacgcactccctatggaggccagtaacactcgtacatgaaaggatccataaaaacacccacacacactccttacaacaacctatgcagggggcagccaagaaggagagccctttggctccagcaatttcccagcctcttctttcctcatctgcatgctccataatcaaaggaaggctgggagaccctccataaaaaatgactctattacgatgcttccaaatcatccacgaccctaaaatgatgagggagtcaagaccttccctgaccagaccatttactgtctctgaaaccatctcccaccaatccataaaggaaactgcatctggctgtggggctaaactatgcagcccgaactttcttagtaggttgtaccagaaaatccttgagaagacacaattcacaagcaagtggttcagagtttccccttgctggtcacataaaggacatctgatagggtgattcaatccccttcttaccaagcgatcagctgtccaacatctattttgggccaccaaccaaatgaaaaaacaacattttggtggagcccaagatctccaaacccttttatagtgcccaaaggtggtagacccaaggaaaagacccatataagctgactttgcagagtatctaccattcgaatataagctgaaaatatgtctatcctcagtgttaggctgcagcacaaaatctgcgagaatattccagaggtgtagataatctacaatggcaccaactgtaagagcccctttgatgtctgcaatccatcgtctgttcaatagggcctgctgcacagttcttctgttaataattctttttggaataatgctgaataatcttggagcaatatcagatacccttttgccatggatccatttatctatccagaacatggtgttggtcccattccccacctcagagatcaacaccttggagaaggaatgggccgtgctaggaatttgaatggacaggctagaccatgggcgtcttgggtcagttttttgcaaccaaagccatcgcatgtggagggcccaacagagcttaggaaggccgtgtgttggcccaagagatctaaagcccgctgctatgcattcgggcgcgtgtgtcgtggcccgacggcctgggtgggcgcgccgtgtgtgcggtggcccgacgggcacgccgtgtgtcggcggtccggttccaagttccaacagccctttgagtgtgctgcttgagttggcaatacagaggaatgaggagataccggccttggtctatgaggccaggccggtggatccccgccatggccgaaattggcgttgtggatggggaagggatgcaagatttggatgccagttgcacggttgaggtgattggggaggtatcggagaggaaccttcaacccaactctagaaactgttttttccctcgaatgcgcaagagaggagatttttgccattataaaacacggcacgttcagcttcatcgaaacggaggcgttggggagggattcgacgatatggaaaaacacaggacgcgcagccgacgaaatagactcaaaatctcttttatgcgtagcgacgggccattaagctcctgcatctgacgccgtgaccttgctgtgacttgcctccatcctttctcttctctcttccaccgagttctctcttccagcaggagaaaccctagccgccgcctcttcaatggaccgggttcctccggttgaagctgtagccgacgcgtacaacgccgcacgagcagctgccgttgctgcagtagaagcgcattcggcggccatcattgcggaggaggcaatcgctgctgtgaagtatgctgcaattgctcgcgaaaagtttgaaggagctgttgattcagtgaagaactcaacctttgtctatgctaatgccactgttgaggctttggtaatatttctgcacactgtttattttctagagatcgaccccgtttatgctgccgggtcacccgaaacaagatcgaccccgtaatgcctggtcacccgaatcaaaacttgtttattgtctagaaggcaccgtgttgtttgtattccattgtagctggtacttgtttcttggttgtttacaggacaatgttgatttgaagtatcatgttagcatcaagaattctctgcgatacgcgattcaagagatgaggagacaatcaacactgctacatacaattaattctatctgttctagtatcccagaagttgaggggggcaagatagggaaggttgttggccacctggaccatgtctgcaagatgctagagaagacttctattgtttgcgaacaagatttggataataagtgtcctagttgggacctatttgaccccccttcggatgttgaagatcaccctgatgttgatgaactacttgaaggatacaactcagaagatccggagctgtgggaaatggcgtttgaggaccggaagtgggaggagaataaagtggcagtctccttggctgagcattgtcgtattatgggttacaattacgaagagatttatgatcgtactgtttgagtcgacaaggggcaggaacaaagcaacggctggcattgagtctggcagtggaggcaacaaaggatactggtatcagtgcttgcagctacatcttcagacaactgatgttcttgaagacgaagatttatatgcaaacctgggtgcctccacaaaagtctaaacccttatacatcttgttatatttcctctccaaatgaggtagtagaatgttagaggtttgattcaactgtcaactgctgtgtccctaaagcatgattaccctgttggaaatccatttggcgacggcgacggtatcagctcacagtatttgataaataagttcacagtatttggttcaactgttaacatttatcttgctgcagatgctgtggtgttcagacctcacaaaggctgcaggcttggcgtagagatggatttctaagaaaagaaaaaaaatggtgcttcctgcttacaatttattagttatcaaccacaaacactgtgagcttttgcagacagaaattgccttatttatatttacagaaacagatcacactggttgcaacctgcactgcatgatgaaaatgatgtctacgagagaaggggggaaacagaagaagaatctgaagatttagtgaaaccaaaacagaaaggtacataaggtctgatagagattgagaatccaaacctggtgaaattaaagaatataaaggtcaaggacattgatgtggtaatgtattgtggaatcctgttttacaacttcaaccattgattccagtgaagctaatgccatggaatggaattctcaccacgtttgctggctgtacgagtacacaaatctgatgaatggattcagctaaaatgtcatagaatggacccggaatttatgctctttttttgtgctctctcagcatgtgctagctggttaagtactagcattgctattgggcgctattttgtatgcttgttctgctgtcttttggatgtaaacgaacaagtttgcatgcttgttctgctattggataagaagtattagcattgctatttgcatgcttgttctgctggttaagaagttaagaagtattagcatgtgacttgtggagatg

SEQ ID NO: 209458 - DNA, 1710 bp, Zea Mays
taggttttgagagcgaggtgcccgtctgaataggttgcgcacgaggagagcccaccggccaccgcctaccgcaatggaagccgcaggcggcggagccgaggatgagcaggtgatgagcgaggtgcacttgggctgcccgccgcacttctctggcctcctcgtctcccatttcagcttctcctcacggcccctagggccatatggacacaaaggaggcggcggcggcggcggcgggagcgagctagtcgcagcaactagcggttctgtcgccgtggatgaggatggggatctcgttctggaccggaggagaagaaacaaatatgctagaggtgaccgccatctgttcactattcagcatggtgttaccagctcgcttaagagcgttgggcttcaggtttggaaagcggccttactattatctgactttattctgcacgaaagcttttcatcgccaaactttgatggtgttactgccattgagataggtgctggaacaggtttggtaggtttagcactagctcgagttgctagaaggatttttgttacagatagaggcactgatatccttgataattgcttggctaatctccatatcaactctggtatgctaaggttcgatgaagctaaagtctgtgtacgagaactggactggaaaatggcatggcctccacctgtgggtacatatgacccttctgatccaagtcggtatttatggtctgcaagtgaagttgaggaggctgagaaagcaacagtcctgtttgctgcagatgttatttacagtgatgatctcacaaatttgttcttcaacacggtgaagaaattgatgtcggtcggtgctaagaaggtgctatacttggccctggagaagagatacaacttcagtgtagacgaactagatgtcgtggccaatggttacacgcacttccgaagtttcttcacagcccaagatgagcacggtgatccgagcaacagatctggaccaggttttgttggaaagcagatagaccctgcagagattcctcagtacatcagagagtatgagaggggcaaggatttagagatgtggatgatcatgtacagtccggaggagaaacagcacagtaactctacaaaaaccgtcttttccttctaggaggacgaagagagcaatgagtgcttggtgcaaaaagacgaattccgttaaaaagacgggaccccctcccacgggcatccatactatcttgacaaaaatgaaaactgctgcttggtgcaagatccgtgtggtgtcgaagaatcgcagttcggcatcttctctgcggggaccgcgacagaaacgaggtcatcagaagagagaaataagttacacctaattgcggcagggcagggcagtggtggctggcatatattaagtggtggacaatcaagaacatgctctgcatgcttagcttaagtatatcatacgtatataataacgccgttgggactcgttttctttgtcgcccggaaacagcatctgtttggtccaagattcttggcacgccattgcgatccaaccctgtcgtgctcaaacatactctctccgtcggctggtgctctcgtttcatttcatcacaagttaattaattttaattttaactaaatatgtataaaaggacaaggccggccttcccagtcacaggctcacagctggataaagaaagaaaaggccaatttatgagtcaacaattcctg

SEQ ID NO: 209459 - DNA, 1663 bp, Zea Mays
ctcagtctaggttttgagagcgaggtgcccgtctgaataggttgcgcacgaggagagcccaccggccaccgcctaccgcaatggaagccgcaggcggcggagccgaggatgagcaggtgatgagcgaggtgcacttgggctgcccgccgcacttctctggcctcctcgtctcccatttcagcttctcctcacggcccctagggccatatggacacaaaggaggcggcggcggcggcggcgggagcgagctagtcgcagcaactagcggttctgtcgccgtggatgaggatggggatctcgttctggaccggaggagaagaaacaaatatgctagaggtgaccgccatctgttcactattcagcatggtgttaccagctcgcttaagagcgttgggcttcaggtttggaaagcggccttactattatctgactttattctgcacgaaagcttttcatcgccaaactttgatggtgttactgccattgagataggtgctggaacaggtttggtaggtttagcactagctcgagttgctagaaggatttttgttacaggttcgatgaagctaaagtctgtgtacgagaactggactggaaaatggcatggcctccacctgtgggtacatatgacccttctgatccaagtcggtatttatggtctgcaagtgaagttgaggaggctgagaaagcaacagtcctgtttgctgcagatgttatttacagtgatgatctcacaaatttgttcttcaacacggtgaagaaattgatgtcggtcggtgctaagaaggtgctatacttggccctggagaagagatacaacttcagtgtagacgaactagatgtcgtggccaatggttacacgcacttccgaagtttcttcacagcccaagatgagcacggtgatccgagcaacagatctggaccaggttttgttggaaagcagatagaccctgcagagattcctcagtacatcagagagtatgagaggggcaaggatttagagatgtggatgatcatgtacagtccggaggagaaacagcacagtaactctacaaaaaccgtcttttccttctaggaggacgaagagagcaatgagtgcttggtgcaaaaagacgaattccgttaaaaagacgggaccccctcccacgggcatccatactatcttgacaaaaatgaaaactgctgcttggtgcaagatccgtgtggtgtcgaagaatcgcagttcggcatcttctctgcggggaccgcgacagaaacgaggtcatcagaagagagaaataagttacacctaattgcggcagggcagggcagtggtggctggcatatattaagtggtggacaatcaagaacatgctctgcatgcttagcttaagtatatcatacgtatataataacgccgttgggactcgttttctttgtcgcccggaaacagcatctgtttggtccaagattcttggcacgccattgcgatccaaccctgtcgtgctcaaacatactctctccgtcggctggtgctctcgtttcatttcatcacaagttaattaattttaattttaactaaatatgtataaaaggttagtaatttcaatgatgtatactaataaatattattagatcgattatttaatctattttttctaataaaattatttgcagatataaa

SEQ ID NO: 209460 - DNA, 1371 bp, Zea Mays
tcatccccccctcccctggcattgcttgccacccctgcaactgcaactgcaacacagagaaagatagcgctagccagaggatcagctccggtcatccagtgaagctcaggctactctacctcgctctcggccatggcgtcaggggaagcagcagagccactgcagtacacgaccaccgcgctgcgggtgtccatccactgcgagggctgcaagaagaaggtcaagaaggtgctccacagcatcgaaggcgtgtacaaggtgacggtggacgcggcgcagcacaaggtgacggtcaccggcagcgtggaagccgacgcgctcgtccggcgcctgcacaaggccggcaagcaggcggcgctctggcccagctcgccggcacccgtcgaggccaagaagaagcccgaggaggtcgcgcctgccgcgttgccagcggcagccgccaacaaggacgctagggcccaggagaagaagccggccaaggacaagaaggccgactacgccgacgccgcggcgcaacccagcaaggacaagacggccgacaaaggcgaggccgcggcgaaacccagccagcaggacaagaagactggcaaatgcgagccggccccggagacgaagaagggctcccctgcgccggggaagcagcaggacgccgcggaggaggctggcgcggacaagcccggcggcggcggcaagaagggcaagaaggacaagaatccaaacaagccgaaggacagcggcgattgcgaggccccggccgagaagcaggcgtcgccggggcccgagagcccgcgcgggcacggcggcgccttcccgtactacgcggcgcacccggtgctgagctgctacaacgtggcgcacccggtgctgagctgctacaacgtggcgcacccgagctcgagcgtggcgtactacgcgcccgcggccgtggtgccgtacggcgggttcccgcccatggtgccggcggagttcatgtacggcccgccgggcatgcaggagtctagcatgttcaacgaggacaacgccaactcgtgcagcctcatgtgatgtctcatgtctgtcacgcacgcgccgccgctacctatctacacgacaaaattaggcggtcaaagctcttgttgaccagagattaattctttgaattgctcatcagcgcgtcatgtaaaaatcagatgatggtaatagtatattctagttctaggagcgttcagcagtgcactgctactgctaccacttgcattccttctgtgtgcagctatgaactcgtggtaggacaggacagaaattcgaatttctcgtgaatttaatatgtgtactgttaccttgtccttgtcgttggtagggcaatgaagcgaaggcttaaatacggactgt

SEQ ID NO: 209461 - DNA, 900 bp, Zea Mays
aaactagcaataaatgaagaattgttgactgaacatctgaatgcaccatttactgaggagctggttttcagggcatgcatgatacctcttctgctctgtgggggattcaaaatgtctacaattatatttctgagtccaatcttcttcagtctagcgcacttgaaccattttttcgaactacaccagcagggatgtaactttatgagagcgctattgattgtaggtgtccagttaggctacactgtcatttttgggtggtatgcaacattcttgttaatccgaacagggaatctgttatgtccaattattgctcacgtcttctgtaatatgatgggtttacctgttttctcgtcaccacgaacaaaaggagcggcattggtagcgtttctggctggttcaatagccttcttttggctgcttttccctgcaacaagtcctgaactgtacaacagcagttttgatcgctgcagttgctggcatggcttttgcaattggaaataacatagaactagattggaaagcaatgggtcctaacttgaagctactaacaattgaaacctccaggccctagctgacacttctgacggattttctatttgcagaaactccatatgaatgtcttaaaacgttttgtagaaatgtgtcccttgttttagcttaagactcaagagcttaaactagcaaaagattgtattttgccacttgttaaatacgtgctgatcatgaaatcgctgtcaatcccttctcaaagtggaatttgactttgttgagctgcttttatttatattgtgcttgctactgcagcgcctagagtttgtagattacacatcatggacccgtctgatattgtaaacgagagacatgtttctaagttaatatgctccctccatttatttaaac

SEQ ID NO: 209462 - DNA, 1131 bp, Zea Mays
aagcgcccctgctctcctccggtctggagcctcagcgacttcgctgatatgtttgctgtgttcggcattaggaaggatcacttgattcaggccgtggctattccacttctcctgacatccctagtgtatgctgggtcattcgtcgctagagtgtggctcctagtgagctcgtggggcggtggcgatgaggtggagataggctgcgcacagaggcttgcacaatggatccaagctgctgttgcggatgttatggtttggcggaactatgtagtggcaccatttactgaggagctggttttcagggcatgcatgatacctcttctgctctgtgggggattcaaaatgtctacaattatatttctgagtccaatcttcttcagtctagcgcacttgaaccattttttcgaactacaccagcagggatgtaactttatgagagcgctattgattgtaggtgtccagttaggctacactgtcatttttgggtggtatgcaacattcttgttaatccgaacagggaatctgttatgtccaattattgctcacgtcttctgtaatatgatgggtttacctgttttctcgtcaccacgaacaaaaggagcggcattggtagcgtttctggctggttcaatagccttcttttggctgcttttccctgcaacaagtcctgaactgtacaacagcagttttgatcgctgcagttgctggcatggcttttgcaattggaaataacatagaactagattggaaagcaatgggtcctaacttgaagctactaacaattgaaacctccaggccctagctgacacttctgacggattttctatttgcagaaactccatatgaatgtcttaaaacgttttgtagaaatgtgtcccttgttttagcttaagactcaagagcttaaactagcaaaagattgtattttgccacttgttaaatacgtgctgatcatgaaatcgctgtcaatcccttctcaaagtggaatttgactttgttgagctgcttttatttatattgtgcttgctactgcagcgcctagagtttgtagattacacatcatggacccgtctgatattgtaaacgagagacatgtttctaagttaatatgctccctccatttatttaaac

SEQ ID NO: 209463 - DNA, 1420 bp, Zea Mays
caaacacccatagtccgaaaacagcgtgttcttcgtgccaagcgaagccacgcgaccgactgtgttacgatcccaaatcttcactcccgacgaaatctagaatccaatgagcaatctcgactgacgcctgcttcaccagattatggcgacgccggcgggcctccttctcgcctcgccgccggtgatatcaggtgtcgcggcgatggcggcgtgcgccgcaatggcagtattctacgtcgctgtcctctatgccccgacggtcatcctccggttcccacccccaacctcactccgcaccttcctccaccgtcgcttcgcctgtgccgccgtcgcatccgccgcctccgtccttgccactgcgtccctcctccgagtctggagcctcagcgacttcgctgatatgtttgctgtgttcggcattaggaaggatcacttgattcaggccgtggctattccacttctcctgacatccctagtgtatgctgggtcattcgtcgctagagtgtggctcctagtgagctcgtggggcggtggcgatgaggtggagataggctgcgcacagaggcttgcacaatggatccaagctgctgttgcggatgttatggtttggcggaactatgtagtggcaccatttactgaggagctggttttcagggcatgcatgatacctcttctgctctgtgggggattcaaaatgtctacaattatatttctgagtccaatcttcttcagtctagcgcacttgaaccattttttcgaactacaccagcagggatgtaactttatgagagcgctattgattgtagggaatctgttatgtccaattattgctcacgtcttctgtaatatgatgggtttacctgttttctcgtcaccacgaacaaaaggagcggcattggtagcgtttctggctggttcaatagccttcttttggctgcttttccctgcaacaagtcctgaactgtacaacagcagttttgatcgctgcagttgctggcatggcttttgcaattggaaataacatagaactagattggaaagcaatgggtcctaacttgaagctactaacaattgaaacctccaggccctagctgacacttctgacggattttctatttgcagaaactccatatgaatgtcttaaaacgttttgtagaaatgtgtcccttgttttagcttaagactcaagagcttaaactagcaaaagattgtattttgccacttgttaaatacgtgctgatcatgaaatcgctgtcaatcccttctcaaagtggaatttgactttgttgagctgcttttatttatattgtgcttgctactgcagcgcctagagtttgtagattacacatcatggacccgtctgatattgtaaacgagagacatgtttctaagttaatatgctccctccatttatttaaac

SEQ ID NO: 209464 - DNA, 1414 bp, Zea Mays
caaacacccatagtccgaaaacagcgtgttcttcgtgccaagcgaagccacgcgaccgactgtgttacgatcccaaatcttcactcccgacgaaatctagaatccaatgagcaatctcgactgacgcctgcttcaccagattatggcgacgccggcgggcctccttctcgcctcgccgccggtgatatcaggtgtcgcggcgatggcggcgtgcgccgcaatggcagtattctacgtcgctgtcctctatgccccgacggtcatcctccggttcccacccccaacctcactccgcaccttcctccaccgtcgcttcgcctgtgccgccgtcgcatccgccgcctccgtccttgccactgcgtccctcctccgagtctggagcctcagcgacttcgctgatatgtttgctgtgttcggcattaggaaggatcacttgattcaggccgtggctattccacttctcctgacatccctagtgtatgctgggtcattcgtcgctagagtgtggctcctagtgagctcgtggggcggtggcgatgaggtggagataggctgcgcacagaggcttgcacaatggatccaagctgctgttgcggatgttatggtttggcggaactatgtagtggcaccatttactgaggagctggttttcagggcatgcatgatacctcttctgctctgtgggggattcaaaatgtctacaattatatttctgagtccaatcttcttcagtctaggtgtccagttaggctacactgtcatttttgggtggtatgcaacattcttgttaatccgaacagggaatctgttatgtccaattattgctcacgtcttctgtaatatgatgggtttacctgttttctcgtcaccacgaacaaaaggagcggcattggtagcgtttctggctggttcaatagccttcttttggctgcttttccctgcaacaagtcctgaactgtacaacagcagttttgatcgctgcagttgctggcatggcttttgcaattggaaataacatagaactagattggaaagcaatgggtcctaacttgaagctactaacaattgaaacctccaggccctagctgacacttctgacggattttctatttgcagaaactccatatgaatgtcttaaaacgttttgtagaaatgtgtcccttgttttagcttaagactcaagagcttaaactagcaaaagattgtattttgccacttgttaaatacgtgctgatcatgaaatcgctgtcaatcccttctcaaagtggaatttgactttgttgagctgcttttatttatattgtgcttgctactgcagcgcctagagtttgtagattacacatcatggacccgtctgatattgtaaacgagagacatgtttctaagttaatatgctccctccatttatttaaac

SEQ ID NO: 209465 - DNA, 1479 bp, Zea Mays
caaacacccatagtccgaaaacagcgtgttcttcgtgccaagcgaagccacgcgaccgactgtgttacgatcccaaatcttcactcccgacgaaatctagaatccaatgagcaatctcgactgacgcctgcttcaccagattatggcgacgccggcgggcctccttctcgcctcgccgccggtgatatcaggtgtcgcggcgatggcggcgtgcgccgcaatggcagtattctacgtcgctgtcctctatgccccgacggtcatcctccggttcccacccccaacctcactccgcaccttcctccaccgtcgcttcgcctgtgccgccgtcgcatccgccgcctccgtccttgccactgcgtccctcctccgagtctggagcctcagcgacttcgctgatatgtttgctgtgttcggcattaggaaggatcacttgattcaggccgtggctattccacttctcctgacatccctagtgtatgctgggtcattcgtcgctagagtgtggctcctagtgagctcgtggggcggtggcgatgaggtggagataggctgcgcacagaggcttgcacaatggatccaagctgctgttgcggatgttatggtttggcggaactatgtagtggcaccatttactgaggagctggttttcagggcatgcatgatacctcttctgctctgtgggggattcaaaatgtctacaattatatttctgagtccaatcttcttcagtctagcgcacttgaaccattttttcgaactacaccagcagggatgtaactttatgagagcgctattgattgtgtccagttaggctacactgtcatttttgggtggtatgcaacattcttgttaatccgaacagggaatctgttatgtccaattattgctcacgtcttctgtaatatgatgggtttacctgttttctcgtcaccacgaacaaaaggagcggcattggtagcgtttctggctggttcaatagccttcttttggctgcttttccctgcaacaagtcctgaactgtacaacagcagttttgatcgctgcagttgctggcatggcttttgcaattggaaataacatagaactagattggaaagcaatgggtcctaacttgaagctactaacaattgaaacctccaggccctagctgacacttctgacggattttctatttgcagaaactccatatgaatgtcttaaaacgttttgtagaaatgtgtcccttgttttagcttaagactcaagagcttaaactagcaaaagattgtattttgccacttgttaaatacgtgctgatcatgaaatcgctgtcaatcccttctcaaagtggaatttgactttgttgagctgcttttatttatattgtgcttgctactgcagcgcctagagtttgtagattacacatcatggacccgtctgatattgtaaacgagagacatgtttctaagttaatatgctccctccatttatttaaac

SEQ ID NO: 209466 - DNA, 1641 bp, Zea Mays
ccgacccctcgagcaacgcgatcgcccgccgacccgacggcggcatggacaccgaggttcttccagcgatcaagctggttccagctcaagtagttctctgcaaatatcagaaccagaaccccaacaaatccaagaagaagaggattactatatggaggatgattgtgatgatgattttgatggctacgacgaagatgattatgacttcgatgaagctgactttaaccagcaccttgctgataaatttgatgatttggatcttcctccaggcgtggaggccaccgtaccttggttgcagaaaactacacccaaggaagatgtcaaagagccacctaaatcaaatactgcagatgagaatgcaaataaatatacgcagttcaagcagtttgatactgttcagaatttctctgaccattactacgctaagaattctcatggagagccaaacagagcctggtcaaagagagttcaacatgactggaaacttctggagaaggatctaccagcgtatatttttgtccgggttgctgaagatagaatggaccttcttagggctgcgattattgggcccaagggaacaccttaccatgatgggcttttcttctttgatattcacattccctctgcttatccttgtgctcccccgctggtatattaccactctggaggacttcggattaatccaaacttgtataacaatgggaaagtgtgtcttagcctgttgggtacctgggatggtagaggttgtgagaagtggaatccagctcaatcgacaatgctgcaagttcttgtctccattcaagctctgattttgaatgacaagccatattacaacgagccaggatatgagtcctatgccaacactccgaatggagagcggttggctttggactataatgacaacacctttctgcactcatgcaagactatgttatactcacttcggaggcctccagagcactttgcagatcttgtcgctggccactttcgggtgcatgggcacacgattctcgcggcatgcaagcactacatggcgggtaatgatattgggtcagtggtgccagaggaggaggaggaggaggaggaggaagagtcatcagaacacaagagcggtgatgctggagcatcgggtagtgcaccagagctaggagtgatcaaggcaatccctacgaagagacgcagctcattcaatccaagcttgaaggtgctgtacgaagatctgctgatggaattcaatgtgaagggtgccgacacaaggaaattcatcgatgagaagttgaagaagaacaaacctgcagccgcctgaggaacatgcttgcaggcaaagcttttgtaggtataactggtcttggtggtgatatctaggacctggaacttgcttgctcacatgtagtagagagtatggtttaggggtggagtgctgagagagttctctctcggcactatttatcgccaatctaaatctaatgataggtttaccgcatcataaatatatatgtaacggctatatcgtctttcgctgattgttctggcatatcatgataggtttacccaaggacgaaagctaagtaccaattggtttggaactgtattacggtctacttgtttttatatatttgacgccatatagttcaattctat

SEQ ID NO: 209467 - DNA, 1793 bp, Zea Mays
tgagcctgcataaatcgtcagcgaataggccgcccgcacgacttctcttcccaattcccatagatcgatcgccgacccctcgagcaacgcgatcgcccgccgacccgacggcggcatggacaccgagtccttgcagcaggggagctcctcgtcgtggcacacgacgggcgccgtgtcgtgtggagccgcgcagcagcagaagcgccagcggtgccagggttcttccagcgatcaagctggttccagctcaagtagttctctgcaaatatcagaaccagaaccccaacaaatccaagaagaagaggattactatatggaggatgattgtgatgatgattttgatggctacgacgaagatgattatgacttcgatgaagctgactttaaccagcaccttgctgataaatttgatgatttggatcttcctccaggcgtggaggccaccgtaccttggttgcagaaaactacacccaaggaagatgtcaaagagccacctaaatcaaatactgcagatgagaatgcaaataaatatacgcagttcaagcagtttgatactgttcagaatttctctgaccattactacgctaagaattctcatggagagccaaacagagcctggtcaaagagagttcaacatgactggaaacttctggagaaggatctaccagcgtatatttttgtccgggttgctgaagatagaatggaccttcttagggctgcgattattgggcccaagggaacaccttaccatgatgggcttttcttctttgatattcacattccctctgcttatccttgtgctcccccgctggtatattaccactctggaggacttcggattaatccaaacttgtataacaatgggaaagtgtgtcttagcctgttgggtacctgggatggtagaggttgtgagaagtggaatccagctcaatcgacaatgctgcaagttcttgtctccattcaagctctgattttgaatgacaagccatattacaacgagccaggatatgagtcctatgccaacactccgaatggagagcggttggctttggactataatgacaacacctttctgcactcatgcaagactatgttatactcacttcggaggcctccagagatcttgtcgctggccactttcgggtgcatgggcacacgattctcgcggcatgcaagcactacatggcgggtaatgatattgggtcagtggtgccagaggaggaggaggaggaggaggaggaagagtcatcagaacacaagagcggtgatgctggagcatcgggtagtgcaccagagctaggagtgatcaaggcaatccctacgaagagacgcagctcattcaatccaagcttgaaggtgctgtacgaagatctgctgatggaattcaatgtgaagggtgccgacacaaggaaattcatcgatgagaagttgaagaagaacaaacctgcagccgcctgaggaacatgcttgcaggcaaagcttttgtaggtataactggtcttggtggtgatatctaggacctggaacttgcttgctcacatgtagtagagagtatggtttaggggtggagtgctgagagagttctctctcggcactatttatcgccaatctaaatctaatgataggtttaccgcatcataaatatatatgtaacggctatatcgtctttcgctgattgttctggcatatcatgataggtttacccaaggacgaaagctaagtaccaattggtttggaactgtattacggtctacttgtttttatatatttgacgccatatagttcaattctat

SEQ ID NO: 209468 - DNA, 1804 bp, Zea Mays
ctgagcctgcataaatcgtcagcgaataggccgcccgcacgacttctcttcccaattcccatagatcgatcgccgacccctcgagcaacgcgatcgcccgccgacccgacggcggcatggacaccgagtccttgcagcaggggagctcctcgtcgtggcacacgacgggcgccgtgtcgtgtggagccgcgcagcagcagaagcgccagcggtgccagggttcttccagcgatcaagctggttccagctcaagtagttctctgcaaatatcagaaccagaaccccaacaaatccaagaagaagaggattactatatggaggatgattgtgatgatgattttgatggctacgacgaagatgattatgacttcgatgaagctgactttaaccagcaccttgctgataaatttgatgatttggatcttcctccaggcgtggaggccaccgtaccttggttgcagaaaactacacccaaggaagatgtcaaagagccacctaaatcaaatactgcagatgagaatgcaaataaatatacgcagttcaagcagtttgatactgttcagaatttctctgaccattactacgctaagaattctcatggagagccaaacagagcctggtcaaagagagttcaacatgactggaaacttctggagaaggatctaccagcgtatatttttgtccgggttgctgaagatagaatggaccttcttagggctgcgattattgggcccaagggaacaccttaccatgatgggcttttcttctttgatattcacattccctctgcttatccttgtgctcccccgctggtatattaccactctggaggacttcggattaatccaaacttgtataacaatgggaaagtgtgtcttagcctgttgggtacctgggatggtagaggttgtgagaagtggaatccagctcaatcgacaatgctgcaagttcttgtctccattcaagctctgattttgaatgacaagccatattacaacgagccaggatatgagtcctatgccaacactccgaatggagagcggttggctttggactataatgacaacacctttctgcactcatgcaagactatgttatactcacttcggaggcctccagagcactttgcagatcttgtcgctggccactttcgggtgcatgggcacacgattctcgcggcatgcaagcactacatggcgggtaatgatattgggtcagtggtgccagaggaggaggaggaggaggaggaggaagagtcatcagaacacaagagcggtgatgctggagcatcgggtagtgcaccagagctaggagtgatcaaggcaatccctacgaagagacgcagctcattcaatccaagcttgaaggtgctgtacgaagatctgctgatggaattcaatgtgaagggtgccgacacaaggaaattcatcgatgagaagttgaagaagaacaaacctgcagccgcctgaggaacatgcttgcaggcaaagcttttgtaggtataactggtcttggtggtgatatctaggacctggaacttgcttgctcacatgtagtagagagtatggtttaggggtggagtgctgagagagttctctctcggcactatttatcgccaatctaaatctaatgataggtttaccgcatcataaatatatatgtaacggctatatcgtctttcgctgattgttctggcatatcatgataggtttacccaaggacgaaagctaagtaccaattggtttggaactgtattacggtctacttgtttttatatatttgacgccatatagttcaattctat

SEQ ID NO: 209469 - DNA, 806 bp, Zea Mays
ggaaggggatcccgtgtcgtgggtccacacgtcaccgtgtgcggcgtgctctaactgcccgggcccggccagtggcgggtagggggggagagggactgagcctgcataaatcgtcagcgaataggccgcccgcacgacttctcttcccaattcccatagatcgatcgccgacccctcgagcaacgcgatcgcccgccgacccgacggcggcatggacaccgagtccttgcagcaggggagctcctcgtcgtggcacacgacgggcgccgtgtcgtgtggagccgcgcagcagcagaagcgccagcggtgccagggttcttccagcgatcaagctggttccagctcaagtagttctctgcaaatatcagaaccagaaccccaacaaatccaagaagaagaggattactatatggaggatgattgtgatgatgattttgatggctacgacgaagatgattatgacttcgatgaagctgactttaaccagcaccttgctgataaatttgatgatttggatcttcctccaggcgtggaggccaccgtaccttggttgcagaaaactacacccaaggaagatgtcaaagagccacctaaatcaaatactgcagatgagaatgcaaataaatatacgcagttcaagcagtttgatactgttcagaatttctctgaccattactacgctaagaattctcatggagagccaaacagagcctggtcaaagagagttcaacatgactggaaacttctggagaaggatctaccagggccatgtctactgctgtaagaaggtacaaatcatcctgaat

SEQ ID NO: 209470 - DNA, 3869 bp, Zea Mays
ctcccttcctttcccattcgtctcgtctcgctctcgcctgccgccttcccttcgcgtctcctcgctccggccgcagcagccgcctccgccctccatccgcaaaattacccaatccatcatccccgaaccctaaataaatcctcgatcggccgcgcgcgggaatcaacggatgggaccgcggccggcggctccgtagcggattggaggcgctcggttcgcgggggccgcggttcggctgccgggtggcgcccgcttctagagggaaaccaagaaggaaggaaggagattggaataaagacaggcactgcaacgatggctccatctcaagcggcggcagcggctggccccacctttgaggacctcgagcgcgacctgcaggcagttctcatggaccaaaaccacatgtccccagtggacgacctcggcatgtttcgcagcggcagcgctccccccaccgtcgagggatctcgcacggccattggcgcactcttctctggtccaccgcttcacgccaacagccttggcgccggcggcggcagcggtgggactgcttctggccttgacgtgctcactgatgaggagatacggtcacacccagcgtatctgtcgtactactattctaatgagcacctcaacccaaggcttccgccaccaatggtttccaaagaggactggcgtgcagcgcagtggttccaggctgtgtctggaggtattggggataggaggaggaggcctgcggaggtcgggagtggaaactccctgttctcggtgcagccaggggcaaacgaggttggtggagagaaggcgctgctgagtgatagaatggagaggagtggaaggaatgggctcgcacgacagcagtcttcagagtggcttgggagaggctccgatgggctcatcggcttgtcagatgccagtgcccttgggtctccgcgcaagagctttgctgatgcattgcaggaaaatattagccgtcctgctgttatagccggtcatctttcacgttctaatagccgtaatgttcttgagggcccaactccaatcaggtcatctgattcacgcaagccacaactgcagaataggtcagaatccatgaatggcctgcgatctggatccacttcaccgagtctggtcagggtccaaagtcttggttcttcgatgtctcataccttcgcttctgctgttggttcatctatctcaagaagcaccacccctgacccccagctgatacggagaactcctagtccttgccttcctccagttggagttcggatggggagttctgataaaaaagttgaagcttctgtttcttcacttaatcatgatggtgctgacattgtggcaactctgtctagcttaagcctatctggaaataagatgtcgaatgtggaaaatgaagttcagactcatgcttaccagaactttggtgatcaggctgatgtgttgtttaatgtaccaaaggaacataggcaattttcaccacggaatttaactcaaaaaactgatgaagacttgcttaatgcccctgaatatgcagttttcccaaatggggggagtaacttcagtaatttgcatgctagtaaggtggcatctcatagcaatagcaagttccctatgcaatcaccacacggtaatgccaacaagaaaggatctttgatgagctcagctggatcagtttctcagtaccagcacttgaatggtgatagccatgacattgatgtatctggatggcatactcatacaggtggttttacttcatccatgctgaacaatcaactgaatcctgatggtgactatggcaatgttctttcgaatcatggtggatcgagttatcagggccaaccaacagagacgatgtacgcacaatgcttgcaggcaaaccctgattcaccccttggcgcagctgcaagcatgagccctttccaagggaggggttttactggttcaggacacttggatagtcctggataccaaaaagcttaccttgggtcattatttggccagcaaaagctacaatatgggatgccatacctgggcaattctggtgctcttaatcaaaatatctatggcaatgattctgcctttggcattggaatgacttatctaacaagcccgccatctactccatatatctcatctccccaaggccatgttgggcaaggaaaccgtctgactcgacttccagcagtggtgaggaacaccgctggaggatccatgggatcgtggaattcagagaatggtctgatggataatggttatgggtcctccttgctggaggaattcaaaagtaacaaaactagatcttttgagctgttagatattgtaggccatgtggtagagttcagttcggatcagtatgggagtcgctttatacagcagaaactagaaactgcttctactgaacagaagaatatgatttttcctgagatccttccccaggcacgtactttgatgactgatgtttttggaaactatgttatacagaagttctttgaatacggaactgaaacgcaaacgaagcaactggcaaccctgcttaagggttttgtgttacagctgagtcttcaaatgtatggctgccgggtgattcagaaggctttggaagttgttgaagtggaacaacaaacacaaatggctttggagcttgatggatctatcatgagatgtgttcgtgatcagaatggcaaccatgtcatccaaaaatgtatagaatgcatccctcaggagaggatacgatttatcatttctgcattttacggacatgtcgtggagctttctatgcatccttatggttgtcgtgttattcagaggatcttggagcattgtgacgatgaaagcactcaaaatgccatgatggaagagatcatgcagtccgtggttactttaacggaggaccagtatggtaattatgtaatccagcatgtcctgcaatatgggaaaccagaagagcgttctactataattgcacaactcgctggacagatagtgaagatgagccagcagaaatttgcatccaatgttgttgagaagtgtcttacttttggttctcctgagcaacggcagattctaatcaatgaaatgcttggcaatgatgaaagaccagttcgcaaactatgttgtgcagaaggttctggagacatgtgatgaccagaaccgtgaattgattctttcccgtatcaaggtccacttgaatgcactgaaaaggtacacctatgggaagcatattgtgacacgtgttgagaagcttattgccgcaggagaacggcgcattggcgcactaccctcctgctgagatggcaatggttaggtcacctgtacagcagaagatagcgaggcctagctttttaccattaccagtagtcgttaatattgagcaagtacaaccgcagaagttaaaaaagaaaggctcccaaatcctttgtaaataaaggagagcctctggaaataaataagaatgagaaaagatgagattttacttgtcctcgaggaaagacttgtatatttgtattgtttttcccccctcttgcaagcagcaggataaagaagttttaaatattttgtcgagaagcaaagcagttactagaaggataaaggttttaggatcatagatgatgggaaggactgctgtagattctccttttttccttgggtttcatcagtcagtgtataagtactaatgtccatgctgatgttaatctctgtaagactgccttcagtttactgaatcttttttttctcttctggtgcctgccaagtgccagcatctgagcagttcttcaaatattacttgtttccaaccactcaactttcgtataatgttcataaaatgtttgtagctactactgaccttgatatgtgatgcatcatgg

SEQ ID NO: 209471 - DNA, 3289 bp, Zea Mays
gcctccgctcccttcctttcccattcgtctcgtctcgctctcgcctgccgccttcccttcgcgtctcctcgctccggccgcagcagccgcctccgccctccatccgcaaaattacccaatccatcatccccgaaccctaaataaatcctcgatcggccgcgcgcgggaatcaacggatgggaccgcggccggcggctccgtagcggattggaggcgctcggttcgcgggggccgcggttcggctgccgggtggcgcccgcttctagaggaaaatattagccgtcctgctgttatagccggtcatctttcacgttctaatagccgtaatgttcttgagggcccaactccaatcaggtcatctgattcacgcaagccacaactgcagaataggtcagaatccatgaatggcctgcgatctggatccacttcaccgagtctggtcagggtccaaagtcttggttcttcgatgtctcataccttcgcttctgctgttggttcatctatctcaagaagcaccacccctgacccccagctgatacggagaactcctagtccttgccttcctccagttggagttcggatggggagttctgataaaaaagttgaagcttctgtttcttcacttaatcatgatggtgctgacattgtggcaactctgtctagcttaagcctatctggaaataagatgtcgaatgtggaaaatgaagttcagactcatgcttaccagaactttggtgatcaggctgatgtgttgtttaatgtaccaaaggaacataggcaattttcaccacggaatttaactcaaaaaactgatgaagacttgcttaatgcccctgaatatgcagttttcccaaatggggggagtaacttcagtaatttgcatgctagtaaggtggcatctcatagcaatagcaagttccctatgcaatcaccacacggtaatgccaacaagaaaggatctttgatgagctcagctggatcagtttctcagtaccagcacttgaatggtgatagccatgacattgatgtatctggatggcatactcatacaggtggttttacttcatccatgctgaacaatcaactgaatcctgatggtgactatggcaatgttctttcgaatcatggtggatcgagttatcagggccaaccaacagagacgatgtacgcacaatgcttgcaggcaaaccctgattcaccccttggcgcagctgcaagcatgagccctttccaagggaggggttttactggttcaggacacttggatagtcctggataccaaaaagcttaccttgggtcattatttggccagcaaaagctacaatatgggatgccatacctgggcaattctggtgctcttaatcaaaatatctatggcaatgattctgcctttggcattggaatgacttatctaacaagcccgccatctactccatatatctcatctccccaaggccatgttgggcaaggaaaccgtctgactcgacttccagcagtggtgaggaacaccgctggaggatccatgggatcgtggaattcagagaatggtctgatggataatggttatgggtcctccttgctggaggaattcaaaagtaacaaaactagatcttttgagctgttagatattgtaggccatgtggtagagttcaggtattatttccttgaaattctaacgtagtcaagttcatttattttggtatgaatctactatggttctctctcttacctttcagttcggatcagtatgggagtcgctttatacagcagaaactagaaactgcttctactgaacagaagaatatgatttttcctgagatccttccccaggcacgtactttgatgactgatgtttttggaaactatgttatacagaagttctttgaatacggaactgaaacgcaaacgaagcaactggcaaccctgcttaagggttttgtgttacagctgagtcttcaaatgtatggctgccgggtgattcagaaggctttggaagttgttgaagtggaacaacaaacacaaatggctttggagcttgatggatctatcatgagatgtgttcgtgatcagaatggcaaccatgtcatccaaaaatgtatagaatgcatccctcaggagaggatacgatttatcatttctgcattttacggacatgtcgtggagctttctatgcatccttatggttgtcgtgttattcagaggatcttggagcattgtgacgatgaaagcactcaaaatgccatgatggaagagatcatgcagtccgtggttactttaacggaggaccagtatggtaattatgtaatccagcatgtcctgcaatatgggaaaccagaagagcgttctactataattgcacaactcgctggacagatagtgaagatgagccagcagaaatttgcatccaatgttgttgagaagtgtcttacttttggttctcctgagcaacggcagattctaatcaatgaaatgcttggcacaactgatgagaacgagccgttacaggcaatgatgaaagaccagttcgcaaactatgttgtgcagaaggttctggagacatgtgatgaccagaaccgtgaattgattctttcccgtatcaaggtccacttgaatgcactgaaaaggtacacctatgggaagcatattgtgacacgtgttgagaagcttattgccgcaggagaacggcgcattggcgcactaccctcctgctgagatggcaatggttaggtcacctgtacagcagaagatagcgaggcctagctttttaccattaccagtagtcgttaatattgagcaagtacaaccgcagaagttaaaaaagaaaggctcccaaatcctttgtaaataaaggagagcctctggaaataaataagaatgagaaaagatgagattttacttgtcctcgaggaaagacttgtatatttgtattgtttttcccccctcttgcaagcagcaggataaagaagttttaaatattttgtcgagaagcaaagcagttactagaaggataaaggttttaggatcatagatgatgggaaggactgctgtagattctccttttttccttgggtttcatcagtcagtgtataagtactaatgtccatgctgatgttaatctctgtaagactgccttcagtttactgaatcttttttttctcttctggtgcctgccaagtgccagcatctgagcagttcttcaaatattacttgtttccaaccactcaactttcgtataatgttcataaaatgtttgtagctactactgaccttgatatgtgatgcatcatgg

SEQ ID NO: 209472 - DNA, 3974 bp, Zea Mays
aaaaggccacacgtcgctttcagcctccgcctccgctcccttcctttcccattcgtctcgtctcgctctcgcctgccgccttcccttcgcgtctcctcgctccggccgcagcagccgcctccgccctccatccgcaaaattacccaatccatcatccccgaaccctaaataaatcctcgatcggccgcgcgcgggaatcaacggatgggaccgcggccggcggctccgtagcggattggaggcgctcggttcgcgggggccgcggttcggctgccgggtggcgcccgcttctagagggaaaccaagaaggaaggaaggagattggaataaagacaggcactgcaacgatggctccatctcaagcggcggcagcggctggccccacctttgaggacctcgagcgcgacctgcaggcagttctcatggaccaaaaccacatgtccccagtggacgacctcggcatgtttcgcagcggcagcgctccccccaccgtcgagggatctcgcacggccattggcgcactcttctctggtccaccgcttcacgccaacagccttggcgccggcggcggcagcggtgggactgcttctggccttgacgtgctcactgatgaggagatacggtcacacccagcgtatctgtcgtactactattctaatgagcacctcaacccaaggcttccgccaccaatggtttccaaagaggactggcgtgcagcgcagtggttccaggctgtgtctggaggtattggggataggaggaggaggcctgcggaggtcgggagtggaaactccctgttctcggtgcagccaggggcaaacgaggttggtggagagaaggcgctgctgagtgatagaatggagaggagtggaaggaatgggctcgcacgacagcagtcttcagagtggcttgggagaggctccgatgggctcatcggcttgtcagatgccagtgcccttgggtctccgcgcaagagctttgctgatgcattgcaggaaaatattagccgtcctgctgttatagccggtcatctttcacgttctaatagccgtaatgttcttgagggcccaactccaatcaggtcatctgattcacgcaagccacaactgcagaataggtcagaatccatgaatggcctgcgatctggatccacttcaccgagtctggtcagggtccaaagtcttggttcttcgatgtctcataccttcgcttctgctgttggttcatctatctcaagaagcaccacccctgacccccagctgatacggagaactcctagtccttgccttcctccagttggagttcggatggggagttctgataaaaaagttgaagcttctgtttcttcacttaatcatgatggtgctgacattgtggcaactctgtctagcttaagcctatctggaaataagatgtcgaatgtggaaaatgaagttcagactcatgcttaccagaactttggtgatcaggctgatgtgttgtttaatgtaccaaaggaacataggcaattttcaccacggaatttaactcaaaaaactgatgaagacttgcttaatgcccctgaatatgcagttttcccaaatggggggagtaacttcagtaatttgcatgctagtaaggtggcatctcatagcaatagcaagttccctatgcaatcaccacacggtaatgccaacaagaaaggatctttgatgagctcagctggatcagtttctcagtaccagcacttgaatggtgatagccatgacattgatgtatctggatggcatactcatacagatggtgactatggcaatgttctttcgaatcatggtggatcgagttatcagggccaaccaacagagacgatgtacgcacaatgcttgcaggcaaaccctgattcaccccttggcgcagctgcaagcatgagccctttccaagggaggggttttactggttcaggacacttggatagtcctggataccaaaaagcttaccttgggtcattatttggccagcaaaagctacaatatgggatgccatacctgggcaattctggtgctcttaatcaaaatatctatggcaatgattctgcctttggcattggaatgacttatctaacaagcccgccatctactccatatatctcatctccccaaggccatgttgggcaaggaaaccgtctgactcgacttccagcagtggtgaggaacaccgctggaggatccatgggatcgtggaattcagagaatggtctgatggataatggttatgggtcctccttgctggaggaattcaaaagtaacaaaactagatcttttgagctgttagatattgtaggccatgtggtagagttcaggtattatttccttgaaattctaacgtagtcaagttcatttattttggtatgaatctactatggttctctctcttacctttcagttcggatcagtatgggagtcgctttatacagcagaaactagaaactgcttctactgaacagaagaatatgatttttcctgagatccttccccaggcacgtactttgatgactgatgtttttggaaactatgttatacagaagttctttgaatacggaactgaaacgcaaacgaagcaactggcaaccctgcttaagggttttgtgttacagctgagtcttcaaatgtatggctgccgggtgattcagaaggctttggaagttgttgaagtggaacaacaaacacaaatggctttggagcttgatggatctatcatgagatgtgttcgtgatcagaatggcaaccatgtcatccaaaaatgtatagaatgcatccctcaggagaggatacgatttatcatttctgcattttacggacatgtcgtggagctttctatgcatccttatggttgtcgtgttattcagaggatcttggagcattgtgacgatgaaagcactcaaaatgccatgatggaagagatcatgcagtccgtggttactttaacggaggaccagtatggtaattatgtaatccagcatgtcctgcaatatgggaaaccagaagagcgttctactataattgcacaactcgctggacagatagtgaagatgagccagcagaaatttgcatccaatgttgttgagaagtgtcttacttttggttctcctgagcaacggcagattctaatcaatgaaatgcttggcacaactgatgagaacgagccgttacaggcaatgatgaaagaccagttcgcaaactatgttgtgcagaaggttctggagacatgtgatgaccagaaccgtgaattgattctttcccgtatcaaggtccacttgaatgcactgaaaaggtacacctatgggaagcatattgtgacacgtgttgagaagcttattgccgcaggagaacggcgcattggcgcactaccctcctgctgagatggcaatggttaggtcacctgtacagcagaagatagcgaggcctagctttttaccattaccagtagtcgttaatattgagcaagtacaaccgcagaagttaaaaaagaaaggctcccaaatcctttgtaaataaaggagagcctctggaaataaataagaatgagaaaagatgagattttacttgtcctcgaggaaagacttgtatatttgtattgtttttcccccctcttgcaagcagcaggataaagaagttttaaatattttgtcgagaagcaaagcagttactagaaggataaaggttttaggatcatagatgatgggaaggactgctgtagattctccttttttccttgggtttcatcagtcagtgtataagtactaatgtccatgctgatgttaatctctgtaagactgccttcagtttactgaatcttttttttctcttctggtgcctgccaagtgccagcatctgagcagttcttcaaatattacttgtttccaaccactcaactttcgtataatgttcataaaatgtttgtagctactactgaccttgatatgtgatgcatcatgg

SEQ ID NO: 209473 - DNA, 3276 bp, Zea Mays
gaaaaggccacacgtcgctttcagcctccgcctccgctcccttcctttcccattcgtctcgtctcgctctcgcctgccgccttcccttcgcgtctcctcgctccggccgcagcagccgcctccgccctccatccgcaaaattacccaatccatcatccccgaaccctaaataaatcctcgatcggccgcgcgcgggaatcaacggatgggaccgcggccggcggctccgtagcggattggaggcgctcggttcgcgggggccgcggttcggctgccgggtggcgcccgcttctagaggaaaatattagccgtcctgctgttatagccggtcatctttcacgttctaatagccgtaatgttcttgagggcccaactccaatcaggtcatctgattcacgcaagccacaactgcagaataggtcagaatccatgaatggcctgcgatctggatccacttcaccgagtctggtcagggtccaaagtcttggttcttcgatgtctcataccttcgcttctgctgttggttcatctatctcaagaagcaccacccctgacccccagctgatacggagaactcctagtccttgccttcctccagttggagttcggatggggagttctgataaaaaagttgaagcttctgtttcttcacttaatcatgatggtgctgacattgtggcaactctgtctagcttaagcctatctggaaataagatgtcgaatgtggaaaatgaagttcagactcatgcttaccagaactttggtgatcaggctgatgtgttgtttaatgtaccaaaggaacataggcaattttcaccacggaatttaactcaaaaaactgatgaagacttgcttaatgcccctgaatatgcagttttcccaaatggggggagtaacttcagtaatttgcatgctagtaaggtggcatctcatagcaatagcaagttccctatgcaatcaccacacggtaatgccaacaagaaaggatctttgatgagctcagctggatcagtttctcagtaccagcacttgaatggtgatagccatgacattgatgtatctggatggcatactcatacagatggtgactatggcaatgttctttcgaatcatggtggatcgagttatcagggccaaccaacagagacgatgtacgcacaatgcttgcaggcaaaccctgattcaccccttggcgcagctgcaagcatgagccctttccaagggaggggttttactggttcaggacacttggatagtcctggataccaaaaagcttaccttgggtcattatttggccagcaaaagctacaatatgggatgccatacctgggcaattctggtgctcttaatcaaaatatctatggcaatgattctgcctttggcattggaatgacttatctaacaagcccgccatctactccatatatctcatctccccaaggccatgttgggcaaggaaaccgtctgactcgacttccagcagtggtgaggaacaccgctggaggatccatgggatcgtggaattcagagaatggtctgatggataatggttatgggtcctccttgctggaggaattcaaaagtaacaaaactagatcttttgagctgttagatattgtaggccatgtggtagagttcaggtattatttccttgaaattctaacgtagtcaagttcatttattttggtatgaatctactatggttctctctcttacctttcagttcggatcagtatgggagtcgctttatacagcagaaactagaaactgcttctactgaacagaagaatatgatttttcctgagatccttccccaggcacgtactttgatgactgatgtttttggaaactatgttatacagaagttctttgaatacggaactgaaacgcaaacgaagcaactggcaaccctgcttaagggttttgtgttacagctgagtcttcaaatgtatggctgccgggtgattcagaaggctttggaagttgttgaagtggaacaacaaacacaaatggctttggagcttgatggatctatcatgagatgtgttcgtgatcagaatggcaaccatgtcatccaaaaatgtatagaatgcatccctcaggagaggatacgatttatcatttctgcattttacggacatgtcgtggagctttctatgcatccttatggttgtcgtgttattcagaggatcttggagcattgtgacgatgaaagcactcaaaatgccatgatggaagagatcatgcagtccgtggttactttaacggaggaccagtatggtaattatgtaatccagcatgtcctgcaatatgggaaaccagaagagcgttctactataattgcacaactcgctggacagatagtgaagatgagccagcagaaatttgcatccaatgttgttgagaagtgtcttacttttggttctcctgagcaacggcagattctaatcaatgaaatgcttggcacaactgatgagaacgagccgttacaggcaatgatgaaagaccagttcgcaaactatgttgtgcagaaggttctggagacatgtgatgaccagaaccgtgaattgattctttcccgtatcaaggtccacttgaatgcactgaaaaggtacacctatgggaagcatattgtgacacgtgttgagaagcttattgccgcaggagaacggcgcattggcgcactaccctcctgctgagatggcaatggttaggtcacctgtacagcagaagatagcgaggcctagctttttaccattaccagtagtcgttaatattgagcaagtacaaccgcagaagttaaaaaagaaaggctcccaaatcctttgtaaataaaggagagcctctggaaataaataagaatgagaaaagatgagattttacttgtcctcgaggaaagacttgtatatttgtattgtttttcccccctcttgcaagcagcaggataaagaagttttaaatattttgtcgagaagcaaagcagttactagaaggataaaggttttaggatcatagatgatgggaaggactgctgtagattctccttttttccttgggtttcatcagtcagtgtataagtactaatgtccatgctgatgttaatctctgtaagactgccttcagtttactgaatcttttttttctcttctggtgcctgccaagtgccagcatctgagcagttcttcaaatattacttgtttccaaccactcaactttcgtataatgttcataaaatgtttgtagctactactgaccttgatatgtgatgcatcatgg

SEQ ID NO: 209474 - DNA, 1794 bp, Zea Mays
cagcattataaatagaagctcttgccatttgcatgatctacgtacgaggtttctatatccttttctcgtccgtcttcaaccccccctccaatttggtctcgtaccatatatcctcttcaagaacagcgggagggagagagagaggagttcgtgatccgccatgctcgacggcgacgacggccatcccttcagtgatgacatctcgagccccatagcggcgcacatcctagacttctacgacgacgacgacggtggctgcggcggcggcggtggcgatctcttcgtgggagtgaacgcggcctcggatatgttcacggtgccatcggaggatgtctcgacgtcatccgtaacgacgcctcctgcaccctgcggcggccatggcgacaacgcgtcgtcgttggacgccgctgcctcggccttctctcccatgccgttcctcgactccaccctctcggctctgctcgaagaagaagacgcaccggttctagacacggaactcctcgccatcgacgactaccggttcgcggcgacggcggtagccggagatgagccacggcccgagcagcagcggttcgcacaggtgccgatggtgcttccggtggcagaacacccgagtagtctgcagacgcagatgagcagcacagcgttcgagctgctgcacgcagcgtcgtcgtcgtcggggtacaccgacaacgactgcttcgcggcggcaatggacgaaggaggaggagggtacgtgggcctagacgaggccctttgccagcagcagcagcatcagctcctgcaacctggcgcgttgctctccgctggcatgatggagactgcagcgcagggttgctacttcgtcaacggcggtccgacagcacagggagtcctgttcggtgccagtggcagcggcgtggtgatgcccatgacggcggggttggaggagatcggcgagtaccagcgcatgatggagagcgccagcgcagcgctggccgccacgcacagccccgacgcggactccgtcgccgcggcgcagcagatggcgtttagcggcaacggcggggaaatgcagatgggcggcggcagcatgagcccggggcggctgccggcggcgacggaggcggcgtcgagcttggaggacaccgacttcaagagcgcccgcatcaccgttgaggagagacgggagaagatccacaggtacatcaagaagcggaacgaacgcaacttcagcaagaagatcaagtacgcttgcaggaagaccctggcggacagcaggccccgcgtgcgcggcagattcgccaagaacgacgactatggcgagccgtcgtcaagggtggcgcacaaccacgacgaatacgaccacatggccgccatgaaggcacaggacatactcgaccccgacgccctgcaggccgccatgaactcctacatgtacaaccacactgttgagtcctggatgtaacgcaaacacgtcgagacgatggcggtttcgggttttctaaattttgttcagtgagccttactttatttggtcgccccatggaataactggtcctggacaaagtataggttataaattgtccagctcgatttgcatgctatagacatcgtgttgatttcaccaacttgagatagaacctggctatagttcagagttttgaatgtagagatttgtactcgctttattgacttccattttcagctccatttttatgacttctcccactcaaaattgaaagaaaaggatctacaattatatctgagcatttgagtcaagaaaaatcttacttcaaacattcctaaaaaaga

SEQ ID NO: 209475 - DNA, 684 bp, Zea Mays
cttacagtgaagaaatctagagttgagtcctaaatatatgctattgcttgcaagaatcctgatattcaacaccattttatacgagatggattcgtttgtgtgaggggctttgataggacagtaagggcaccaaggcccctttatgcaaggttgcattttcctgccagcaaggttgttagaggcaaaaagcctggagcggcaagcgtcgaagaataataggtacatcgaagaaatatagaggagctaacaaaacggatggatagccctaaatgagatgctgacccaataagtcgccgaatcacctccaagttctaacccaatttttgaggcgacatgacctgttaaattatgttccatctatggtaacagcttagatgttcttgtgagtcgcatattctttactctgaaattcaatatagcaaatgaaaaaaaacacagtgcatagtctagttctaattgtacctgtgagtggaatcagttgttgtacaacatgaagatgggcctatttgtacaatggtcatacatgttctttgatcatatactataaacaatgtaacctcatcggccgttatttgattgtttcaaaacaaaggaaaagccttttcaattcatgttgttctctatagttaggaatttatattactttttattttttttataaattctacaagaagcatgaacaag

SEQ ID NO: 209476 - DNA, 6117 bp, Zea Mays
tcatttggataacaatttgatcggcaccataagttacagaaatatgcaggaggagctagggcaaaggatgcatgtacctcatggtatcaatctgtgtttctcaacttcttccgagctctttcaggtggaatcttccattgagctgggtactgcagaagtgaaccctgtaccatctgaaaagttatctgctaactcacaagctgttagagatgatgctggagcagttgaaggtattgacatgaatggaaaacctgtccaaaaacctaagaggaaaaaacataggccaaaggtcattaaagaaggacaatcagcaaagttgcagaagcctaaaactccaaagcctcccaaagaaaatgggaatcagcctactggaaagagaaagtatgtcaggaagaagggactaagcacaccagccaaacaaattccatcagaaggtgctgatacacacactagagctaaaccaggaatagcccaaagatgtttggactttgatgtggaggaccaacatggacatttggatctggtatcacaaacccaggaaacggagatacagactggtcctggggacacacagccatcaatatctggagttgaaagaagtaatgcccaggtatcatgccattggggttggggtggtacaagcagttctattatttcagctgacccaatagttgatatacaaggattacaggcagactgcatacctaaaagagtcaattttgatttgaacaattctatggcaagtcagatgccaaccaattattctagtcgaatggacagctctggacaatttttccagtttggtttaggagaaaaagttcaaacaaatcagttactggattataattgtaatctgccagctagacgtgtctctcatctcagcagctcggtcgatcatatgcgacaccccttagccaattttgaccaatacataagcacatctcaagtttgtacagaaaattcacgcagacattatcagatgcctagtagttctagaatttcagaaaataggacagcagcttctcagtatactgaaagggtgtcaatggggggcaatttcaatcccggagcttgtataggagaaggcacggtaatcaaacaaatggcccaatgttatagacttccagaaagtccacttgtacctcccaaacataatgaaagggatgtgatgaatggaaatctaaacgagttttctgtgtataatgattacttgaatttttctagcaatagtaactaccaaactggagcagcttttggttttcatgattctccagtctattcagatgttcttgcaatgggtaaaaaaagagaacacaatgctatcagtggtcaccagatttcttttgacatcgactttgttaactcaaatagtacaaggaagttctgtattgatgaccttctttccactagctctcaaacatcttattatcctgaagcatgcaaaaggatgagaccagagaatcatagcaatcagctcaatgtaactacgggaaagctttcttcttcatcagcattttctggtagtttgaatacaaataacgtttcaactataaaccctggaattggtaccttggctgatatacaaaggttgatggcccttgagaaatcacaagcttcacaacaaatgattgactttattacgtcgcaaaacaacatggccggtgaaagtactgaacttgctcagcaaaataattctgacaaaggatttgttgctttacataataaaaagttccaaagcctcactgcgcagaacataccattgcctgacagtactgtgaaccaatcgggagaaagtaatatcttgaggaatggaatacatcaaacacaaccttgggaaattacatctaggtcgcatcactctagcgacaattttgctttgccaaataaatggtctggttacttgacagcagggaacacacagttatcaagcatcacagtaaacccatccacagaaaactatattcaaagtaatgctatttatcaatatcaatgtttagaaaacgttgtggctaaggtgccagtattgtctggaacacacaatacttccagtcaggagggccataaccacagcactgctgctactaatgagcatatcagaactacaagtgaggaagttgttagatcctttacccaacgagcaagtgaaccaaccacacatgggaactacaatctcaactcttctagagtaactgcagaagcaaactccactgagaagccaagaaaaaggggccgtccaagaaaagtagtaaaacccaatggggagccaaaagaaagaggtactaaagggaaacaaaatgttagtcatgaaaaacctacatcgcaaaaaggttcacatactgacattttgaaaactaatggtatttcttatgcttctgaaccttccactggaattactcctaggatggctattgtggagtcgaaaagctctgatcaagataaggaaattcatggaggtgtcattcctcaagctacagcaatatcagttgatcttttagatggcataattcaaaagattaagctcttaagcataagcagaccagacaatgttgtggcagagataccaaaagatgctcttgttccttatgaaggtgaatttggtgcactggttgcatttgaggggaagacaaagaaaaaccgttctcgggccaaagtgaacatcgatccagtcaccactatgatgtggaacttattaatgggaccagatatgggtgatggtgctgaagggttagacaaggataaagagaagtggcttgatgaagaaagaaaagtgttcagaggacgtgttgattcattcattgctcgtatgcatctagttcagggggacagacgtttctctcgatggaaaggatcagtcgtggactcagtcgtgggtgtatttcttacccagaatgtttcggatcatctttctagttctgctttcatggcggttgctgccaaatttcctgctaagccagaggtccctgaaaaacctgtggctgagatgtctcatactcctgaacagaaggatagttgctcttgctctggactgtttggtgattctatcaaattgcagggcaagatgttcattgaagagataagtgatgttagatcattaattactacagaagataatgaagaaagtaatagtaatgaattgattggaagctctgccgggtatggagtaaaccatgcaactggaggctgccatgtttcttataggaagtcactaactgaatcccatgaaaatgggctttcaggatctgtttttccaactaccggcttttcaagtgtagtagaaactgaagatggctcattagaggatgttatttcttctcaaaattctgctgtttcttcccagaattccccagattacctttttcacagaacggatccaataggttctagttcgttgcaaaatttcaccgaagagggctatatcatgagaaatatatccaacgggactggcagctcaactgactgctcagggtttctgccaattcaagatccaaaaggcacgcttggattgtcagaatattatggacataatcctcttctagtttcaggtgtgaacaagggtgtgttgcttgatctaaacagatcatatcagccattacatacttctatgccctatgttcagaatagcgagtctgatttcacaggtgtgtcatgtttcagccatatggataaatcattccacacaggccctaatagagtgaatctttctagtgttacacaatctgaggccagtctttaccctactgatcctttgcaacaagacgagttttcaccagtaattaaacaaaacttccaaccattatatagttcagacaaagtgtcattattcaaggagcactgttcctatggaaatgatttttcgaggaacaaaactgaagctgctattatggaaccacttgtctactcaaatcctcaagagctgtacactacctcaacagagcaaatgggtgttgaacaatttcaatcaggatgtggccaacaggacaatgatgtgagagttcagacaacatcatatgaaaggcatcagtcttcaaccttgtgtggaaaccagaactctcagttagagatcttgcaaggagttgcttcaggctcaacacagaagttcattgatactcaaaagagtccgtcagaagttcaacaaaacggatcaaaagctaagaaggtacggggtcgacctaaaacgaaaacttatgactgggacagtttacgaaaagaagtgttttctaatggtggggataaacaaagaaataatgatgcaagggatactgttgattgggaggcagttaggcaagcagaagtccgagaaatatctgaaactatcagagagagaggaatgaataacatgctagcagaacgaataaaggaattcctgaaccgattggtgacagaccatggaggtattgatcttgaatggctaagagatgttccaccggacaaagcaaaggacttccttctaagcattagagggcttggactcaaaagtgttgagtgcgttcgtctcttgacgctacatcatatggcttttccagtggacacaaatgttggtcggatatgtgtgaggcttggatgggtgccgcttcaaccattgccagagtctcttcagttgcacctattggaaatgtatgagcttcactaccaaatgattacttttggaaaggttttctgcacaaaaagtaagcctaattgcaattcatgtccattgagagctgaatgtaagcactttgctagtgcatttgcaagtgctaggcttgctcttcccgcacctgaagaaaaacgtttggctacatcggaggatccaaatgttgtagagttttgtcaccaaacatacataaattcaggggctgttggcgaacttgagtggagtgcgaactatcctaagcatgctgtttgtggtaacctgcagccgttcattgaggaaccactgagcccagaacctgaacctgaaaatgtagaggcgaaggacggtgcaatagaggatttctttaatgaagaccctgatgaaattcctactattaatcttaatattgaggagtttacacagaacttgaagaactatatgcaagcaaaccatgttgagattgagtatgctgacatgtcaaaggcattggttgccatcacccctgaagctgcttccattccaactccaaagctcaagaatgtcagtcgtcttaggacagaacaccaagtttatgaactgccagattcacaccctcttctggaaggatttgaacagagagaaccagatgatccctgtccatatcttctttccatatggaccccaggtgaaactgcacaatcaaccaatgcgcccaagacattctgtgattcaggggagactggtcaactatgtggaagtttaacatgctttagttgcaacagtttacgagaaatgcaggctcagaaagtcagaggaacactcttgataccatgccggacagcaatgagaggaagcttcccacttaatgggacatattttcaagttaatgaggtttaacgactgaagagatacaacaatgcttttggagaggattcgtttgtgtgaggggctttgataggacagtaagggcaccaaggcccctttatgcaaggttgcattttcctgccagcaaggttgttagaggcaaaaagcctggagcggcaagcgtcgaagaataataggtacatcgaagaaatatagaggagctaacaaaacggatggatagccctaaatgagatgctgacccaataagtcgccgaatcacctccaagttctaacccaatttttgaggcgacatgacctgttaaattatgttccatctatggtaacagcttagatgttcttgtgagtcgcatattctttactctgaaattcaatatagcaaatgaaaaaaaacacagtgcatagtctagttctaattgtacctgtgagtggaatcagttgttgtacaacatgaagatgggcctatttgtacaatggtcatacatgttctttgatcatatactataaacaatgtaacctcatcggccgttatttgattgtttcaaaacaaaggaaaagccttttcaattcatgttgttctctatagttaggaatttatattactttttattttttttataaattctacaagaagcatgaacaag

SEQ ID NO: 209477 - DNA, 6249 bp, Zea Mays
tttctctctctagatagactgtggttcctctcacccagagtcgcagcgacccaaccacctcccccccccgtccctctctctctcccttctgctggtctagttttggtttccctctcgctttccttcgctcctaggcgcggctccggcgggcggaagaggagggagaggcaggcggcggcccccggcagttcctccgtccgcggagcccagagggaggagggggaggcctggtctggggctgtccgctgaatctgcttctccgaagatcgggtggaccacgggactcggcgggcgcgcccgatctgctccgccgtcgaggtgaagtcggctgatatgacgtacctcatttggataacaatttgatcggcaccataagttacagaaatatgcaggaggagctagggcaaaggatgcatgtacctcatggtatcaatctgtgtttctcaacttcttccgagctctttcaggtggaatcttccattgagctgggtactgcagaagtgaaccctgtaccatctgaaaagttatctgctaactcacaagctgttagagatgatgctggagcagttgaaggtattgacatgaatggaaaacctgtccaaaaacctaagaggaaaaaacataggccaaaggtcattaaagaaggacaatcagcaaagttgcagaagcctaaaactccaaagcctcccaaagaaaatgggaatcagcctactggaaagagaaagtatgtcaggaagaagggactaagcacaccagccaaacaaattccatcagaaggtgctgatacacacactagagctaaaccaggaatagcccaaagatgtttggactttgatgtggaggaccaacatggacatttggatctggtatcacaaacccaggaaacggagatacagactggtcctggggacacacagccatcaatatctggagttgaaagaagtaatgcccaggtatcatgccattggggttggggtggtacaagcagttctattatttcagctgacccaatagttgatatacaaggattacaggcagactgcatacctaaaagagtcaattttgatttgaacaattctatggcaagtcagatgccaaccaattattctagtcgaatggacagctctggacaatttttccagtttggtttaggagaaaaagttcaaacaaatcagttactggattataattgtaatctgccagctagacgtgtctctcatctcagcagctcggtcgatcatatgcgacaccccttagccaattttgaccaatacataagcacatctcaagtttgtacagaaaattcacgcagacattatcagatgcctagtagttctagaatttcagaaaataggacagcagcttctcagtatactgaaagggtgtcaatggggggcaatttcaatcccggagcttgtataggagaaggcacggtaatcaaacaaatggcccaatgttatagacttccagaaagtccacttgtacctcccaaacataatgaaagggatgtgatgaatggaaatctaaacgagttttctgtgtataatgattacttgaatttttctagcaatagtaactaccaaactggagcagcttttggttttcatgattctccagtctattcagatgttcttgcaatgggtaaaaaaagagaacacaatgctatcagtggtcaccagatttcttttgacatcgactttgttaactcaaatagtacaaggaagttctgtattgatgaccttctttccactagctctcaaacatcttattatcctgaagcatgcaaaaggatgagaccagagaatcatagcaatcagctcaatgtaactacgggaaagctttcttcttcatcagcattttctggtagtttgaatacaaataacgtttcaactataaaccctggaattggtaccttggctgatatacaaaggttgatggcccttgagaaatcacaagcttcacaacaaatgattgactttattacgtcgcaaaacaacatggccggtgaaagtactgaacttgctcagcaaaataattctgacaaaggatttgttgctttacataataaaaagttccaaagcctcactgcgcagaacataccattgcctgacagtactgtgaaccaatcgggagaaagtaatatcttgaggaatggaatacatcaaacacaaccttgggaaattacatctaggtcgcatcactctagcgacaattttgctttgccaaataaatggtctggttacttgacagcagggaacacacagttatcaagcatcacagtaaacccatccacagaaaactatattcaaagtaatgctatttatcaatatcaatgtttagaaaacgttgtggctaaggtgccagtattgtctggaacacacaatacttccagtcaggagggccataaccacagcactgctgctactaatgagcatatcagaactacaagtgaggaagttgttagatcctttacccaacgagcaagtgaaccaaccacacatgggaactacaatctcaactcttctagagtaactgcagaagcaaactccactgagaagccaagaaaaaggggccgtccaagaaaagtagtaaaacccaatggggagccaaaagaaagaggtactaaagggaaacaaaatgttagtcatgaaaaacctacatcgcaaaaaggttcacatactgacattttgaaaactaatggtatttcttatgcttctgaaccttccactggaattactcctaggatggctattgtggagtcgaaaagctctgatcaagataaggaaattcatggaggtgtcattcctcaagctacagcaatatcagttgatcttttagatggcataattcaaaagattaagctcttaagcataagcagaccagacaatgttgtggcagagataccaaaagatgctcttgttccttatgaaggtgaatttggtgcactggttgcatttgaggggaagacaaagaaaaaccgttctcgggccaaagtgaacatcgatccagtcaccactatgatgtggaacttattaatgggaccagatatgggtgatggtgctgaagggttagacaaggataaagagaagtggcttgatgaagaaagaaaagtgttcagaggacgtgttgattcattcattgctcgtatgcatctagttcagggggacagacgtttctctcgatggaaaggatcagtcgtggactcagtcgtgggtgtatttcttacccagaatgtttcggatcatctttctaggatctgtttttccaactaccggcttttcaagtgtagtagaaactgaagatggctcattagaggatgttatttcttctcaaaattctgctgtttcttcccagaattccccagattacctttttcacagaacggatccaataggttctagttcgttgcaaaatttcaccgaagagggctatatcatgagaaatatatccaacgggactggcagctcaactgactgctcagggtttctgccaattcaagatccaaaaggcacgcttggattgtcagaatattatggacataatcctcttctagtttcaggtgtgaacaagggtgtgttgcttgatctaaacagatcatatcagccattacatacttctatgccctatgttcagaatagcgagtctgatttcacaggtgtgtcatgtttcagccatatggataaatcattccacacaggccctaatagagtgaatctttctagtgttacacaatctgaggccagtctttaccctactgatcctttgcaacaagacgagttttcaccagtaattaaacaaaacttccaaccattatatagttcagacaaagtgtcattattcaaggagcactgttcctatggaaatgatttttcgaggaacaaaactgaagctgctattatggaaccacttgtctactcaaatcctcaagagctgtacactacctcaacagagcaaatgggtgttgaacaatttcaatcaggatgtggccaacaggacaatgatgtgagagttcagacaacatcatatgaaaggcatcagtcttcaaccttgtgtggaaaccagaactctcagttagagatcttgcaaggagttgcttcaggctcaacacagaagttcattgatactcaaaagagtccgtcagaagttcaacaaaacggatcaaaagctaagaaggtacggggtcgacctaaaacgaaaacttatgactgggacagtttacgaaaagaagtgttttctaatggtggggataaacaaagaaataatgatgcaagggatactgttgattgggaggcagttaggcaagcagaagtccgagaaatatctgaaactatcagagagagaggaatgaataacatgctagcagaacgaataaaggaattcctgaaccgattggtgacagaccatggaggtattgatcttgaatggctaagagatgttccaccggacaaagcaaaggacttccttctaagcattagagggcttggactcaaaagtgttgagtgcgttcgtctcttgacgctacatcatatggcttttccagtggacacaaatgttggtcggatatgtgtgaggcttggatgggtgccgcttcaaccattgccagagtctcttcagttgcacctattggaaatgtatgagcttcactaccaaatgattacttttggaaaggttttctgcacaaaaagtaagcctaattgcaattcatgtccattgagagctgaatgtaagcactttgctagtgcatttgcaagtgctaggcttgctcttcccgcacctgaagaaaaacgtttggctacatcggaggatccaaatgttgtagagttttgtcaccaaacatacataaattcaggggctgttggcgaacttgagtggagtgcgaactatcctaagcatgctgtttgtggtaacctgcagccgttcattgaggaaccactgagcccagaacctgaacctgaaaatgtagaggcgaaggacggtgcaatagaggatttctttaatgaagaccctgatgaaattcctactattaatcttaatattgaggagtttacacagaacttgaagaactatatgcaagcaaaccatgttgagattgagtatgctgacatgtcaaaggcattggttgccatcacccctgaagctgcttccattccaactccaaagctcaagaatgtcagtcgtcttaggacagaacaccaagtttatgaactgccagattcacaccctcttctggaaggatttgaacagagagaaccagatgatccctgtccatatcttctttccatatggaccccaggtgaaactgcacaatcaaccaatgcgcccaagacattctgtgattcaggggagactggtcaactatgtggaagtttaacatgctttagttgcaacagtttacgagaaatgcaggctcagaaagtcagaggaacactcttgataccatgccggacagcaatgagaggaagcttcccacttaatgggacatattttcaagttaatgaggtatttgctgaccattgttcaagccaaaatccaattgatgtcccacgaagttggatatgggacctcccaagacgaactgtttactttggaacctcagttcctacaatatttagaggtttaacgactgaagagatacaacaatgcttttggagaggattcgtttgtgtgaggggctttgataggacagtaagggcaccaaggcccctttatgcaaggttgcattttcctgccagcaaggttgttagaggcaaaaagcctggagcggcaagcgtcgaagaataataggtacatcgaagaaatatagaggagctaacaaaacggatggatagccctaaatgagatgctgacccaataagtcgccgaatcacctccaagttctaacccaatttttgaggcgacatgacctgttaaattatgttccatctatggtaacagcttagatgttcttgtgagtcgcatattctttactctgaaattcaatatagcaaatgaaaaaaaacacagtgcatagtctagttctaattgtacctgtgagtggaatcagttgttgtacaacatgaagatgggcctatttgtacaatggtcatacatgttctttgatcatatactataaacaatgtaacctcatcggccgttatttgattgtttcaaaacaaaggaaaagccttttcaattcatgttgttctctatagttaggaatttatattactttttattttttttataaattctacaagaagcatgaacaag

SEQ ID NO: 209478 - DNA, 4767 bp, Zea Mays
cagcgacccaaccacctcccccccccgtccctctctctctcccttctgctggtctagttttggtttccctctcgctttccttcgctcctaggcgcggctccggcgggcggaagaggagggagaggcaggcggcggcccccggcagttcctccgtccgcggagcccagagggaggagggggaggcctggtctggggctgtccgctgaatctgcttctccgaagatcgggtggaccacgggactcggcgggcgcgcccgatctgctccgccgtcgaggtgaagtcggctgatatgacgtacctcatttggataacaatttgatcggcaccataagttacagaaatatgcaggaggagctagggcaaaggatgcatgtacctcatggtatcaatctgtgtttctcaacttcttccgagctctttcaggtggaatcttccattgagctgggtactgcagaagtgaaccctgtaccatctgaaaagttatctgctaactcacaagctgttagagatgatgctggagcagttgaaggtattgacatgaatggaaaacctgtccaaaaacctaagaggaaaaaacataggccaaaggtcattaaagaaggacaatcagcaaagttgcagaagcctaaaactccaaagcctcccaaagaaaatgggaatcagcctactggaaagagaaagtatgtcaggaagaagggactaagcacaccagccaaacaaattccatcagaaggtgctgatacacacactagagctaaaccaggaatagcccaaagatgtttggactttgatgtggaggaccaacatggacatttggatctggtatcacaaacccaggaaacggagatacagactggtcctggggacacacagccatcaatatctggagttgaaagaagtaatgcccaggtatcatgccattggggttggggtggtacaagcagttctattatttcagctgacccaatagttgatatacaaggattacaggcagactgcatacctaaaagagtcaattttgatttgaacaattctatggcaagtcagatgccaaccaattattctagtcgaatggacagctctggacaatttttccagtttggtttaggagaaaaagttcaaacaaatcagttactggattataattgtaatctgccagctagacgtgtctctcatctcagcagctcggtcgatcatatgcgacaccccttagccaattttgaccaatacataagcacatctcaagtttgtacagaaaattcacgcagacattatcagatgcctagtagttctagaatttcagaaaataggacagcagcttctcagtatactgaaagggtgtcaatggggggcaatttcaatcccggagcttgtataggagaaggcacggtaatcaaacaaatggcccaatgttatagacttccagaaagtccacttgtacctcccaaacataatgaaagggatgtgatgaatggaaatctaaacgagttttctgtgtataatgattacttgaatttttctagcaatagtaactaccaaactggagcagcttttggttttcatgattctccagtctattcagatgttcttgcaatgggtaaaaaaagagaacacaatgctatcagtggtcaccagatttcttttgacatcgactttgttaactcaaatagtacaaggaagttctgtattgatgaccttctttccactagctctcaaacatcttattatcctgaagcatgcaaaaggatgagaccagagaatcatagcaatcagctcaatgtaactacgggaaagctttcttcttcatcagcattttctggtagtttgaatacaaataacgtttcaactataaaccctggaattggtaccttggctgatatacaaaggttgatggcccttgagaaatcacaagcttcacaacaaatgattgactttattacgtcgcaaaacaacatggccggtgaaagtactgaacttgctcagcaaaataattctgacaaaggatttgttgctttacataataaaaagttccaaagcctcactgcgcagaacataccattgcctgacagtactgtgaaccaatcgggagaaagtaatatcttgaggaatggaatacatcaaacacaaccttgggaaattacatctaggtcgcatcactctagcgacaattttgctttgccaaataaatggtctggttacttgacagcagggaacacacagttatcaagcatcacagtaaacccatccacagaaaactatattcaaagtaatgctatttatcaatatcaatgtttagaaaacgttgtggctaaggtgccagtattgtctggaacacacaatacttccagtcaggagggccataaccacagcactgctgctactaatgagcatatcagaactacaagtgaggaagttgttagatcctttacccaacgagcaagtgaaccaaccacacatgggaactacaatctcaactcttctagagtaactgcagaagcaaactccactgagaagccaagaaaaaggggccgtccaagaaaagtagtaaaacccaatggggagccaaaagaaagaggtactaaagggaaacaaaatgttagtcatgaaaaacctacatcgcaaaaaggttcacatactgacattttgaaaactaatggtatttcttatgcttctgaaccttccactggaattactcctaggatggctattgtggagtcgaaaagctctgatcaagataaggaaattcatggaggtgtcattcctcaagctacagcaatatcagttgatcttttagatggcataattcaaaagattaagctcttaagcataagcagaccagacaatgttgtggcagagataccaaaagatgctcttgttccttatgaaggtgaatttggtgcactggttgcatttgaggggaagacaaagaaaaaccgttctcgggccaaagtgaacatcgatccagtcaccactatgatgtggaacttattaatgggaccagatatgggtgatggtgctgaagggttagacaaggataaagagaagtggcttgatgaagaaagaaaagtgttcagaggacgtgttgattcattcattgctcgtatgcatctagttcagggggacagacgtttctctcgatggaaaggatcagtcgtggactcagtcgtgggtgtatttcttacccagaatgtttcggatcatctttctagttctgctttcatggcggttgctgccaaatttcctgctaagccagaggtccctgaaaaacctgtggctgagatgtctcatactcctgaacagaaggatagttgctcttgctctggactgtttggtgattctatcaaattgcagggcaagatgttcattgaagagataagtgatgttagatcattaattactacagaagataatgaagaaagtaatagtaatgaattgattggaagctctgccgggtatggagtaaaccatgcaactggaggctgccatgtttcttataggaagtcactaactgaatcccatgaaaatgggctttcaggatctgtttttccaactaccggcttttcaagtgtagtagaaactgaagatggctcattagaggatgttatttcttctcaaaattctgctgtttcttcccagaattccccagattacctttttcacagaacggatccaataggttctagttcgttgcaaaatttcaccgaagagggctatatcatgagaaatatatccaacgggactggcagctcaactgactgctcagggtttctgccaattcaagatccaaaaggcacgcttggattgtcagaatattatggacataatcctcttctagtttcaggtgtgaacaagggtgtgttgcttgatctaaacagatcatatcagccattacatacttctatgccctatgttcagaatagcgagtctgatttcacaggtgtgtcatgtttcagccatatggataaatcattccacacaggccctaatagagtgaatctttctagtgttacacaatctgaggccagtctttaccctactgatcctttgcaacaagacgagttttcaccagtaattaaacaaaacttccaaccattatatagttcagacaaagtgtcattattcaaggagcactgttcctatggaaatgatttttcgaggaacaaaactgaagctgctattatggaaccacttgtctactcaaatcctcaagagctgtacactacctcaacagagcaaatgggtgttgaacaatttcaatcaggatgtggccaacaggacaatgatgtgagagttcagacaacatcatatgaaaggcatcagtcttcaaccttgtgtggaaaccagaactctcagttagagatcttgcaaggagttgcttcaggctcaacacagaagttcattgatactcaaaagagtccgtcagaagttcaacaaaacggatcaaaagctaagaaggtacggggtcgacctaaaacgaaaacttatgactgggacagtttacgaaaagaagtgttttctaatggtggggataaacaaagaaataatgatgcaagggatactgttgattgggaggcagttaggcaagcagaagtccgagaaatatctgaaactatcagagagagaggaatgaataacatgctagcagaacgaataaaggaattcctgaaccgattggtgacagaccatggaggtattgatcttgaatggctaagagatgttccaccggacaaagcaaagcaaaatgcgtcagcaccggtctagggcta

SEQ ID NO: 209479 - DNA, 4911 bp, Zea Mays
cagcgacccaaccacctcccccccccgtccctctctctctcccttctgctggtctagttttggtttccctctcgctttccttcgctcctaggcgcggctccggcgggcggaagaggagggagaggcaggcggcggcccccggcagttcctccgtccgcggagcccagagggaggagggggaggcctggtctggggctgtccgctgaatctgcttctccgaagatcgggtggaccacgggactcggcgggcgcgcccgatctgctccgccgtcgaggtgaagtcggctgatatgacgtacctcatttggataacaatttgatcggcaccataagttacagaaatatgcaggaggagctagggcaaaggatgcatgtacctcatggtatcaatctgtgtttctcaacttcttccgagctctttcaggtggaatcttccattgagctgggtactgcagaagtgaaccctgtaccatctgaaaagttatctgctaactcacaagctgttagagatgatgctggagcagttgaaggtattgacatgaatggaaaacctgtccaaaaacctaagaggaaaaaacataggccaaaggtcattaaagaaggacaatcagcaaagttgcagaagcctaaaactccaaagcctcccaaagaaaatgggaatcagcctactggaaagagaaagtatgtcaggaagaagggactaagcacaccagccaaacaaattccatcagaaggtgctgatacacacactagagctaaaccaggaatagcccaaagatgtttggactttgatgtggaggaccaacatggacatttggatctggtatcacaaacccaggaaacggagatacagactggtcctggggacacacagccatcaatatctggagttgaaagaagtaatgcccaggtatcatgccattggggttggggtggtacaagcagttctattatttcagctgacccaatagttgatatacaaggattacaggcagactgcatacctaaaagagtcaattttgatttgaacaattctatggcaagtcagatgccaaccaattattctagtcgaatggacagctctggacaatttttccagtttggtttaggagaaaaagttcaaacaaatcagttactggattataattgtaatctgccagctagacgtgtctctcatctcagcagctcggtcgatcatatgcgacaccccttagccaattttgaccaatacataagcacatctcaagtttgtacagaaaattcacgcagacattatcagatgcctagtagttctagaatttcagaaaataggacagcagcttctcagtatactgaaagggtgtcaatggggggcaatttcaatcccggagcttgtataggagaaggcacggtaatcaaacaaatggcccaatgttatagacttccagaaagtccacttgtacctcccaaacataatgaaagggatgtgatgaatggaaatctaaacgagttttctgtgtataatgattacttgaatttttctagcaatagtaactaccaaactggagcagcttttggttttcatgattctccagtctattcagatgttcttgcaatgggtaaaaaaagagaacacaatgctatcagtggtcaccagatttcttttgacatcgactttgttaactcaaatagtacaaggaagttctgtattgatgaccttctttccactagctctcaaacatcttattatcctgaagcatgcaaaaggatgagaccagagaatcatagcaatcagctcaatgtaactacgggaaagctttcttcttcatcagcattttctggtagtttgaatacaaataacgtttcaactataaaccctggaattggtaccttggctgatatacaaaggttgatggcccttgagaaatcacaagcttcacaacaaatgattgactttattacgtcgcaaaacaacatggccggtgaaagtactgaacttgctcagcaaaataattctgacaaaggatttgttgctttacataataaaaagttccaaagcctcactgcgcagaacataccattgcctgacagtactgtgaaccaatcgggagaaagtaatatcttgaggaatggaatacatcaaacacaaccttgggaaattacatctaggtcgcatcactctagcgacaattttgctttgccaaataaatggtctggttacttgacagcagggaacacacagttatcaagcatcacagtaaacccatccacagaaaactatattcaaagtaatgctatttatcaatatcaatgtttagaaaacgttgtggctaaggtgccagtattgtctggaacacacaatacttccagtcaggagggccataaccacagcactgctgctactaatgagcatatcagaactacaagtgaggaagttgttagatcctttacccaacgagcaagtgaaccaaccacacatgggaactacaatctcaactcttctagagtaactgcagaagcaaactccactgagaagccaagaaaaaggggccgtccaagaaaagtagtaaaacccaatggggagccaaaagaaagaggtactaaagggaaacaaaatgttagtcatgaaaaacctacatcgcaaaaaggttcacatactgacattttgaaaactaatggtatttcttatgcttctgaaccttccactggaattactcctaggatggctattgtggagtcgaaaagctctgatcaagataaggaaattcatggaggtgtcattcctcaagctacagcaatatcagttgatcttttagatggcataattcaaaagattaagctcttaagcataagcagaccagacaatgttgtggcagagataccaaaagatgctcttgttccttatgaaggtgaatttggtgcactggttgcatttgaggggaagacaaagaaaaaccgttctcgggccaaagtgaacatcgatccagtcaccactatgatgtggaacttattaatgggaccagatatgggtgatggtgctgaagggttagacaaggataaagagaagtggcttgatgaagaaagaaaagtgttcagaggacgtgttgattcattcattgctcgtatgcatctagttcagggggacagacgtttctctcgatggaaaggatcagtcgtggactcagtcgtgggtgtatttcttacccagaatgtttcggatcatctttctagttctgctttcatggcggttgctgccaaatttcctgctaagccagaggtccctgaaaaacctgtggctgagatgtctcatactcctgaacagaaggatagttgctcttgctctggactgtttggtgattctatcaaattgcagggcaagatgttcattgaagagataagtgatgttagatcattaattactacagaagataatgaagaaagtaatagtaatgaattgattggaagctctgccgggtatggagtaaaccatgcaactggaggctgccatgtttcttataggaagtcactaactgaatcccatgaaaatgggctttcaggatctgtttttccaactaccggcttttcaagtgtagtagaaactgaagatggctcattagaggatgttatttcttctcaaaattctgctgtttcttcccagaattccccagattacctttttcacagaacggatccaataggttctagttcgttgcaaaatttcaccgaagagggctatatcatgagaaatatatccaacgggactggcagctcaactgactgctcagggtttctgccaattcaagatccaaaaggcacgcttggattgtcagaatattatggacataatcctcttctagtttcaggtgtgaacaagggtgtgttgcttgatctaaacagatcatatcagccattacatacttctatgccctatgttcagaatagcgagtctgatttcacaggtgtgtcatgtttcagccatatggataaatcattccacacaggccctaatagagtgaatctttctagtgttacacaatctgaggccagtctttaccctactgatcctttgcaacaagacgagttttcaccagtaattaaacaaaacttccaaccattatatagttcagacaaagtgtcattattcaaggagcactgttcctatggaaatgatttttcgaggaacaaaactgaagctgctattatggaaccacttgtctactcaaatcctcaagagctgtacactacctcaacagagcaaatgggtgttgaacaatttcaatcaggatgtggccaacaggacaatgatgtgagagttcagacaacatcatatgaaaggcatcagtcttcaaccttgtgtggaaaccagaactctcagttagagatcttgcaaggagttgcttcaggctcaacacagaagttcattgatactcaaaagagtccgtcagaagttcaacaaaacggatcaaaagctaagaaggtacggggtcgacctaaaacgaaaacttatgactgggacagtttacgaaaagaagtgttttctaatggtggggataaacaaagaaataatgatgcaagggatactgttgattgggaggcagttaggcaagcagaagtccgagaaatatctgaaactatcagagagagaggaatgaataacatgctagcagaacgaataaaggaattcctgaaccgattggtgacagaccatggaggtattgatcttgaatggctaagagatgttccaccggacaaagcaaacaaggcacgccagcgagtagaaggctacaaacagtatcagagccgctatcgttgttgggtcgtgcttgcaaccatgcagcacagacgaactgcctcactactatgtcgccgttaggagatgaggagcggctctagcaatggcgatcgcagcctagtgatccatcgggtcatgag

SEQ ID NO: 209480 - DNA, 2832 bp, Zea Mays
caccacttgcggtgcgcccatcgaccaccgctccctccttaattccgcctctcatctcaccaagtcaccatccacccacctgctcgacccgcctccgtccgcctctctccattcaatcacgccatcgccacgcctcctccgcttctcagttctccctctctgcgcccacaagcgccaaatcattttcaccggaggccatggccccgctgcctccgggcccagagatggaggtaatgagtggatggttgtggaagactgcgctcatggaagttcccagaaaacatcacagcccaccaaaatggtcagtcatactatggatgcttgtcacagccaacctctggataatgtgcagcagcagtacccagaagaaagttctcatgccagggttcagcgcctcggaaatggattacattgataacgatgggaagtttcttctctccaatggctatgtctttggctttggctttgccaccgtcagcgtgtcagacagcacatactacgttcttgcagtagtccacttgcccaccacttctattgtctggtctgctaatgctaactctccagtttctcattcagacaactttgtgtttgacaaggatggcaatgcctacctgcagtctggaggttccacggtgtggactgccaatatctccggcaagggggccacctctatgcagctgctagactcgggcaatcttgtagtgtttggcaaggacggctcttctcctctgtggcagagtttcagccatccaacagacacacttctgtctggacaaagcttcatcgaggggatgagtttgttgagccattccaatgcacagaacatgacctatacacttgagatcaaatctggggacatgttgttgtatgcaggctttcagttgccccaaccgtactggtccgctctgcaggataacagggtgatcatcgacaagaatggcaacaataacatatactctgcaaacctgagttcaggttcctggtcgttttatgatcaatcagggcttcttcaatcacagcttgtcattgcacagcagcagggtgatgctaacaccacactggctgctgtcctcggtaatgatggtttgattaacttctatatgctccagagtgtgaatggcaagagtgctcttcctatcacagttccacaggactcgtgtgacatgcctgcccactgcaagccgtactccatttgcaacagcgggacagggtgccagtgtccttcagccctcagctcctatgcaaactgcgaccctggcgtcatatcaccatgcaactcgaagaacaagtttcagcttgttcaactggacagtgctgttgggtatgtcggcactagattcacactgcctgtgcccaagacaaacctcacaggatgcaggaatgcctgcatgggtaactgctcatgcattgctgtattcttcgaccagacttcaggaaattgcttccttttcgaccagataggaagcttgcaacagaaagatggaggatggtggtggttcgtcagaagatgatggtttcctgcacactatatcaggagcaccgacacggttcacttacaggcagctccaggatgcgacaaacaacttctcagacaagcttggccagggagggtttggatctgtgtatcttggtacgctgcctgatggcagccgcatcgctgtaaagaagctagagggcatgggacaagggaagaaagaattccgttctgaggtgaccatcattggcagcatacatcacatccatcttgttaaactccgaggcttttgcgctgaaggagcgcacaggctccttgcatacgagtacatggcaaaggggtctctagatagatggattttccaaaggaacgaggattcctccctgcttgactgggacacgaggtttagcatcgcccttggaacagccaaggggttggcgtacctccaccatgactgtgagtcgaagatcattcactgtgacatcaagcctgagaatgttctccttgacgacaacttcctcgcgaaggtgtcagacttcggcctcgccaagctgatgaccagggagcagagccatgtgttcacgacgctcaagggcactcggggctatcttgcacccgaatggatcaccaactatgccatctcagagaagtgcgacgtgtacagctacgggatggttctcctcgagataatcagtgggaggaagagctatgatcctgtggaaggttcggagaaggctcacttcccctcctacgcttttaagaagctggaagaaggtgacctccgcgatatctccgactccaagctaaaatacaagggccaggatagccggattgagatggcaatcaaggtcgccttgtggtgcatccaggaggacttctatcagaggccgtccatgtccaaggttgtccagatgctggaaggcgtctgcgacgtgccccagccaccaatgtcttcgcatattggataccggctgtacgcgaatgccttcaaatctagcagcgaagagggcacgtcgtctgggatgtcagactacaatagtgatgccttgctttctgctgtgcggctctctgggcccaggtgatatggttatgtacattgctctgctttagttagcatggcgaatcgatgatgtccaatttttggggaaggccattcgtttgttcgtagtcatgacatatatgttgaaagcttgaggtgtttagttcgaattttctgaaatgccctaaatggggcacaatttcacaccttagaaaagtcagtttgcaatttcacaaaacaccaaaaaaaaatctatctcgaagctacgaccaggtgtatataccaggatttggaaattgcaatactggctgactttgat

SEQ ID NO: 209481 - DNA, 1602 bp, Zea Mays
cttgctcctacaggttcagatctctcatcggcccccactccattagtccatttccattcccatcccgaccccgtcttgccaccggctacacgctctcggagtctcggacgccgcccaaatggaggccatccggaagcaggcctcaaagctccgggagcaggtagctcggcagcagcaggcggtgatgaagcagttcgggggcgggtacggcgcagacggcgtgttcgctgacgaggctgaggcgcaacagcactccaagctcgagaaactctacatctctacgcgcgcggccaagcacttccaaagggatatagttcggggcgtcgagggctacatagtcacggggtcgaagcaagtcgagatcggtggacagctgaaaccctgttgccatttcggtgaacacataaatttgaatttcgaaattgttaatttaatgtgctttgtgttaatagggaacaagttatgtgaggatgggaagaagtatggcactgagaacacttgtaccagtggtagcacactgtcgaaggcggcattaagttttgctaaggcacggtccatgatggaaaaggaaaggggtaacctgctgaaagcccttggcacacaggttgcagaaccactgagagctatggttatgggagctcctttggaggatgcccgccacctcgcccaaaggctattgaagtttcaaaacgccaaatgaaactaagagaagcatctggaaatagtgatatgatttcaaggctagaagcggctgagtcaaagctgcaggagttgaaatcaaatatgggggttttgggcaaagaagctttggccgcaatgactgccgttgaaggccaacagcaaagactgacactgcagcgtcttattgcattggttgaatcagagagaaactaccaccaaaaggtcctacaaattcttgatcaacttgagagagagatggtatctgagcgccaaagaattgaaggggcacctcctccggtggttgagagttccatgcctccaccgcctgcatatgaagaagtcaatggtatattcatgaggaatacggtcgcagagttggtcgagaccgtggagtatttcctggctgaggcaatccaatcatatcgagcagagagcgacactgagctcaacctttcagctggtgactacatagtggtccgaaaggtgtcgaacaatggatgggccgaaggtgaatgcagggggagagctggctggttcccctacgactacatcgagaaacgagagcgtgtgcttgcaagtaaagtcgcgcaagttttctaaaacttttgctgagacatccatatattcccggggatgtgcaatgtgtattatgcttgatcgtcagaagagaagatctgtaattttgctggaagctgcctgttggatggcttgttcctgcctggccgtctgcattgttcaaattcatgtggcaggaactgaacattattaatgcttaatcttcattcttcagttatcccgttaatatgtatccatactttttgtttgtttgtttgaagcatacaacaagacgagaaatcaagcgctaattattctgtatcgacaacaagatttatttgaaatcgattcttaatgcgagtgtcg

SEQ ID NO: 209482 - DNA, 1640 bp, Zea Mays
ctccaaactccgccctgacctcggcatcctcgtcggtggcagaaaccgggagaaaggcgagtccattgcagccaagcttgggggccaatctgagttcgtccaggtcgacacccgcaacgcaggcatgttggaggaagcgctgcagggtgtggatttggttgtccatactgctggacctttccagagggcggaggagtgcaccgtattgcaggcggcgatatctactaagacaccatacattgatgtctgcgatgacacggactattcttggagagcaaagggcttccatgagcaagcaaaagctgccggtgttccagctattactactgctggcatctatccaggagttagcaatgtgatggctgctgagcttgtacatgctgccagaagtgaaaatggcgaacctgaaagactaaggtactggtggtgctggtccaacaattctgacaacaagttttctacttcttggggaggatgtgattgcatataacaagggagaagaaatcaaattgaagccctatagtggagctctgaacattgattttggaaagggggtcagaaagaaaaatgtctacttattgaatttgcctgaagtcaagagtgctttcaagatattaggtgtgccaactgttagtgctcgatttggagttcttgagggatagaaataaagttcagaagttggttcagtctgttgatcctttggttcgagccgttgatggtattgcaggagagcatgtctctatgagagtagatttggactgctcaaatggtcggaatactattggattatttactcataaaaaactatctgtatcggtgggatttgcaaccgctgcatttgctttagcagttcttgagggcaacacacaaccaggagtttggtttccggaagagccggagggaatacggatagaagcaaggaagctgcttcttgagcgtgcatctcaagggacaagtaccttcgtgatgaacaagccttcctggatggtagaaactgatccgaaggaagtcggcctaggaatttttgtgtgagaagatcgagttgcttaaattattggggtgcttgaaaagggcagctaaatcttgggagtagtttaccatccgcgagaagttgaatgcggcaaccagcagcatgttgaagtccttgcgctattttgtttttgaaagggttgtatatgaaccatgatgattatgaagaaaaagaatacaggtcagttacacgattttgttcaccacaggtggtaagcttggaacttatctgtcgtttggttcacgaaatgtaatataaatagcaatataataattcacagttgaataccagcggtaacctatactactctattaaaaacctaatgtggatatctggtgctatcatgactttatcctccgcgctgacactctgggctcgtcccatacacgctgcctcagcgtcgggctaagtgagtcccacacccagcgcccacatacgtagtgttttcttagctagccttatagaccttcagcgctcgcacagttagcaccagatcacgcgctcgcacagttagcaccagatcacatgtaccttaatatttagaaataaacaataattgtataaaaagaccaccagatcatacatatcttagtgtttagaaataaaaaat

SEQ ID NO: 209483 - DNA, 3942 bp, Zea Mays
agaatctggattcgagataaaaaaatgaagggtttatggttatcacggcgccacagcgagtgctgcacttggtggcgcagatcaagaggaccaaatctgcttcctttctcctgagacagtttgtaaaattctcggatccattttaaagaatttggcattggtactcaaaacatcaacttttgaatgggcaaggttagcacattctttgttgcctgctgaacctgagcacttgatggttccagaagaaaattcctcaataattaacttcgagatggctcggattgcctttaaagttcttcagggtagcttgttttcactttggagacttgaggaaaattctgtatttccttctattctggctgctctttttgtcattgaatgggaatgtagcatgtctttagctcttgatgaagagaagtgtttggaaagtaatatagaagatacggaagttggtgtttctatgtgcagcagttcaaaaggttgtttggaggaggaaatgcatttgaaggttaaccttgcagaaagcatacatgttttttgccaaagcttaagtccatccttttgggataatcttcactcatgcacattgaatagattggcaactattctacctcagtgtgtcaggtatgctgtatttcagacaagagacttgcatgcggaaaggacatcaatcttatgttccgagtgggtggtggacatgttgaagctcacctgtctcgatcacagaaacttggaaagtttttttgatgttttattatctgagggggaacattggccgctctggttgatgccatctttacaaaatggacatttatctgtgaaggtccagctggatccagatattacagatgaaattgaactcaaacacgagcgatttgttgcctttgttgataggcttattctcaaacttggctttagtgaagtggttttaggtattccaggaaatatacagtctgccacatcacaatcaattgatatcacttcacctgtctcttccttgtccagagtatgggtggctggtgaggtcctttgcacttggacatggaaagggggctgtgcattgaaaacattcttacctttgctggttcagtacatgaaagacgagtcatatcttgagatcaacattgtgccattgttgcttgatacactgttaggtggcgcccttatgcatgatagtggtccgtgggtactgtttaatgcttggcatctttctgacaacgagatcgataaaattcaagatcgttttcttcgtgctcttgtggctttgttatttactattaatacaaatgattgtctctggagagaatctgatgcacttgtattttttgagcaactgctgagcaatctttttattggctcatcagttaatagaaaatgcctgaagattctaccctatgttatgacctccatcataaaacagttctcagccttgaacaacggagattcttcgtatgctgatttggtgcggaaaagcatacagagttggcttgatgcaaccatttcttgtctgtcatcaagctcaagggaggtacctgtgcaagatattgaggactggatgcaagtggtgttgtcttgcttcccattgaggataactggaggagcccgggaattggtagctgtggttgagcgagagatcagtgatacagaaagatcactgatgttgactctgtttcagaaataccagattttctatggtagtacagcttcatcattggtcactagtggaactgccgtatcaacgacagttgaattactgggagtgaaactgacagctgttttggttggttattgctggagcaaccttaaggagaatgattggcattttgtgttccgcatggtattcaaatgcattgaatcgtctgttttgcttgtggaagaaatgactgatggcataaatgatgccacaataaaccaggtatcaagtgaagatgccttggagaagcttaaattagtggttggcactacagataagttaacattaagccttgcagaatctgctttggttacaatgtgtcagctcaaccatctttgtaatatccaagaagcagaaaactcccagtgtgtacagcttattaaatcaggggactatgctgagagtaatgacaagatggtagagagtgtcctccgtttgttcttggcctctggtgtttcagaggcaatcacaaaatcttgcagtgaagaggcttcgtctgtcataggttctagtcgccatgcttatttgcacttttgggaacttgtggcatcattcataaaaaatgctccactgcaaagtagaaagtctgcacttgagtccatggaactgtggggactgaccaagggttcagtcagtggactatattcgattcttttctcctcacaaccaatatttcacttacaacttgcagctttctctctacttctctctgagcccttctgtcaactttcactggttaaaaattattcaatgggagaaagttgctcatctgctcagcaatctggcacaagccaaagtgctgagttgatgccagattcagacaagacagtgcatctaagagaggaactttcagacttaatcgagttcccaacatctgaacttctcaaaactgatctgacagctcgagatagggttgatgtattcattgcctggtcattgttgctgtcccacctgcaaacactaccagcatcttccagtatcaagggagatgtgcttcaatacatacaagaaaaggtcagtccgtgcatattggattgcattttccagcatatcccagtaaaggccgctgcaccgaatgggaagaaaaaggataccgagctagcgcctgaagcagaagctgctgccaaagcttcgaagaatgccatagctacttgttctttgcttccgtacttggagtctctttggcccatcgggactttgcagatggcctcacttgcaggctcactgtacgggatgatgattaggctgctgccttcttttgtgcgcacatggtttactaccttgagagaccgttcattgtcatactcaatcgagtccttcaccaaacaatggtgcagccctcctcttcttctagatgagttttctcaggttaaggagtccgtatacggcgatgagaatttctcggttagcgtcaacaggtcggctttcgagatcgttgctacatacaaaaaggaggagacaggaatcgaccttgtcatacgcctcccgagctgttaccctctgcgccacgttgatgtcgaatgcacgagaagtttgggtatcagtgaagtcaagtgcagaaaatggctgctttcgctcacgtcattcgtccgcagccagaatggcgcgatagcagaggcgatccgcacgtggaagagcaatttcgacaaggagtttgagggcgtggaggagtgcccaatctgttacagcattctccacaccagcaaccacaacctgccgcggctggcgtgcaagacgtgcaagcacaagttccacggcgcctgcctctacaagtggttctccacgtccaacaaatcgacttgcccgctgtgccagactccgttctagtcctagctctagacacatgcttgtttgttggcaccacaccgttcgatccttcgatgtaaatggcgtgtgtacgcagcgcagtgttcagcgttttggctgttaaatactctcgaaacaggacgggacctgcagagactgagttcagaggtcttataatctacaattaccgtggattcgctagattatttttaggttaattgaacatgaaaatgtctaaattcttaacacttaatggtcttatgaaaacaaacataaaaaactatataaaatcaactgaatctactagtgcacgtctattttcgtcaaagaccggagcatgttttttttggtggtggtggtgggccgtggggtaggagttacaaagacgataggttgatcccgcatctgtaaataatttccaaataaaaaaactggaaacgtag

SEQ ID NO: 209484 - DNA, 6200 bp, Zea Mays
gtcgtcttcgattcgagcggcggcgcggctgtgaagtaagcgggcgagacgagacgagggatcaacctcgatggggaagcagaagggccgcgcgtccagcagcggcatggcggcgtcgctggtaccgcacgcccatggcgccgtccccaccgtcggtttcggcggctaccatggcgccgtccgtgttgagcccgctgcgccctccgacccagacgccccgattcgccttaccccagatgtggatggtgaagtactccagaacctaaagaggctgggaaggaaagatgcaacaacaaagatcaaggccttatctactctctctatactctttggacaaaaaccttgtgaggaagttgtgcagattgttccacaatgggcatttgagtacaagaggctgctacttgactataacagagaagttcgccgtgctactcatgaggccatgtctagcctcatcacagcagttaggaaaggtatagcaccgcacctgaagtctttaatgggtccttggtggttttctcaatttgatcctgctcctgaggttgctcaagctgcccgacgttcgttcgagcattcccacagtcagatagaagactggatgcattaatgttatgtgtgaaggaaacatttctttacctaaatgagaacttgaagctaacaccacaagctttgtctgacaaggctataccaatggatgaactggaagatatgcatcagagggtaatgtcatcatcactgttagctatggcaactcttatagaaattttactaggagtgaaattgcaaagttgtgatggtgagagtaccaatactgaaaacaaaaatatgtcaaaagttaggtcaactgtactttcttctgctgaagctgcattttgtatgcataaatgttttcttgacgtcctcaagtcaaaaagttctgttatacggtcagctacatactcactgcttacaagttacatcaaacatgttcctcatgtttttgacgaagaaaccatgaagaaactttccccaactctacttggtgcattccatgagaaggatgcgtcatgccactcttctatgtgggatacaattcttgttttctctagaaagtttccagaggcttggtcatattgtaatattcacaaagttgtcctcagtcgggtttggcatttcctacaaaatggatgttatgggtccaaacaagtttcatatcctcttctagttcagtttttggactctatgccacctaaagcagtcatgggacaacaatttgtttttgattttttgcataatctttgggctggaaggaaccagaggcagttatcagctgctgatagtttggctttctgtggtgcctttaaacagagttttttgtggcttctaaaaaatgcatcaagatattctactggagattcttcagatgatgtacccatcaagcttataactgatgtacttgccaaaatagtttggcgtgactaccttttattgtctggagacacaattggtggcggtgttctcttatctcgtaaaacttcagggttagctgcgaacatgcactacccaacatactatcttcaggatttgaagaaatgcatcactgaaatactggatgtgattgcagatacagaaaatcatttacttaatatttcttgtcagtcgctgttaagtgactgtttggacataattcaacaaggagagaagctttccaagtttcagaatcatgtagaacaacttgtgtcgttctttctatctttggatcaaattgttgtatgcaaaggtgaattatggccactggaaaggttagcaaaaccattggttgagcaatctttgccagctattaagttcatggacactccatgccttgttaaacttctttcagttttggttgaaatatttgggcccacccccttattttttaagacttgtaaggaaaatgatgaaaagttggatatcaagtcttatctggagtttttcaatgatgaattgctcccttggtgtttggatggaaaatatagcacctgtaactcaaagattgatttgttactttccttatttcaagatgaatccttctttgaccaatggtgttccatcatcaaatgtacgacaactgaacaaaagcagtccgttgatgataagacctcaaatattctgggacgatatgaattgcttacactgttacttcagaaaatcagagaaaagattgctggggggaagctaagaaatttgcaggaaaatggttatcttctgcaacatttgcgtcttgatatattagattctactgcagcttctgtcctctgtgatttgcctgcttcagattgccaagttagttttatatgtgctgcacttggtggcgcagatcaagaggaccaaatctgcttcctttctcctgagacagtttgtaaaattctcggatccattttaaagaatttggcattggtactcaaaacatcaacttttgaatgggcaaggttagcacattctttgttgcctgctgaacctgagcacttgatggttccagaagaaaattcctcaataattaacttcgagatggctcggattgcctttaaagttcttcagggtagcttgttttcactttggagacttgaggaaaattctgtatttccttctattctggctgctctttttgtcattgaatgggaatgtagcatgtctttagctcttgatgaagagaagtgtttggaaagtaatatagaagatacggaagttggtgtttctatgtgcagcagttcaaaaggttgtttggaggaggaaatgcatttgaaggttaaccttgcagaaagcatacatgttttttgccaaagcttaagtccatccttttgggataatcttcactcatgcacattgaatagattggcaactattctacctcagtgtgtcaggtatgctgtatttcagacaagagacttgcatgcggaaaggacatcaatcttatgttccgagtgggtggtggacatgttgaagctcacctgtctcgatcacagaaacttggaaagtttttttgatgttttattatctgagggggaacattggccgctctggttgatgccatctttacaaaatggacatttatctgtgaaggtccagctggatccagatattacagatgaaattgaactcaaacacgagcgatttgttgcctttgttgataggcttattctcaaacttggctttagtgaagtggttttaggtattccaggaaatatacagtctgccacatcacaatcaattgatatcacttcacctgtctcttccttgtccagagtatgggtggctggtgaggtcctttgcacttggacatggaaagggggctgtgcattgaaaacattcttacctttgctggttcagtacatgaaagacgagtcatatcttgagatcaacattgtgccattgttgcttgatacactgttaggtggcgcccttatgcatgatagtggtccgtgggtactgtttaatgcttggcatctttctgacaacgagatcgataaaattcaagatcgttttcttcgtgctcttgtggctttgttatttactattaatacaaatgattgtctctggagagaatctgatgcacttgtattttttgagcaactgctgagcaatctttttattggctcatcagttaatagaaaatgcctgaagattctaccctatgttatgacctccatcataaaacagttctcagccttgaacaacggagattcttcgtatgctgatttggtgcggaaaagcatacagagttggcttgatgcaaccatttcttgtctgtcatcaagctcaagggaggtacctgtgcaagatattgaggactggatgcaagtggtgttgtcttgcttcccattgaggataactggaggagcccgggaattggtagctgtggttgagcgagagatcagtgatacagaaagatcactgatgttgactctgtttcagaaataccagattttctatggtagtacagcttcatcattggtcactagtggaactgccgtatcaacgacagttgaattactgggagtgaaactgacagctgttttggttggttattgctggagcaaccttaaggagaatgattggcattttgtgttccgcatggtattcaaatgcattgaatcgtctgttttgcttgtggaagaaatgactgatggcataaatgatgccacaataaaccaggtatcaagtgaagatgccttggagaagcttaaattagtggttggcactacagataagttaacattaagccttgcagaatctgctttggttacaatgtgtcagctcaaccatctttgtaatatccaagaagcagaaaactcccagtgtgtacagcttattaaatcaggggactatgctgagagtaatgacaagatggtagagagtgtcctccgtttgttcttggcctctggtgtttcagaggcaatcacaaaatcttgcagtgaagaggcttcgtctgtcataggttctagtcgccatgcttatttgcacttttgggaacttgtggcatcattcataaaaaatgctccactgcaaagtagaaagtctgcacttgagtccatggaactgtggggactgaccaagggttcagtcagtggactatattcgattcttttctcctcacaaccaatatttcacttacaacttgcagctttctctctacttctctctgagcccttctgtcaactttcactggttaaaaattattcaatgggagaaagttgctcatctgctcagcaatctggcacaagccaaagtgctgagttgatgccagattcagacaagacagtgcatctaagagaggaactttcagacttaatcgagttcccaacatctgaacttctcaaaactgatctgacagctcgagatagggttgatgtattcattgcctggtcattgttgctgtcccacctgcaaacactaccagcatcttccagtatcaagggagatgtgcttcaatacatacaagaaaaggtcagtccgtgcatattggattgcattttccagcatatcccagtaaaggccgctgcaccgaatgggaagaaaaaggataccgagctagcgcctgaagcagaagctgctgccaaagcttcgaagaatgccatagctacttgttctttgcttccgtacttggagtctctttggcccatcgggactttgcagatggcctcacttgcaggctcactgtacgggatgatgattaggctgctgccttcttttgtgcgcacatggtttactaccttgagagaccgttcattgtcatactcaatcgagtccttcaccaaacaatggtgcagccctcctcttcttctagatgagttttctcaggttaaggagtccgtatacggcgatgagaatttctcggttagcgtcaacaggtcggctttcgagatcgttgctacatacaaaaaggaggagacaggaatcgaccttgtcatacgcctcccgagctgttaccctctgcgccacgttgatgtcgaatgcacgagaagtttgggtatcagtgaagtcaagtgcagaaaatggctgctttcgctcacgtcattcgtccgcagccagaatggcgcgatagcagaggcgatccgcacgtggaagagcaatttcgacaaggagtttgagggcgtggaggagtgcccaatctgttacagcattctccacaccagcaaccacaacctgccgcggctggcgtgcaagacgtgcaagcacaagttccacggcgcctgcctctacaagtggttctccacgtccaacaaatcgacttgcccgctgtgccagactccgttctagtcctagctctagacacatgcttgtttgttggcaccacaccgttcgatccttcgatgtaaatggcgtgtgtacgcagcgcagtgttcagcgttttggctgttaaatactctcgaaacaggacgggacctgcagagactgagttcagaggtcttataatctacaattaccgtggattcgctagattatttttaggttaattgaacatgaaaatgtctaaattcttaacacttaatggtcttatgaaaacaaacataaaaaactatataaaatcaactgaatctactagtgcacgtctattttcgtcaaagaccggagcatgttttttttggtggtggtggtgggccgtggggtaggagttacaaagacgataggttgatcccgcatctgtaaataatttccaaataaaaaaactggaaacgtag

SEQ ID NO: 209485 - DNA, 2544 bp, Zea Mays
catcgaggccgccccgtccatccgtcgacacgtgtcggagcacccttctataagtaaccccgggtacagctgcgcgatgttccattccaaaagctctcgagacttcctcagcaatcaatcagctttccagcgatcggcagctcctcgatcgtttcgaagctccaatccgcccggccgcctccgcctgttgccactagctaggtgatcgatcgaatggactgcggtggcgcgctgcagctcccgcctgggttccgcttccaccccaccgatgacgagctggtgatgtactatctcctccgcaagtgcggcggcctgccgctcgccgcgccggtcatcgccgaggtggatctctacaagttcgacccatggcagctcccagagaaggcgttcggtggggagaaggagtggtacttcttctcgccgcgcgaccgcaagtacccgaatggctccaggcctaaccgggcggccgggacagggtactggaaggccaccggcgccgacaagccggtagggtcgccgcgccccgtggccatcaagaaggcgctcgtcttctacgccgggaagccgcccaagggcgtcaagaccaactggatcatgcacgagtaccgcctcgcggacgtcgaccgctcggccgccgcacgcaagaagaccaacaacgcgctcagggtaattcactacaccatgacctttctcaggagaacatatttatctccccgaaatactgacacttgcagttagagggaaaaaatatagagagaagtaaaaaaaaaaagattgatgtttgattttaccaatgctgcaacaagaaacagtggatcgaatcgaaatgtgttgttaggcttgcaactatatatgcagattcttagttaagaggaattgaaaaaggtaggcgtgcaaattgtccatttgcagcaagctcgatcgagttgtccctttcgtgacagcgcgcggctacttgggcaggataggctctagagacatgtaaagcgcgggcggcgtggcgtcacggctcacgcacgccgcgatagagacaagcgcggcaaccatggtccatggccggcgcagagccgccgcctgatcttatcgcccgcgcacaaattaccacatgcgcggcgcgcaccggatccgacgtcacgtcgacctcatctccaagcctcttccaaacactccaatgcgtactggatgactgggtgctgtgccggatctacaacaagaagggtgttatcgagcggtacgacacagtggacgacgacgacggcgacggcgccgtggccgaagacgtcaagccggtgccggcgccggcggcgtcgaagaacccgcgtgccagtgcccgcgtaggggcagcagcggcggcgccgatgaaggtggagctccccgagtacggcggcggctactacgactacgacgacctggagacgccgtcggcggggatgctgtgcttcgaccgcccgtcggccccggcgcccgcggaccgcgactcaaacaactccgtgccgtggacgacgcaccacacgcacacggacaactccagcagcggctccgagcgcgtgctctcgccgtcgccggacctgcccgaccgcgaccacgccgagagccagcccgccgccgccgccgccgccgccgggtggtggcctgtcggaggcgactggggcagcgccgccgaggacgggttcatggtcgacgtcgacgtcgacgacgggagctcgctgttcgggccgctgtccccggggctgttcgcgcgcgtcgacgccgccgcgttcggcttcggcgacatgctcgcgtcgtacctgcacaaaccgttctgatgcaacgcgacgcgacgcgagcgcggccaccccgcgcctgcgtgctcctctaggccactgaccactgacatggacattctggtcgtcgtgtagctcggttcaggacgaatcgagagccggccggtctaggtgtagtgctgcgaaaccaacaccaccgtgcaggcacactctccgcgggcggcagatcgacggacaatcctgcgcccgtaggtatataccggtcgtcgatcaggtgttcatcagttcttcattcattcaggtcgacgtgcaactggtaattgtacaagatcttgggcagctgccgtatggagatcgatgagtgccgagttagcatggaggacgactggtggtcatggttggtacagagctagctagccgtccgatcgggtatcggattaatctgattgccagttttgtttttttttggtcgcgtcaagtagctgacatcttaagaatgaagcctactggattcagaggcctgttgatggtaatggtatggtgtatgtatatcgtctagtttagtctagcctagctgtacttagaattggttcaggttggtggcaagcagagcgctgtaatttttgttgagtgtttatgcactataattgcaacgtcatgtattagagtcgctctcagcggtcgctttctcgtgatcgaaaattttgcgatgcaaattatcctaataaagttgttgtaagatgtaattacgtatgtgcctcacgctctgctttaatttgct

SEQ ID NO: 209486 - DNA, 1725 bp, Zea Mays
aattcaccctcaccccttcggctattcctcgcccccttcccttctcgaggattcgcgtaatcgtcaccatgcgccgcccgtggaggcactcgggcccagggtccgccgtcgcggcgcgccacggcgccgcggacctctgcctccgcgaggtcggggacctcctgccgcgacgcttcgcccgccgcgcggccggttccgaggaccttgtaatgcggctccagattcaccggaagcttgacaggcacacgggctgcgtcaacacagtgggcttcaatgaggtcggtgacaccctcatatcggggtctgatgatcagaaggtgatgctgtgggactgggacactggcaccgtcaaattagagtttcattcaggacatggcggcaatgtgttccaggcacggttcatgccctgctcagacgatcggaccattgtcacttgtgctgctgatggcgaggtgaggcttgccaagatacaggatgctggagacgtgtccacaacattgcttggtgaacatgagggaagggctcacaatttggctatagagcctggtagtccttacattttctacagctgtgtttgatctcagaacaaacacagcctcaaaactatttctttgcagaaactccactaaatcagtatactcatctcttgttcacctaaatgcgcttgcaatagatccgaggaacccaaatctttttgttgttggaggaagcgatgcatatgctcgtgtgtatgacattcgcaagtgcaagtgggatggatcatctgattttagtcacgcatctgactgctattgcccaccacatcttgttgacaataagagtgttggaataacagggattgcattctctcacctgagattggagcaattgaagggtgcaaatcaacaatgctagcatctggacatgatgtttctcaacctgcacctcagacatacgtcggtcatgttaatcgtgaaacggtgaagcgtgtgtctttcattgggccaaatgatgaatatgttgccagtgggtcagactgtggccggatctttatttggagaaagggagatgggaagtttctacgagccatggagggtgatgagtgcattgtgaattgcattgagcctcatcctcatgctatggcaatcgcgagctgtggaattgataatgatgtaaaagtttggactccctctgcgattgagcgggcacctatgatacatgttgatgagctccagttgagacctcgcaagagaagagccaagctctggcgctttggcatacgagacctgttgatccaacagatactggtatcggaaaataggcaacagtcagctgaagaaggctcatcagaggaccatgaggacaacatagaattacttgatctagtgctacaggctgcagttgaaggtgtatcatcatcatcagacgaggaggaggaggacgacgacgacggcgataatgaggaggcggcggcctctgatggctctgaatagtagtcaaccgatctttcagggttgtttcaaattgtaaatatacaataataagccatcactcttctcatgtattatataatagaactatgatttattagcttgtcatttctatgttataaatctgcttttagtatgctactttaatgaaaaaattgggctaaccaaattgtgtgctatgttatgaaaatctgaaatggtgttgcgtcatatatttaattgtctgaccaaaaaaactttgtggttcatccctggg

SEQ ID NO: 209487 - DNA, 1006 bp, Zea Mays
gttaatgcagggaaagaagggagatcgaagagggcaagatggccttttgccttagctgacacgccggtgacacgctggactgcctatttgacacaccaggcatggcaatgtatgcctgacagggcattttcttggaatgtattgtcactgttcacaaaatcaggaatgttattcttggaagtcagtttgatagcctttctacttcaaggaaatgatgccagtggttttgaatctttggcacgaacctttgttatctctggagctgtagttgcagctgacgcattgctcaagactatatatgtttttggcttcggtgttcctttgttcattgatgctgatcaaggaactggtgggaaatggggcctatggattctccacaaacttgtgcttactggagtttatgggttgattgttttcatgcatcattcaagatggagaaacaggctgcctgcaaaaccagcatactacaactatgtatgtgcgatgttgctattgaatggtgtatcactgtttggatgtttccttgttgcaagtggagctggatttggtttatggttatataatctcacaatcgtatgctatcattcgctttaccttcccctcctatatgtgactttcttagcggactttttccaggaggaagacatgctcctagagagcgtttactattctgaaatgaaggatgctgggttctttgatgctgactgggattaatcggtggctactgcgctctatgaccactccaatgtgaattacgatgtgtttctatctgtgtactctcaacgtagaacagaaaatgtatgtagctaaccgtggtaatgaatggaaatatgtaaatattactggcgcatacttcagatttcaagtgatttcaacactgagattgccaccccaacggttggtgataagttcacgtcagaaagtgctatagcgtgtttggtttgagggtattcccttctcactcctcattttcttatttggtttatagaatgaaatgaattttctt

SEQ ID NO: 209488 - DNA, 1227 bp, Zea Mays
ttggcgagtgcgttaatgcagggaaagaagggagatcgaagagggcaagatggccttttgccttagctgacacgccggtgacacgctggactgcctatttgacacaccaggggctgttatggtgggcgtcggagtgccacggggtgttgtacagccttgcggtgatgctgccgtcgctggccttcgtgggattcctagcatggcaggcgcggcggagcttccgtaggatcagctacggccgctctcacgtcgtcgtcgtcgcgtactacgcgctcctctgggtcgtcgccgtactcaacctcctctggtgcttcctgcaggcatggcaatgtatgcctgacagggcattttcttggaatgtattgtcactgttcacaaaatcaggaatgttattcttggaagtcagtttgatagcctttctacttcaaggaaatgatgccagtggttttgaatctttggcacgaacctttgttatctctggagctgtagttgcagctgacgcattgctcaagactatatatgtttttggcttcggtgttcctttgttcattgatgctgatcaaggaactggtgggaaatggggcctatggattctccacaaacttgtgcttactggagtttatgggttgattgttttcatgcatcattcaagatggagaaacaggctgcctgcaaaaccagcatactacaactatgtatgtgcgatgttgctattgaatggtgtatcactgtttggatgtttccttgttgcaagtggagctggatttggtttatggttatataatctcacaatcgtatgctatcattcgctttaccttcccctcctatatgtgactttcttagcggactttttccaggaggaagacatgctcctagagagcgtttactattctgaaatgaaggatgctgggttctttgatgctgactgggattaatcggtggctactgcgctctatgaccactccaatgtgaattacgatgtgtttctatctgtgtactctcaacgtagaacagaaaatgtatgtagctaaccgtggtaatgaatggaaatatgtaaatattactggcgcatacttcagatttcaagtgatttcaacactgagattgccaccccaacggttggtgataagttcacgtcagaaagtgctatagcgtgtttggtttgagggtattcccttctcactcctcattttcttatttggtttatagaatgaaatgaattttctt

SEQ ID NO: 209489 - DNA, 2126 bp, Zea Mays
cgcatcccccttgcggcgcagacgttactcgttcacgcctatataaaccgacgaggcgggcgcccagaaccagtcccgtccgtactccgtccacccaggcacccaccgctccgctctctcccgccgtcccgcgtgctttctctctcccgctccaacgcatggcaaaggcggcgcccgcagccggcggcggcattgctgacatcctcgtcacccgcgaccgggactttctcgtccgcaactccggcgagcaggtgaagatcagcagcattgaggcaagccctgtggccatctacttctcgaactcatggttcccgccatccaggtggttcacgcccaagcttatccaagtatacaaacaactggcctcagagggcaagagcttcgaggtcatctttgcttggggcgatcttaaagaaaaaacattcaatgaatactttgcaaagatgccatggttggctctccctttttctgacattgaacgtcgtgaggcccttgatatccggttcaaggtcactgataccccacacctggtcatccttgatgcaaaaactggtgaagtttacactaaagatggtgttagaatcgtgagtgagtatggcgtggatgcttaccctttcacaccagatcggatcaatgaactgaaagaactggaaaaggaagaaaaggagaatcaaactattcaaatcgtgcttggcacatctactcgagactatctcatttcaaacaagggagacaaagtacccatctctgagcttgaggggaagtatgttggtcttttctttgtgggggttggctatccaccattcattgagttcattgacttgcttgctaagatctatgagaaactcaaagaagtgggggagaaatttgaagttgtagctgtatccatctacagcgaagagtcatcatttaatgagagttttgcaaagatgccttggcttgcaattcctcatggtgacaacaagtgtttgaccctgactcgttactttgggtttatgagtcttccaacactagttctgattggccctgatgggaagacactgaacaacaatgttgcggaaataattatcgatcatggttttgacgtatgggagggtttccccttcagtgctgagaagctggattttcttgctgagaaggtaaaggttaaagctgcaacacagaccttggagtccctgttaatcagtggtcatctggactttgtcattggaaaagatggtgtaaagaacttgttgggaagactgtccttctttacttctcatcaaaatggtgtggaccatcccgtggcttcctgcccacacttgtggaggcatacagcaagatcaaagagaagaacagtgattttgaggtcgtcttcatctcccatgacagggaccagaggtcgttcgatgaatatttctccgaaatgccatggctcgctgtgccctgggaagatgaaaggacagcacccctgaagacgaccttcaaggcccgcgggttccctatacttgtcgtcatcggtcctaatgggaagacagtcagctgggacgcaacggaactgctggtggtccacggcgctgatgctttcccattcaccgaggagagacttgaggagctacagaagaaggtggatgagatggcgaaggcgatgggatggcctaagaagctgaagcatgagctgcatggcgagcacgaacttgtcctgcaataccgtggtactgatacatacgcctgtgatcgttgtgtacagatgggcagcagctgggtctacacttgcgattgcgaggagtgtgactttgacctgcaccccaagtgcgctttgcgtaagaagggcgaggaggaggaaaccaagtcgtccactgctgggtgttatgtgtgcaagggaagtgatgtgtgcattaaggcctagagttattctaccttggagctgctgaggtttgtttgttaataaatagtagtcgcacgttgaacccttacgagcatatgtgtatgcaaggctatgtgagtattgtgtccgatcaaagtaatgtggttttgctgcatggtatttctggtcttaagcatgtaatgttggtggcgttcctttttttctgccttatatttctgcaatcttgcatgcttggcatctttgttcggaaggatagtca

SEQ ID NO: 209490 - DNA, 1542 bp, Zea Mays
tatgcttaggaacaacgagtgtccagcgtgccgcacacactgtgcgagccggcgttctttgagagatgatccgaattatgatgccttgattgcagctctatatccagatattgacaaatatgaagaagaggagctagcgttcaacgaagaggagaatgaccgcaacaagcagattcaagcatccattgctgaggcttttcggaaacaatcagaagttattgggcggaagtctactgccaaagctactgctgctgcatttatgaagaggatggaaacggtgaaagctgtagcaaagaggcctcatctgcggaggagagttccccagagaaaaagcagaaacgactgccaaaatggccaacaccgcgttcttcacctgcccgagcatgcaatgatgaggttgcttctgatgaaaaggatgatgtaggaatatccagggaaaatttcagcacatctcctctacgagcatggggaaagaatggcactcgcagtcagactcgccacagtagcttcagtggttcaaatggcaggatggtcaagggtgggcgcatgatcaagttggttgagtgcttgcgaaattctgacgacaatgaaggcgagcgtgatgtacatctttgtctgcttccacttgatggacaaacggcaccaaatctggagaagtcatatctgtgttgcggcccaactctgtccatcaaacaactttgtcagtttgtcgccagtcagacatctcacaaagatgaagaagttgagatgtatgcgctgaagccttcttgtagcaagcctgtcagcactaatacatgcggtcctgacaaagcaaggctcgcaggggaggaacgcctttcagacttgcgctcctcgttcacatttcctaatggggttctggagctggtgtatgccataaaagtggctaactagatgctgagtgaaggcccattagttcaaatggaagtgttttttgtttatacatatcttcatcgtgatcccttgacgaaatgacaggtttgggctcttgaatacaacttggaaggaaaaaaaacgttgggggagactagttgttgtataattagcttgtgagatgtgagataaatgtgcgtacgttgtcaacgaatagtttcagaagagtcagattggcttccacagttcacctcgctgcaacccaaaatctggtctccactgccggcatttgggggaatttctcggttgggtgaaggctgagttatttcctcgagtggtcaagttgttttacttccacagttcaccagtttcagcttttgtaattcatcggttcatattcttcaggcggcagccagtccgtgctgcgaacgacttcccagatacatgtaacataaatcttataaaaaatatatatgtaacagaaattactttttttgtcgtttctttgtacggcacaaggacagtcgtatttaaccttgagctggttataccagagtgttactattttattatatctgtacttatacaaactacaaggcaatgtattcttcctttgcgaatgttgttagcaggcagtttcttccacacaaa

SEQ ID NO: 209491 - DNA, 1678 bp, Zea Mays
cagggtttgtaccagtaaaattatctgatgtacgcaaagaagtgcagtgtcccatatgcttaggcatcatccggaagactagaacagttatggaatgcctgcaccggttctgtagggaatgcattgacaaatccatgcgacttgggaacaacgagtgtccagcgtgccgcacacactgtgcgagccggcgttctttgagagatgatccgaattatgatgccttgattgcagctctatatccagatattgacaaatatgaagaagaggagctagcgttcaacgaagaggagaatgaccgcaacaagcagattcaagcatccattgctgaggcttttcggaaacaatcagaagttattgggcggaagtctactgccaaagctactgctgctgcatttatgaagaggatggaaacggtgaaagctgtagcaaagaggcctcatctgcggaggagagttccccagagaaaaagcagaaacgactgccaaaatggccaacaccgcgttcttcacctgcccgagcatgcaatgatgaggttgcttctgatgaaaaggatgatgtaggaatatccagggaaaatttcagcacatctcctctacgagcatggggaaagaatggcactcgcagtcagactcgccacagtagcttcagtggttcaaatggcaggatggtcaagggtgggcgcatgatcaagttggttgagtgcttgcgaaattctgacgacaatgaaggcgagcgtgatgtacatctttgtctgcttccacttgatggacaaacggcaccaaatctggagaagtcatatctgtgttgcggcccaactctgtccatcaaacaactttgtcagtttgtcgccagtcagacatctcacaaagatgaagaagttgagatgtatgcgctgaagccttcttgtagcaagcctgtcagcactaatacatgcggtcctgacaaagcaaggctcgcaggggaggaacgcctttcagacttgcgctcctcgttcacatttcctaatggggttctggagctggtgtatgccataaaagtggctaactagatgctgagtgaaggcccattagttcaaatggaagtgttttttgtttatacatatcttcatcgtgatcccttgacgaaatgacaggtttgggctcttgaatacaacttggaaggaaaaaaaacgttgggggagactagttgttgtataattagcttgtgagatgtgagataaatgtgcgtacgttgtcaacgaatagtttcagaagagtcagattggcttccacagttcacctcgctgcaacccaaaatctggtctccactgccggcatttgggggaatttctcggttgggtgaaggctgagttatttcctcgagtggtcaagttgttttacttccacagttcaccagtttcagcttttgtaattcatcggttcatattcttcaggcggcagccagtccgtgctgcgaacgacttcccagatacatgtaacataaatcttataaaaaatatatatgtaacagaaattactttttttgtcgtttctttgtacggcacaaggacagtcgtatttaaccttgagctggttataccagagtgttactattttattatatctgtacttatacaaactacaaggcaatgtattcttcctttgcgaatgttgttagcaggcagtttcttccacacaaa

SEQ ID NO: 209492 - DNA, 2031 bp, Zea Mays
catccactcaaagccaggaccaggagccgtagaaaaaccagcccaagaggagagagagagacctccgtgccagccccgccccacctcgccgcctctccacgcgacctgctcgccgctgccgccggcgccgcatcacaaatgcccacccagaagcgcccgcctccgcctccgccaccctctccctccccctccgcggcccctggcgccggctcgccccctccctcgtctccgccgctgccgacggccgagcccgcggagaagaagcccaagctggaggtgaacggcagcgccggcgccgaagccaacggcaacgccaacgatttcggcgcgaaggaggggacggaggtggaggcgtcggagtctgagtcggaggatgcggacgccgcaaaacaggagaacaacgagtgtccagcgtgccgcacacactgtgcgagccggcgttctttgagagatgatccgaattatgatgccttgattgcagctctatatccagatattgacaaatatgaagaagaggagctagcgttcaacgaagaggagaatgaccgcaacaagcagattcaagcatccattgctgaggcttttcggaaacaatcagaagttattgggcggaagtctactgccaaagctactgctgctgcatttgtaagaagatcacgccgtaacattcggcctaatgggcagaatacctatttccgtggccgaggaaaagccagttctgatgacgttgctctggcctgttctgaagatgaagaggatggaaacggtgaaagctgtagcaaagaggcctcatctgcggaggagagttccccagagaaaaagcagaaacgactgccaaaatggccaacaccgcgttcttcacctgcccgagcatgcaatgatgaggttgcttctgatgaaaaggatgatgtaggaatatccagggaaaatttcagcacatctcctctacgagcatggggaaagaatggcactcgcagtcagactcgccacagtagcttcagtggttcaaatggcaggatggtcaagggtgggcgcatgatcaagttggttgagtgcttgcgaaattctgacgacaatgaaggcgagcgtgatgtacatctttgtctgcttccacttgatggacaaacggcaccaaatctggagaagtcatatctgtgttgcggcccaactctgtccatcaaacaactttgtcagtttgtcgccagtcagacatctcacaaagatgaagaagttgagatgtatgcgctgaagccttcttgtagcaagcctgtcagcactaatacatgcggtcctgacaaagcaaggctcgcaggggaggaacgcctttcagacttgcgctcctcgttcacatttcctaatggggttctggagctggtgtatgccataaaagtggctaactagatgctgagtgaaggcccattagttcaaatggaagtgttttttgtttatacatatcttcatcgtgatcccttgacgaaatgacaggtttgggctcttgaatacaacttggaaggaaaaaaaacgttgggggagactagttgttgtataattagcttgtgagatgtgagataaatgtgcgtacgttgtcaacgaatagtttcagaagagtcagattggcttccacagttcacctcgctgcaacccaaaatctggtctccactgccggcatttgggggaatttctcggttgggtgaaggctgagttatttcctcgagtggtcaagttgttttacttccacagttcaccagtttcagcttttgtaattcatcggttcatattcttcaggcggcagccagtccgtgctgcgaacgacttcccagatacatgtaacataaatcttataaaaaatatatatgtaacagaaattactttttttgtcgtttctttgtacggcacaaggacagtcgtatttaaccttgagctggttataccagagtgttactattttattatatctgtacttatacaaactacaaggcaatgtattcttcctttgcgaatgttgttagcaggcagtttcttccacacaaa

SEQ ID NO: 209493 - DNA, 2705 bp, Zea Mays
aggcaatcacaattccctttcccctcgccgccgcctcgctctctgccttttccacctcccccattcccacccgccgattcactcaccttggggcctcacgcggtcgcgcctccagcctcccctacccctactcccctcgcgcccagggaggagcccgagtcgcggcgagcgaagattccctccgattgctctcctcctagaacttccgatcggctcgtgatggccatgcagcagcacgcggcgtcggcgtcgagctccagcttggggctgcaccttctcgcctcgccctcgtccatcagggaggccacccacaccaaggttttcgtgggcgggctcgcctgggagaccagcagcgacaggctccggcgcttctacgagcgcttcggggacattctcgaggccgtcgtcatcaccgaccgccactctggccgctccaagggatacggattcgtcggtgcctctcgatttcactcctttttcgctgctaattttgcttctgtgtatgtggcgttcccgtgcgtatgtgcgcgcgcgatagatgtgctgcgacgacttgtgtacgtgtaactacttaactgtgttgatttttgctctcccttcttccacaggtgacattccgtgaagccgagtccgcgagcaaggcctgcgaggaccccacgccggtgatcgatggcaggcgcgccaattgtaacctggcatctttgggtcgagcccagcatcccgtgccccctgggcggccaagatcagctgggtcctatttgggtgtcccagttccaaaggccttctatttagggggttacagccaccaccgaccgtttccacttgggtactaccaaggatttcctgttccccagtacaggtaagataatttatggcatcatttgttagttttccaatgtaacattctttgtgacaaaacgttaaaaatgtcctgcacttacttttggagagtatatctgataatacggtgtttgctacttaaattagcttgtacatatggtatctcccctttcgcatgatgaaataatctgatccgaccatgctcatggaacacgatatgactgtttgaaagccaatagaaatacattcagttggttttttgcttttgcagttacccttcatatgggaccgaatacatctatccacaggttgaagccttaaaagctatcagcttttatatatttgtgctgcataagacagttacacaaatctttgcctattctgacagatgttctctttgtagggtacattaaactcatattccggtcagcaatatcttcctatttatggagtctcagctgcagcgaacacatccaaccaagcatttagccagctgagtccatccgtttccggtggtggcaatggttatttgtcggttcatagttacaacgtgcctggaaatcaatatgtgcagctcactggatccaacttcagcggtgcatcaccaaccgctcgaccttccattcagacttcttttttagtagcaacacccgttcctgcacatccacacctaataattccagccccctcaccccagtttacacaagctagtggttcagaccaaagtgcaagttgaactgtgcatccaaacatttgtaccttgagtgttttggttcatggcaggtacccttagattgcagcaggactaaaaagagcagtgttgctgtattcacagcatttgttcttgcctggcaagcaatcatccttgcattcataaggttgtcgttatcatggtcaacagatgtacctggaaaccatgaagttgcccctatggatggggcaagtgatccaagagtaacagttgctcttgcagtttcgctcagtttaaatcgcaagcgtgatggaaatgtagcttatgctggaatggagtccagcatatgtaagatggattaatccaatggagatcagccttcaggtgattgtgcatctgaaaattcgtgttggtgtgtggtccctagtcccagtcaccgtgcacagggtctgatgatcaagaagtgtgtcctgtcctgtacaagtctgcagtcatcaactcatcaccccgttgtctgcatgactagggcctgtttggtttggtgtctaacttgccacactttgcctaacttttctgtctaaggttagtttttcaattcgaaggactaaccttaggcaaagtgtggcagatttagccaccaaccaaacagcccctacattcatcagcggtcagcctttggaccaaactctggaagacctagctactctcttttcctgagagttaccagtaagtgtatccagttctgtatgcagtcatcatcgtgttgtttacaccactgggttgtagccagtgatgatatgatcattcgtctgtaccaaatttttattgttgcaactaaggtgtgatctagcgtgtagtgctctgtgtttggtggtttcaagtatagagcgcttctcttgtacttcaaaataaacccgtttacccatgatgatgctatatttagtagatttctcttctgattatgcttgtctctttaccaaagcatctctcggatagctatggcataaaaggcttgtacatgtttgaatgagcacacttatcaaacaatagaggttgtcttctttcatttgtttgatttgaaagtcgaggaagaaagtaagctcaccaatcattgacatttcaaactcattcgacatcaactcaacaaattacttgcaatgacaatcatttgtca

SEQ ID NO: 209494 - DNA, 262 bp, Zea Mays
gccaaaggaaggcttgtgttgtgtttggctagggtttgctcgcgtctcctccttcccttggctgctgtcgtgccggtcggcggcgacagcaagggagggaacatgtcgaagaagaacaatcttgccaagaggaagaagcagtacgagttcgacctccaacgggagaaggaggccaaggagaagcaggccaagaagctgcaagccaagaaatccaagatgaagaactgtaatcctttggtagcattctgtgtttggtcctctg

SEQ ID NO: 209495 - DNA, 1734 bp, Zea Mays
ctatccaaagcatgctatattagtatccaaagctcgctctgtagtaacttataatatccaatgcagtggtgttttttatattgtcttcgtaacttacatgtagcttaatatttgtgtatttgatttgatctcaccatcttatagtagatgatgatgagaaacctcagcatatagacacacttcctagattaatattgagttttatggttagttgtagtaaccttttaaaccatagttcctagacttatcttgatcaatacttgtaacttataatatccaatgcagtggtgttttttcattttcagtgtttccattttctctcgctactgcttcagccacctttcctacccatctcataccagttttacattactacaattttttcttcatcaaatcctttttgggaggcttggaaagggaagggtgctcccagcccccgtcgtgcccctcggcccctcccaaccctcgtcgtcgtaacggagtgccgaaggatctgaagtatgctgactctcatgaatgggtgaaagtggagggtgattcagcaaccgtggggattactgactatgcccagcgtgctttgggtgagcttgtttatgtggagctaccagaagttgtcatcagtgtatcccagggaaagacctttgctgctcttgagagtgtgaaggcagccaacgatacctattcaccagtgtctcgagaggtggttgaagtgaacgagaaactaagtgacttgcctggattggtgaatacaagtccatatgagaagggatggcttatcaaggtcaagctcagcaattcaggtgagctcaattcgctcatggatgatgataagtactcgaaattctgcgaaggcaaccattgaagaaatcagagtgtcttctgaagaccaggacctgtttttcaagctttatcactggttatggtctggagaccagctgtgacaaattggcaaggttcatcacaaggaagaaatgttaggatttgccaatcctacaagggcatgtgaaatccaagtttgtgttgtcaatgacgtggtcatatttgatatttctttgtagttgtaatctcgtgaattccttcttttttcttaaaaatgactctttttgattcctctatgcaatttttttatctgatgcctctagggtaatcctttatggtttcctctttatcttttggtttgcatttttttactctgttcatataaatagattggtttagctagactgcatattccaaaaaagaaaaaaaattacaataactgatttactgggcatagtataacttagctaatttaaaatgatcctgagactttattttgcctttctcactgtttgatatgcatacctgaatttggacttctgttcagtaatgggcagccacaaatgaaggcagttctcttctggacagtatgactaaagcaattgatgaggttatcaaaatcaaagagtgtgacatctacagctataatccagactctgacgcagatccagttcttgagaaaggggccatatggtcgttcaactactacttctacaataggaagctaaatcgagtcgtgagctttcgatgttactgctagcaaattatcaggagatgacttcttaaccggtgttgcgtctgatggtgaagaggaagatgccttgattgacatggacatatgactgaccgtgttctgctagctacctgatgtgcgtataatatagagcatgtatgctcattcctggtagcaaacat

SEQ ID NO: 209496 - DNA, 2213 bp, Zea Mays
aaaaacttctccctaaatcattcttttgatttaggttttgatttttaagggtaaaagtcagagccaaatcaccctaaaaaacattatagatgagtggatcaatcgaacgactgcatactttccgctagggtgggccgcgggccgggcagcacggttttcttggcccgacccttgatcaaatcaggtctagcgaaatccaaaagcccgttcgaccccaaacaccgactgaccgacacgactccccccttcgtcttccaatccgccgctgttcgagtagtcggcggcgcggcgccggcggccggggcggcggcgatgaatcccctcacgcaggtgaagcggacgcagattatcaaccagaaggaggcgctcctgggcatcggcgaggacgcgtcgtggcacgccaagtttaaggactcggcctacgtctacgtcggcggcgtccccttcgacctcaccgagggcgacctcctcgccatctttgcgcagtatggtgaggttgtcgacgtgaacctcgtgcgcgacaagggcaccggaaaatccaaggggttcgcgttcctcgcgtacgaggaccagagaagcacgattcttgctgttgacaatttgaatggagctaaagttcttgggaggatcataaaggttgaccatgtgagcaagtacaagaagaaggaagaggaagatgaggaggagctgcagaagaagagggaggcccgtggagtctgctatgctttccagaaaggcgagtgcaaccgcggagcttcctgcagatattcacatgatgagcagagaaatgcaaacaccggttggggttctaaagaggatagtggtgcacgatgggagcatgacaaacacagtgatgtaccgaagagtcgaggcatgtgctatgctttccagaagggagagtgcaaccgtggagcatcctgcaaatttttgcatgacgagcagagaaatgcaaacagtcgtcgggactctagggatggtggaccatcgagatcagagcggtatggagaccgagaatctaggagtaggcatgatgatagaagagcagaagatcgggacagattcaggcgtgacaactcacctgagagatcacgaggtgagaggcagagggacgatgacagatccgacagaggaagagaagcaaaatcagaaagacgcagatatgatgtggaacatgaggatcgcaagcggtcaaggcacggcagagagtgatgccatgaaagaagtgtttacaaagaacacaaatggtgcaagaggccgtgggggattgacatcggtgtcatttttagttatcatcactgaaaccgtctgactggattgtgttggtgccaattgcgtggtttttgccgaggaagttgtttactggttaatcttcagctaggatggtgggcgcgcctccgcaaggaccacaatgcctgttctggctacgcgctgatgaacaatgaaaatgaaccactgttacctgcaacagcatcagcagcagcatgtgcaacccaaaaggagccgtattccccagtagaaattttgtactggacagaggcacggttccaaaaggttcggccctaaaaattgctctgcaatgtcagtggtccagcgtagatgatgatgatcgcttctaacatagtctataaaaaatgcatactggagatttggtactagataacaagaggaccttgagtaccgagttttttccggtgaaagattgatgggcgatgccacagcctgaagacgaagaggatgtaaagaaaaaaactcgccaattaagggcttgttcggttattcctatcccatatggattggatgagattggaaaaaattgtgaaagattttgacttgtttgggattgaaacccatccaatcccacccaatccacatggattgagagcaaaacgaacaagccctaagaattgatgatgttgtagtacaaattccaggccttcggttgattttctaagagttagtttggttaattttctaagagttagtttgacagcctcgttttttcaaggaattttcatttttccaagtgaaattaatttatttttagaatttgagaatcttttattctcaagagaaattagtttatttttgttgaaaaaattaaaatcctttagaaaaatagagttgtcaaaatagccctaagccttcaaaagaatggcttgcaactgtcgaaaccatggctagtaaaatccttggaaatttcatcaccaaagaag

SEQ ID NO: 209497 - DNA, 2272 bp, Zea Mays
gtgggccgcgggccgggcagcacggttttcttggcccgacccttgatcaaatcaggtctagcgaaatccaaaagcccgttcgaccccaaacaccgactgaccgacacgactccccccttcgtcttccaatccgccgctgttcgagtagtcggcggcgcggcgccggcggccggggcggcggcgatgaatcccctcacgcaggtgaagcggacgcagattatcaaccagaaggaggcgctcctgggcatcggcgaggacgcgtcgtggcacgccaagtttaaggactcggcctacgtctacgtcggcggcgtccccttcgacctcaccgagggcgacctcctcgccatctttgcgcagtatggtgaggttgtcgacgtgaacctcgtgcgcgacaagggcaccggaaaatccaaggggttcgcgttcctcgcgtacgaggaccagagaagcacgattcttgctgttgacaatttgaatggagctaaagttcttgggaggatcataaaggttgaccatgtgagcaagtacaagaagaaggaagaggaagatgaggaggagctgcagaagaagagggaggcccgtggagtctgctatgctttccagaaaggcgagtgcaaccgcggagcttcctgcagatattcacatgatgagcagagaaatgcaaacaccggttggggttctaaagaggatagtggtgcacgatgggagcatgacaaacacagtgatgtaccgaagagtcgaggcatgtgctatgctttccagaagggagagtgcaaccgtggagcatcctgcaaatttttgcatgacgagcagagaaatgcaaacagtcgtcgggactctagggatggtggaccatcgagatcagagcggtatggagaccgagaatctaggagtaggcatgatgatagaagagcagaagatcgggacagattcaggcgtgacaactcacctgagagatcacgaggtgagaggcagagggacgatgacagatccgacagaggaagagaagcaaaatcagaaagacgcagatatgatgtggaacatgaggatcgcaagcggtcaaggcacggcagagagtgatgccatgaaagaagtgtttacaaagaacacaaatggtgcaagaggccgtgggggattgacgtttgtactcttaaattgcaacacaaccagtgctgttaaattttgatatttgaatgtagttgccttcggctgctgctcgtgctgctgctttattcagataagtttctttatatgcctccatttgattacatctggtgttctttttcgctcttcagatcggtgtcatttttagttatcatcactgaaaccgtctgactggattgtgttggtgccaattgcgtggtttttgccgaggaagttgtttactggttaatcttcagctaggatggtgggcgcgcctccgcaaggaccacaatgcctgttctggctacgcgctgatgaacaatgaaaatgaaccactgttacctgcaacagcatcagcagcagcatgtgcaacccaaaaggagccgtattccccagtagaaattttgtactggacagaggtactgcaaagcatcatgtgaagcttatgttgtgcacggttccaaaaggttcggccctaaaaattgctctgcaatgtcagtggtccagcgtagatgatgatgatcgcttctaacatagtctataaaaaatgcatactggagatttggtactagataacaagaggaccttgagtaccgagttttttccggtgaaagattgatgggcgatgccacagcctgaagacgaagaggatgtaaagaaaaaaactcgccaattaagggcttgttcggttattcctatcccatatggattggatgagattggaaaaaattgtgaaagattttgacttgtttgggattgaaacccatccaatcccacccaatccacatggattgagagcaaaacgaacaagccctaagaattgatgatgttgtagtacaaattccaggccttcggttgattttctaagagttagtttggttaattttctaagagttagtttgacagcctcgttttttcaaggaattttcatttttccaagtgaaattaatttatttttagaatttgagaatcttttattctcaagagaaattagtttatttttgttgaaaaaattaaaatcctttagaaaaatagagttgtcaaaatagccctaagccttcaaaagaatggcttgcaactgtcgaaaccatggctagtaaaatccttggaaatttcatcaccaaagaag

SEQ ID NO: 209498 - DNA, 1476 bp, Zea Mays
ctcgcgtccgatcgatccccatccccttccattgcgtgctggagccctcctccgcgcgctttctctggtgacgccgtccatgtctcctcctctcttcctgcacactgattgagatgcagatgcagatgcagcagcagtcaccgctccagtgtctcctcggcagcggcggtggcagcgaccaccaccacctcatgcctcctccgtccggcctggcgccgctgccggggggtcctgctgacacagcggcgagcggtccggcgggaggcggctcgtccacctcggcctcagtgcaagccgcggcgggagcgggggcaggggcgcagcctcgccccgtggtgtcgatggcggagcgcgcccggctcgcgcgcgtgccgctgccggagcccggcacgctccgatgcccgcgctgtgactcgaccaacaccaagttctgctacttcaataactactcgctgtcgcagccgcgccacttctgcaaggcgtgccgccgctactggacccgtggcggcgcgctccgcaacgtgcccgtcggcggcgggtgcaggcgcaacaccaagcgctccagcaagaagtcgtcccgcggcggcggcgcgggcgccacggcggcaacctcctcgtcctcgaccacctccacctccaccacggccactaccaccaccaccacgagcgcggccatggcggcggccgaggccatcgccggcatgcaggcgcagctgccccacctcggcctcccgcccgcagcggccgccgcggcgcttgaggcctcgctggagggctaccaccactacctcccgctccagatgcagccgcagttcctgcagcaggctggcctgcacggctaccatttcgccgacgacggcaccggcgtcctcgcagctgacgggttcccgaggggcgtcgtcgcctcggggctgctcgcgcagctcgcggcggtgaagatggaggagcacggcagcaacggcggaggtgccatcgcggcgcatcatgagcagcagtcctactggcccggcagcaccggcggtggcggtgggtggccggtggagttcttgtcggggttcagctcatcctcgtcggggaatgtgttgtgagttgcatgtggccgcgtccaggtccacctgggcatgcatgatggggggcatgcatgcatggatgctgatgaagctgaactagctcaccatcctcaattagttctagggtttatgtggtgtttggaacttaattggcgtcgtcttcttcaattaggctggtgatgatcttgtgttggggtaaggtttttacatgttttttttcttatgagttttaagctggttaatgtcgtgcagttggtagttttgcatgtagtgggaagtgcatgtgttgactcatggaggttatatgtgtcaggttacttaactatactatgtttaattatatgagaacttggtgggcatagttgtactagtacaacccgtttctaaattgcagatgtgtgtttgg

SEQ ID NO: 209499 - DNA, 1805 bp, Zea Mays
ctcgcgtccgatcgatccccatccccttccattgcgtgctggagccctcctccgcgcgctttctctggtgacgccgtccatgtctcctcctctcttcctgcacactgattgaggtcttcattcttctctctctcttcacccatgacacatccatccagccacccccactagctctctagctagccatcctcctcatcaccctctccgcctctgtctcttgctgtcttgcggcactgttcttagctgcaggtagctccgtccagctcgacggttctctcttagcagctaaggaaggcgacataaattataaaaggcgccacttgagggcagggccaaggaaagttgtggtttccaactcctcacctcacacactctcttcttctctccttcgttctccctcgcaaagtcagggtcactgaaagtagcggaagagcccaagtagttcttcgccaccggtaccgcatcgatcatcatggtgttctcctcgctcccgatcttcctagaccctcccaattggggccagatgcagatgcagatgcagcagcagtcaccgctccagtgtctcctcggcagcggcggtggcagcgaccaccaccacctcatgcctcctccgtccggcctggcgccgctgccggggggtcctgctgacacagcggcgagcggtccggcgggaggcggctcgtccacctcggcctcagtgcaagccgcggcgggagcgggggcaggggcgcagcctcgccccgtggtgtcgatggcggagcgcgcccggctcgcgcgcgtgccgctgccggagcccggcacgctccgatgcccgcgctgtgactcgaccaacaccaagttctgctacttcaataactactcgctgtcgcagccgcgccacttctgcaaggcgtgccgccgctactggacccgtggcggcgcgctccgcaacgtgcccgtcggcggcgggtgcaggcgcaacaccaagcgctccagcaagaagtcgtcccgcggcggcggcgcgggcgccacggcggcaacctcctcgtcctcgaccacctccacctccaccacggccactaccaccaccaccacgagcgcggcgcttgaggcctcgctggagggctaccaccactacctcccgctccagatgcagccgcagttcctgcagcaggctggcctgcacggctaccatttcgccgacgacggcaccggcgtcctcgcagctgacgggttcccgaggggcgtcgtcgcctcggggctgctcgcgcagctcgcggcggtgaagatggaggagcacggcagcaacggcggaggtgccatcgcggcgcatcatgagcagcagtcctactggcccggcagcaccggcggtggcggtgggtggccggtggagttcttgtcggggttcagctcatcctcgtcggggaatgtgttgtgagttgcatgtggccgcgtccaggtccacctgggcatgcatgatggggggcatgcatgcatggatgctgatgaagctgaactagctcaccatcctcaattagttctagggtttatgtggtgtttggaacttaattggcgtcgtcttcttcaattaggctggtgatgatcttgtgttggggtaaggtttttacatgttttttttcttatgagttttaagctggttaatgtcgtgcagttggtagttttgcatgtagtgggaagtgcatgtgttgactcatggaggttatatgtgtcaggttacttaactatactatgtttaattatatgagaacttggtgggcatagttgtactagtacaacccgtttctaaattgcagatgtgtgtttgg

SEQ ID NO: 209500 - DNA, 2699 bp, Zea Mays
caccttgaaaattttaatcaaagctagtatttatggttcctgggcataattatataggatctgaacacttactccttgggctacttcgtgagggtgaaggtgttgctgctcgtgtgcttgaaagccttggtgctgatccaaacaacatccgtacccaggtcataagaatggttggggaaagcacagaagctgttggggctggagttggtggaggaagcagtggccagaagatgcccacacttgaagaatacggtactaatttgacgaaattagcggaagagggcaaattggacccagttgttggtagacaggatcagattgagcgcgttacccagattttaggcaggaggacaaagaacaacccctgcttaattggagagcctggtgttggaaagactgctattgctgaggggcttgctcaacgtatttccaatggtgatgttcccgaaacaattgaaggaaagaaggttattactcttgacatgggcctccttgttgctggaaccaaataccgtggagagtttgaagagagattaaagaaacttatggaggaaattaagcaaaatgaagatattattctctttattgatgaagtgcacacactgattggagcaggtgcagcagaaggtgcgattgatgctgctaatattttgaagccagctcttgcaagaggtgaactgcagtgcattggtgccacaacactggatgagtataggaagcatatagagaaagatcctgccttggaaagaaggtttcaaccagttaaggttcctgagcctactgttgatgaaacaatacagatcttaagagggctccgtgagagatatgaactccatcacaaactgcgatacacagatgatgctttaattgctgctgcacagctgtcttatcagtatatcagtgatcgtttcctgcctgacaaggccattgacttgattgatgaagctggatcccgtgttaggctgaggcatgcccagctccctgatgaagccaaagagctggacaaagagctgcgacagataaccaagcagaaaaacgaggctgtacgcggccaggattttgagaaggctggtgaattaagggaccgagaaatggaactgaaggctcaaattacggccattattgacaagagcaaggaaatgattaaagcagagactgaatctggtgatgtcggtcctcttgttactgaggcagatattcaacatattgtctcctcttggactggaattcctgtggagaaagtgtcgtctgatgagtctgaccgtctcctaaagatggaagagacactgcatacacgtatcattggccaggacgaggctgtcaaagctattagccgtgctatccgccgtgctcgtgttggcctgaagaatccaaataggccaattgccagcttcatattctctggaccaactggagttggcaaatcagagctagcaaaggctctggcagcctactactttggctcagaggaggctatgattaggcttgacatgagtgagttcatggagagacatactgtctccaagcttattggatcacctccaggttatgttgggtacactgagggaggccaactaactgaagcagtccgtcgccgcccatacacagttgttctctttgatgagattgagaaggcacatcctgatgttttcaacatgatgcttcagatattagaagatgggcgattaactgatagcaaggggcgcacagttgacttcaaaaacacactattgatcatgacatctaatgtgggaagcagtgtcattgagaaaggaggccgcaagatcgggtttgaccttgactatgatgagaaagacaccagctataacaggatcaagagcctggtgaccgaggagttgaagcagtatttccggccagagttcttgaacagattggatgagatgattgtattccggcagctgactaaattggaggtgaaggagattgctgacattatgctgaaagaagtgtttgacaggctgaaggccaaggagattaatctccaggtcacggagaagttccgagatagagttgttgacgaaggttataacccgagctatggtgccagacctttgcggcgtgctatcatgaggcttctggaggatagtctggcagagaagatgctggctggtgaggtgaaagaaggtgactctgccatcgttgatgtggattcagatggcaaggtgatagtcctgaatggtggtagcggtgttgctgagccactggaacctgctctcagtacctaaccgaggtcaaaatcatcattggtccgaaatatggccttctttacaagtcagctgggtttctcgtgatggtaaaaactagactgacattacttggccgcccattagttgctttatctttcgtttattttcttttttgttggaagtgaggcagtagggttgctatggaaatgaatagatggagaagcatttagcagacatataatatatgctagacttttgagttgccttgttttgggaagaaacttggaattttcagtttgatgcacttgtattattattaggccttggtagcaacaagatacggatgtcgtctctacgtttgctgttgtacttcagtgtaacttgcctcccgaatgtatgagtattatttatcaagtcccaaataacagtgacggattgctacattctgttttttttgtttgtggatctgaaaattggaattcttagcttatc

SEQ ID NO: 209501 - DNA, 3395 bp, Zea Mays
cccaattcccactaccgcggcaggcagctaccccctccctctcgtctcctccgccacctcttctcgcgtctagggtgcgcccgcctcgctggcgtagggtcgggacggttctgccggtgcgagctccacgacccctctgcgggagacgaaacaaaggcgtgggcttggtagatacaggtctgggattgccttttcctagttcaacatggagggcgctcttgttcagtctgctattgttccagccgtttacagaagcagctcaggtcggttccgtgtgcgtgcaagggccagaacaaatgctacaatggtgcggaatacgccaacaaggactcttactcttggtggcttccaagggctgcgtcagacaaactttttggatacgaggtctgtaattaagcgtgactttggatcaatcgtggcaagccagattgcaaggccacgcgggtcagcctcaagaggggtggtccgtgccatgtttgagcgcttcactgagaaagcaatcaaggtgattatgcttgcacaggaagaggcaaggcgcctgggacacaacttcgttgggacagaacagattttgctggggcttattggtgagggcacaggaattgcagcgaaggttatgaagtctatgggaatcaatcttaaggatgcccgagtggaagtcgaaaagataattggacgtggcagtgggtttgtggctgttgaaatcccattcacacctcgagcaaaacgtgtattggaattgtcccttgaagaagctcgtcagcttgggcataattatataggatctgaacacttactccttgggctacttcgtgagggtgaaggtgttgctgctcgtgtgcttgaaagccttggtgctgatccaaacaacatccgtacccaggtcataagaatggttggggaaagcacagaagctgttggggctggagttggtggaggaagcagtggccagaagatgcccacacttgaagaatacgggcaaattggacccagttgttggtagacaggatcagattgagcgcgttacccagattttaggcaggaggacaaagaacaacccctgcttaattggagagcctggtgttggaaagactgctattgctgaggggcttgctcaacgtatttccaatggtgatgttcccgaaacaattgaaggaaagaaggttattactcttgacatgggcctccttgttgctggaaccaaataccgtggagagtttgaagagagattaaagaaacttatggaggaaattaagcaaaatgaagatattattctctttattgatgaagtgcacacactgattggagcaggtgcagcagaaggtgcgattgatgctgctaatattttgaagccagctcttgcaagaggtgaactgcagtgcattggtgccacaacactggatgagtataggaagcatatagagaaagatcctgccttggaaagaaggtttcaaccagttaaggttcctgagcctactgttgatgaaacaatacagatcttaagagggctccgtgagagatatgaactccatcacaaactgcgatacacagatgatgctttaattgctgctgcacagctgtcttatcagtatatcagtgatcgtttcctgcctgacaaggccattgacttgattgatgaagctggatcccgtgttaggctgaggcatgcccagctccctgatgaagccaaagagctggacaaagagctgcgacagataaccaagcagaaaaacgaggctgtacgcggccaggattttgagaaggctggtgaattaagggaccgagaaatggaactgaaggctcaaattacggccattattgacaagagcaaggaaatgattaaagcagagactgaatctggtgatgtcggtcctcttgttactgaggcagatattcaacatattgtctcctcttggactggaattcctgtggagaaagtgtcgtctgatgagtctgaccgtctcctaaagatggaagagacactgcatacacgtatcattggccaggacgaggctgtcaaagctattagccgtgctatccgccgtgctcgtgttggcctgaagaatccaaataggccaattgccagcttcatattctctggaccaactggagttggcaaatcagagctagcaaaggctctggcagcctactactttggctcagaggaggctatgattaggcttgacatgagtgagttcatggagagacatactgtctccaagcttattggatcacctccaggttatgttgggtacactgagggaggccaactaactgaagcagtccgtcgccgcccatacacagttgttctctttgatgagattgagaaggcacatcctgatgttttcaacatgatgcttcagatattagaagatgggcgattaactgatagcaaggggcgcacagttgacttcaaaaacacactattgatcatgacatctaatgtgggaagcagtgtcattgagaaaggaggccgcaagatcgggtttgaccttgactatgatgagaaagacaccagctataacaggatcaagagcctggtgaccgaggagttgaagcagtatttccggccagagttcttgaacagattggatgagatgattgtattccggcagctgactaaattggaggtgaaggagattgctgacattatgctgaaagaagtgtttgacaggctgaaggccaaggagattaatctccaggtcacggagaagttccgagatagagttgttgacgaaggttataacccgagctatggtgccagacctttgcggcgtgctatcatgaggcttctggaggatagtctggcagagaagatgctggctggtgaggtgaaagaaggtgactctgccatcgttgatgtggattcagatggcaaggtgatagtcctgaatggtggtagcggtgttgctgagccactggaacctgctctcagtacctaaccgaggtcaaaatcatcattggtccgaaatatggccttctttacaagtcagctgggtttctcgtgatggtaaaaactagactgacattacttggccgcccattagttgctttatctttcgtttattttcttttttgttggaagtgaggcagtagggttgctatggaaatgaatagatggagaagcatttagcagacatataatatatgctagacttttgagttgccttgttttgggaagaaacttggaattttcagtttgatgcacttgtattattattaggccttggtagcaacaagatacggatgtcgtctctacgtttgctgttgtacttcagtgtaacttgcctcccgaatgtatgagtattatttatcaagtcccaaataacagtgacggattgctacattctgttttttttgtttgtggatctgaaaattggaattcttagcttatc

SEQ ID NO: 209502 - DNA, 1219 bp, Zea Mays
tccagcgttatgatctgtcaggactccttcacacggtgctttaagtcaaattctccagagccatggaattggaacatatatctgttccccttatggtgctttggtgtagtaataagatatggaatactcttcccactgaggtccttaacgcttgcaataggatggttagcattttttgctgccttttttcctgtccatttcctattgaaagggcaagacaagttgagaagtaaaattgagaggaagttggttgaaatgatgtgcagtgtttttgttgcttcatggactggagttatcaagtatcatggaccacgcccaagcacacgacctcatcaggtattcgttgcaaaccatacatcgatgatagatttcattattctggagcaaatgacagcatttgctgtcatcatgcagaagcatcctggatgggttggatttattcagaagactatcttggaaagtgtcggttgcatctggtttaatcgtaatgatctccgggaccgtgaagttacggcacggaagttacgtgatcatgttcaacaaccagacaacaatcctctgttgatttttccggaaggaacttgtgtgaacaaccagtacacggtcatgttcaagaagggtgcctttgagcttggctgcgctgtatgtccaatagctatcaagtacaataaaatatttgttgatgccttttggaacagtaagaagcaatcttttacaatgcacttggtccggctgatgacatcatgggctgttgtgtgtgatgtttggtacttacctcctcaatatctgagggagggagagacggcaattgcatttgctgagagagtaagggacatgatagctgctagagctggactaaagaaggttccttgggatggctatctgaaacacaaccgtcctagtcccaaacacactgaagagaaacaacgcatatttgccgaatctgtcttgatgagactggaggagaaatgaagggacgtaaagccgtacaagtgcacttcgttagggttttacatgcagctaccttgtaattcggttggcttccagaaaaaaaaaagtcagtgattaacaccgaagcattgtgctctcgtgagatgctgtgttggtcttaatatattgacggtactgtaccatggtttaaatgtgattattgaagcaatgtgaatggattagctggctaagaaaggaagtaaattgaattgtttgaatttgcagtgtg

SEQ ID NO: 209503 - DNA, 5983 bp, Zea Mays
ccgtgacacagatcaaggcccattgcgtatgtcgacgtgcgcggcagcgagcgtgcgtacacgtcacgcaccacgtcagaagccccccaacccaccggtcccccactcagaccgtccgacgaacgactcgacgactgtcgactcctgcacaggcaacacctcacctcgatgatgcatccgctccgccgcatcctcgctctcttactcgtcggcctcctccccgcggccgcgtggtccttggcaccaccccgcttcccgaggccccaaccccgctcgcggccgggagctaatggggtgggagactacgagtacgagacgcgatacttccggcagcggctggaccacttcagctttccaggggtcggggacgaggacgaggacgaggcggctgcgttcttccagcagcggtacctggtgggccgcggcggtgggtgggctggacccggcggccccatcttcttctactgcggcaacgagggcgacatcgcctggttcgccgccaactccggcctcgtctgggaggccgccccacgcttcgccgccctcgtcgtcttcgccgagcatcgctactacggagagtccatgcctttcggtagcaaagccaaggcgtacagcgactccaagtccctggcgtatctcacggccgagcaggcgcttgctgactttgctgtgctgctcactgacctcaagaggaacctatcggcagagggcagccccgttgtgctctttgggggctcatacggtggaatgctagctgcttggatgagactcaaatatccccatattgctattggggctctcgcatcatcagctccgatcctgcagtttgaggacattgttccttctactatattctatgatctcgtatctgatgattttaggagggaaagtttaagttgttttcttacaataaaagactcctggaaagaattagatgaccaagcaaacgagcaagatggtcttctgaaactaagtaaaacgttccacctttgccagaccctgaaaacaagtggagacctttcagattggttgagctcagcgtacagttatctggccatggtggattacccacttccatcagaatttctcatgcctttgccagccaatcctattaaagaagtatgcagaaatatcgacagtcaacctaagggtactggtactctggaacgtatatatgcaggagtaaatgtatactacaattatactggcactgttgactgctttgatctaaatgatgacccccatggaatgggtggatgggactggcaggcttgtaccgagatggtaatgccaatgtcttacagtgaacaaaggagcatgtatccaccttataaatttgactacgcttcctatgctgaggattgcatcaaaagctatggtgtcaggccaaggcctaagtggattacaacagaatttggtgggcataatatcactaaggtcctggaaaattttggtagtaacatcatattcttcaacggacttcttgacccatggagtggcggaggtgtcctgaagaatatatctgagagtgtcgttgctattgtggctccattaggagcacatcacatcgatctgcgcccggcaactccagatgacccggattggctggtggccctgagagaatcagagctggagatcatatctggctggctatgggattactacggggctggaggagcactcttccagcctgtagctgtgaagggctcctcttcatactgaggaaccgcaccctggctaataactcaaatgcttggtctcagaaataagagggccctgctgcaagtgccaaccaccgttaatgctgctgcagtgctgcgtcatggagaaggaagatcttcatgttgatgatcgggtccgctcctgcatcatgtgccatatcagtagcatttggtctgtgtatcaaatgggacatgtacttggctgatgaggtgaggaaaacactggataacgtaacgactctttcgcagtggtggtggcggtcagcaggtgctctagaggcttgatatcacgtgcatgtgccgctgtaaataacataatgctctatgtacgtgtacatctctactactctataagcctgtagtgtaggcgtgcacaccccgtgcaccgtgttctgcctccaacgtcctctcgcccacgcgctccgtcaatcacgcaagttatgccaccgatgtcgcccgaccgccccatccgcattgcccccacccccgtccgccgctagatgcggatcccgccgcttccagcatccagccaagcccgtgagccgcacgccgctcctgctcccgctccgagcgccttaggtcaggcggcgttggcccgacggcggggggaggcatcacgctgccatccatgggcgcgcccccgccgccgctgcacccgacgcccacctctcccacggcgcgcccgcaccaccaccactacctcttctccatcaagcagctcaacacgctgggcgcggcggccgtgctcgccttctccaccacggtcccgctctcggagactgccttcgcggtgctcctcccccctacctcctcgtcctcgcctggctcgccttcccgcagcgcccaggccgctcgagacccggatcccgcctctacccctcggcaccatcgtcagtgtcttcgatggccacaacggccccgacgcccccaccccgacagacactgagccctcttccgctcgcgtgactggtgccccctcaaccctcgactctcctccccaccgtggccccttccccagccccagtgaccagcgcctcccttcctaagtgcggccatggcgaccatcgtgccctagcccgcccctgcaccatggcaagcacaccccttctactcctctcgccccaacccctgtgcagcccagcgcggtggcctataacccacagcaaggcgcaactagctggctggtggccctgccccggtgagcccctgctaggcgcggccagcaacccccgtggtctagcccctgcctaggcacacccaaaacccctgcccttgcaacttgtcctcggcgccgccccactcgcccgagatctgccgcgacaacaggaattggacgtacattgggactttgaagtgcagctaaggctacctggcgattggtggaaagagatctgatgacggcgatcatggtcgaagagtaggagaggccctagaagaaaggtgacatattctcgttcttcggcagcggaataaatgcaccgagctgagaaaggacagaacaaagaaagatcttaaaatcaaagctaaagaagtggagattcaaaatctaaaaaaaagctaatgtcatggaataaatgaggttgatgtggagctaaaaagggaggctatgtttttttgggtgaggcggttatcattggcttgttatgtgaacattattgtgatgtggtttcatgttgtccaggtgccagtttaacaactttttgcaccaccatgtcgagaatatcattgggtcatgtctggagagtaataatgatcaactgatgggccatgtccttgatgagtgtaaacttgttacaagaattttggaagcagagaagaactctgctctatcgtcagaattggacggtcgcatcgacgccaggttccagcagaggagtcgttactctccttgattccttcaccgagttcaccgaggaatatgaactgaaaatgaaagagaagggtgagcaactgattgtaagatctttcatcagtgcaacctctccttttttagctttcatcagtgctacactcccacagtccccacatgcacgcagatgtttgaaaatataaaataaaatcaacaacactgcaaatttactagctcaactacaagaggcatggagttattattaaaaaatgaagtactcatgatgaattccaaacaaaaaatctgacctaataatcaacataatataaattgttgtagctcagtcctatagtcatactgagctactgattagaatgttcaagaatgaaccattagatttcctgtgctaaaatgaggattgatcataagactaatgacgatcaagactatcaaggcccctacaaacaaagctcatgggaaattagaaagtgaaatgaaataccatgttgaaaacagggccaaagtagctagcaattcaaagaggcaaaatgctgcaaaatataatgcttcatgagttgttttcggtgttgtcaaaatctcaggtgccacaatggatgaaagaacaacatgtagaattgggttccaaaggacttgagggctacttcatcacaacctgtaactgaagatcttgaataactgactacatcaccatgcaagactaaagtttttattttattaagaaaatgaccccaaagaagaagatgtgtgatatatccctgatgactgcatatgtgttgagggttactacacactgaaaaatagaataacagactctgtggctgttagtgaagagggattagtcaaaaagagaacaaggcgtccaaaacctgttggcaatgagggggctgtcagaaagagaagaggctctgccatcccacaactataattgttcaatatatatggctgaattgaagggagaagatgatttatcagcaggctctatgagcacaactgcatagtcaagacataattcttcggcccctgcagacttcaagcagctaagaagtgttacgcccattgacatctttccacgacaagagacctgggcaagagaatccggacgtgctgagggggagaggaaggagaggaggaagatatcgggcaagagaacccattgacatccttggatagggtccgtctgatgccattcatcgctgtctttgatctcaggaaggcatcttagccagctcaattttattagaaatattgttgttttaagatacagagtccatggttactattgtacgcttttctgagaaacttgtcatcccaataatttggttctggagctatatactgatctagcttgttttagtaacaaatgtaagttgctcacatttcctttagactgtcactagaactttgaacgatcaactcgtgcttctaaatcaagaattaccatatgtgttttttgagttcgatcccttctattttttatttggccaccaaacgaagtttttacatgacaagaatgttataaatacttctttaaatcacgagtttcgtgtgtcacgtacgtgcaatgtaggtatatttctctttcatgcttctcgcgatcgattgtgccgtcgcaacgcacgggcattaacctagtctgtacatatgctgccagtgtgctgtgtgcgtctggtgtcgcactcgagtagtacgcgacgggtctcctgcggccctgttggagtcgtcaattgtcagccaccttcgaatacgagtagggatgacaattgacaacggggacagaccaggagctgtatgaaataaagaacattgtagatgctcttaatgagcaacgcgagaagttgcaagagcaaagaaagctgcttcattcagaccgagaaccaatctgacagcaaatccagcagcttactgggttagaagagctgaaaattgaatctgagaacgggcaactaactgtctttgacacaatgtgagaacttaaagaaataaaggtggcgtggaaaacctgaaagagaacggtgttcacatgtctcctgacgagaggatgtataaaaacgcaaatgcaaagcacactactgtgaagagattggaaccgtctcctgcgatccacaccaattttcctgggtgttattagaaaatgtgctcaggtgatattcaaaggctgtgcagagaagagcgctgatgatccccacaacacaacgatagattggtacctgcaaagttggcaatgcaaatgtcaatggctctagcttaattagctgctgctgcctattcagatgaactgttatttggtcatcagctggaaaatggtgctgggaaaaaggcttcgaaatgggtgtgcatacgatcgtgacaccatccgtcggcgtgcatatgtgtgacgtggcagcataatgag

SEQ ID NO: 209504 - DNA, 5952 bp, Zea Mays
cacagatcaaggcccattgcgtatgtcgacgtgcgcggcagcgagcgtgcgtacacgtcacgcaccacgtcagaagccccccaacccaccggtcccccactcagaccgtccgacgaacgactcgacgactgtcgactcctgcacaggcaacacctcacctcgatgatgcatccgctccgccgcatcctcgctctcttactcgtcggcctcctccccgcggccgcgtggtccttggcaccaccccgcttcccgaggccccaaccccgctcgcggccgggagctaatggggtgggagactacgagtacgagacgcgatacttccggcagcggctggaccacttcagctttccaggggtcggggacgaggacgaggacgaggcggctgcgttcttccagcagcggtacctggtgggccgcggcggtgggtgggctggacccggcggccccatcttcttctactgcggcaacgagggcgacatcgcctggttcgccgccaactccggcctcgtctgggaggccgccccacgcttcgccgccctcgtcgtcttcgccgagcatcgctactacggagagtccatgcctttcggtagcaaagccaaggcgtacagcgactccaagtccctggcgtatctcacggccgagcaggcgcttgctgactttgctgtgctgctcactgacctcaagaggaacctatcggcagagggcagccccgttgtgctctttgggggctcatacggtggaatgctagctgcttggatgagactcaaatatccccatattgctattggggctctcgcatcatcagctccgatcctgcagtttgaggacattgttccttctactatattctatgatctcgtatctgatgattttaggagggaaagtttaagttgttttcttacaataaaagactcctggaaagaattagatgaccaagcaaacgagcaagatggtcttctgaaactaagtaaaacgttccacctttgccagaccctgaaaacaagtggagacctttcagattggttgagctcagcgtacagttatctggccatggtggattacccacttccatcagaatttctcatgcctttgccagccaatcctattaaagaagtatgcagaaatatcgacagtcaacctaagggtactggtactctggaacgtatatatgcaggagtaaatgtatactacaattatactggcactgttgactgctttgatctaaatgatgacccccatggaatgggtggatgggactggcaggcttgtaccgagatggtaatgccaatgtcttacagtgaacaaaggagcatgtatccaccttataaatttgactacgcttcctatgctgaggattgcatcaaaagctatggtgtcaggccaaggcctaagtggattacaacagaatttggtgggcataatatcactaaggtcctggaaaattttggtagtaacatcatattcttcaacggacttcttgacccatggagtggcggaggtgtcctgaagaatatatctgagagtgtcgttgctattgtggctccattaggagcacatcacatcgatctgcgcccggcaactccagatgacccggattggctggtggccctgagagaatcagagctggagatcatatctggctggctatgggattactacggggctggaggagcactcttccagcctgtagctgtgaagggctcctcttcatactgaggaaccgcaccctggctaataactcaaatgcttggtctcagaaataagagggccctgctgcaagtgccaaccaccgttaatgctgctgcagtgctgcgtcatggagaaggaagatcttcatgttgatgatcgggtccgctcctgcatcatgtgccatatcagtagcatttggtctgtgtatcaaatgggacatgtacttggctgatgaggtgaggaaaacactggataacgtaacgactctttcgcagtggtggtggcggtcagcaggtgctctagaggcttgatatcacgtgcatgtgccgctgtaaataacataatgctctatgtacgtgtacatctctactactctataagcctgtagtgtaggcgtgcacaccccgtgcaccgtgttctgcctccaacgtcctctcgcccacgcgctccgtcaatcacgcaagttatgccaccgatgtcgcccgaccgccccatccgcattgcccccacccccgtccgccgctagatgcggatcccgccgcttccagcatccagccaagcccgtgagccgcacgccgctcctgctcccgctccgagcgccttaggtcaggcggcgttggcccgacggcggggggaggcatcacgctgccatccatgggcgcgcccccgccgccgctgcacccgacgcccacctctcccacggcgcgcccgcaccaccaccactacctcttctccatcaagcagctcaacacgctgggcgcggcggccgtgctcgccttctccaccacggtcccgctctcggagactgccttcgcggtgctcctcccccctacctcctcgtcctcgcctggctcgccttcccgcagcgcccaggccgctcgagacccggatcccgcctctacccctcggcaccatcgtcagtgtcttcgatggccacaacggccccgacgcccccaccccgacagacactgagccctcttccgctcgcgtgactggtgccccctcaaccctcgactctcctccccaccgtggccccttccccagccccagtgaccagcgcctcccttcctaagtgcggccatggcgaccatcgtgccctagcccgcccctgcaccatggcaagcacaccccttctactcctctcgccccaacccctgtgcagcccagcgcggtggcctataacccacagcaaggcgcaactagctggctggtggccctgccccggtgagcccctgctaggcgcggccagcaacccccgtggtctagcccctgcctaggcacacccaaaacccctgcccttgcaacttgtcctcggcgccgccccactcgcccgagatctgccgcgacaacaggaattggacgtacattgggactttgaagtgcagctaaggctacctggcgattggtggaaagagatctgatgacggcgatcatggtcgaagagtaggagaggccctagaagaaagcggaataaatgcaccgagctgagaaaggacagaacaaagaaagatcttaaaatcaaagctaaagaagtggagattcaaaatctaaaaaaaagctaatgtcatggaataaatgaggttgatgtggagctaaaaagggaggctatgtttttttgggtgaggcggttatcattggcttgttatgtgaacattattgtgatgtggtttcatgttgtccaggtgccagtttaacaactttttgcaccaccatgtcgagaatatcattgggtcatgtctggagagtaataatgatcaactgatgggccatgtccttgatgagtgtaaacttgttacaagaattttggaagcagagaagaactctgctctatcgtcagaattggacggtcgcatcgacgccaggttccagcagaggagtcgttactctccttgattccttcaccgagttcaccgaggaatatgaactgaaaatgaaagagaagggtgagcaactgattgtaagatctttcatcagtgcaacctctccttttttagctttcatcagtgctacactcccacagtccccacatgcacgcagatgtttgaaaatataaaataaaatcaacaacactgcaaatttactagctcaactacaagaggcatggagttattattaaaaaatgaagtactcatgatgaattccaaacaaaaaatctgacctaataatcaacataatataaattgttgtagctcagtcctatagtcatactgagctactgattagaatgttcaagaatgaaccattagatttcctgtgctaaaatgaggattgatcataagactaatgacgatcaagactatcaaggcccctacaaacaaagctcatgggaaattagaaagtgaaatgaaataccatgttgaaaacagggccaaagtagctagcaattcaaagaggcaaaatgctgcaaaatataatgcttcatgagttgttttcggtgttgtcaaaatctcaggtgccacaatggatgaaagaacaacatgtagaattgggttccaaaggacttgagggctacttcatcacaacctgtaactgaagatcttgaataactgactacatcaccatgcaagactaaagtttttattttattaagaaaatgaccccaaagaagaagatgtgtgatatatccctgatgactgcatatgtgttgagggttactacacactgaaaaatagaataacagactctgtggctgttagtgaagagggattagtcaaaaagagaacaaggcgtccaaaacctgttggcaatgagggggctgtcagaaagagaagaggctctgccatcccacaactataattgttcaatatatatggctgaattgaagggagaagatgatttatcagcaggctctatgagcacaactgcatagtcaagacataattcttcggcccctgcagacttcaagcagctaagaagtgttacgcccattgacatctttccacgacaagagacctgggcaagagaatccggacgtgctgagggggagaggaaggagaggaggaagatatcgggcaagagaacccattgacatccttggatagggtccgtctgatgccattcatcgctgtctttgatctcaggaaggcatcttagccagctcaattttattagaaatattgttgttttaagatacagagtccatggttactattgtacgcttttctgagaaacttgtcatcccaataatttggttctggagctatatactgatctagcttgttttagtaacaaatgtaagttgctcacatttcctttagactgtcactagaactttgaacgatcaactcgtgcttctaaatcaagaattaccatatgtgttttttgagttcgatcccttctattttttatttggccaccaaacgaagtttttacatgacaagaatgttataaatacttctttaaatcacgagtttcgtgtgtcacgtacgtgcaatgtaggtatatttctctttcatgcttctcgcgatcgattgtgccgtcgcaacgcacgggcattaacctagtctgtacatatgctgccagtgtgctgtgtgcgtctggtgtcgcactcgagtagtacgcgacgggtctcctgcggccctgttggagtcgtcaattgtcagccaccttcgaatacgagtagggatgacaattgacaacggggacagaccaggagctgtatgaaataaagaacattgtagatgctcttaatgagcaacgcgagaagttgcaagagcaaagaaagctgcttcattcagaccgagaaccaatctgacagcaaatccagcagcttactgggttagaagagctgaaaattgaatctgagaacgggcaactaactgtctttgacacaatgtgagaacttaaagaaataaaggtggcgtggaaaacctgaaagagaacggtgttcacatgtctcctgacgagaggatgtataaaaacgcaaatgcaaagcacactactgtgaagagattggaaccgtctcctgcgatccacaccaattttcctgggtgttattagaaaatgtgctcaggtgatattcaaaggctgtgcagagaagagcgctgatgatccccacaacacaacgatagattggtacctgcaaagttggcaatgcaaatgtcaatggctctagcttaattagctgctgctgcctattcagatgaactgttatttggtcatcagctggaaaatggtgctgggaaaaaggcttcgaaatgggtgtgcatacgatcgtgacaccatccgtcggcgtgcatatgtgtgacgtggcagcataatgag

SEQ ID NO: 209505 - DNA, 3666 bp, Zea Mays
gtcgacgtgcgcggcagcgagcgtgcgtacacgtcacgcaccacgtcagaagccccccaacccaccggtcccccactcagaccgtccgacgaacgactcgacgactgtcgactcctgcacaggcaacacctcacctcgatgatgcatccgctccgccgcatcctcgctctcttactcgtcggcctcctccccgcggccgcgtggtccttggcaccaccccgcttcccgaggccccaaccccgctcgcggccgggagctaatggggtgggagactacgagtacgagacgcgatacttccggcagcggctggaccacttcagctttccaggggtcggggacgaggacgaggacgaggcggctgcgttcttccagcagcggtacctggtgggccgcggcggtgggtgggctggacccggcggccccatcttcttctactgcggcaacgagggcgacatcgcctggttcgccgccaactccggcctcgtctgggaggccgccccacgcttcgccgccctcgtcgtcttcgccgaggcaatcgttcttccgcggcctcactcgtctcgtagtcgtactcgtgtctcttcttcgttttaaaaactttccgtttgaaacgctgtattgtttatggtgcgagcggtggccgctcgcttgtgtgctgcagcatcgctactacggagagtccatgcctttcggtagcaaagccaaggcgtacagcgactccaagtccctggcgtatctcacggccgagcaggcgcttgctgactttgctgtgctgctcactgacctcaagaggaacctatcggcagagggcagccccgttgtgctctttgggggctcatacggtggaatgctagctgcttggatgagactcaaatatccccatattgctattggggctctcgcatcatcagctccgatcctgcagtttgaggacattgttccttctactatattctatgatctcgtatctgatgattttaggagggaaagtttaagttgttttcttacaataaaagactcctggaaagaattagatgaccaagcaaacgagcaagatggtcttctgaaactaagtaaaacgttccacctttgccagaccctgaaaacaagtggagacctttcagattggttgagctcagcgtacagttatctggccatggtggattacccacttccatcagaatttctcatgcctttgccagccaatcctattaaagaagtatgcagaaatatcgacagtcaacctaagggtactggtactctggaacgtatatatgcaggagtaaatgtatactacaattatactggcactgttgactgctttgatctaaatgatgacccccatggaatgggtggatgggactggcaggcttgtaccgagatggtaatgccaatgtcttacagtgaacaaaggagcatgtatccaccttataaatttgactacgcttcctatgctgaggattgcatcaaaagctatggtgtcaggccaaggcctaagtggattacaacagaatttggtgggcataatatcactaaggtcctggaaaattttggtagtaacatcatattcttcaacggacttcttgacccatggagtggcggaggtgtcctgaagaatatatctgagagtgtcgttgctattgtggctccattaggagcacatcacatcgatctgcgcccggcaactccagatgacccggattggctggtggccctgagagaatcagagctggagatcatatctggctggctatgggattactacggggctggaggagcactcttccagcctgtagctgtgaagggctcctcttcatactgaggaaccgcaccctggctaataactcaaatgcttggtctcagaaataagagggccctgctgcaagtgccaaccaccgttaatgctgctgcagtgctgcgtcatggagaaggaagatcttcatgttgatgatcgggtccgctcctgcatcatgtgccatatcagtagcatttggtctgtgtatcaaatgggacatgtacttggctgatgaggtgaggaaaacactggataacgtaacgactctttcgcagtggtggtggcggtcagcaggtgctctagaggcttgatatcacgtgcatgtgccgctgtaaataacataatgctctatgtacgtgtacatctctactactctataagcctgtagtgtaggcgtgcacaccccgtgcaccgtgttctgcctccaacgtcctctcgcccacgcgctccgtcaatcacgcaagttatgccaccgatgtcgcccgaccgccccatccgcattgcccccacccccgtccgccgctagatgcggatcccgccgcttccagcatccagccaagcccgtgagccgcacgccgctcctgctcccgctccgagcgccttaggtcaggcggcgttggcccgacggcggggggaggcatcacgctgccatccatgggcgcgcccccgccgccgctgcacccgacgcccacctctcccacggcgcgcccgcaccaccaccactacctcttctccatcaagcagctcaacacgctgggcgcggcggccgtgctcgccttctccaccacggtcccgctctcggagactgccttcgcggtgctcctcccccctacctcctcgtcctcgcctggctcgccttcccgcagcgcccaggccgctcgagacccggatcccgcctctacccctcggcaccatcgtcagtgtcttcgatggccacaacggccccgacgcccccaccccgacagacactgagccctcttccgctcgcgtgactggtgccccctcaaccctcgactctcctccccaccgtggccccttccccagccccagtgaccagcgcctcccttcctaagtgcggccatggcgaccatcgtgccctagcccgcccctgcaccatggcaagcacaccccttctactcctctcgccccaacccctgtgcagcccagcgcggtggcctataacccacagcaaggcgcaactagctggctggtggccctgccccggtgagcccctgctaggcgcggccagcaacccccgtggtctagcccctgcctaggcacacccaaaacccctgcccttgcaacttgtcctcggcgccgccccactcgcccgagatctgccgcgacaacaggaattggacgtacattgggactttgaagtgcagctaaggctacctggcgattggtggaaagagatctgatgacggcgatcatggtcgaagagtaggagaggccctagaagaaagcggaataaatgcaccgagctgagaaaggacagaacaaagaaagatcttaaaatcaaagctaaagaagtggagattcaaaatctaaaaaaaagctaatgtcatggaataaatgaggttgatgtggagctaaaaagggaggctatgtttttttgggtgaggcggttatcattggcttgttatgtgaacattattgtgatgtggtttcatgttgtccaggtgccagtttaacaactttttgcaccaccatgtcgagaatatcattgggtcatgtctggagagtaataatgatcaactgatgggccatgtccttgatgagtgtaaacttgttacaagaattttggaagcagagaagaactctgctctatcgtcagcatacattgtcttaagaggtaatgtgtggacgcc

SEQ ID NO: 209506 - DNA, 5974 bp, Zea Mays
gtcgacgtgcgcggcagcgagcgtgcgtacacgtcacgcaccacgtcagaagccccccaacccaccggtcccccactcagaccgtccgacgaacgactcgacgactgtcgactcctgcacaggcaacacctcacctcgatgatgcatccgctccgccgcatcctcgctctcttactcgtcggcctcctccccgcggccgcgtggtccttggcaccaccccgcttcccgaggccccaaccccgctcgcggccgggagctaatggggtgggagactacgagtacgagacgcgatacttccggcagcggctggaccacttcagctttccaggggtcggggacgaggacgaggacgaggcggctgcgttcttccagcagcggtacctggtgggccgcggcggtgggtgggctggacccggcggccccatcttcttctactgcggcaacgagggcgacatcgcctggttcgccgccaactccggcctcgtctgggaggccgccccacgcttcgccgccctcgtcgtcttcgccgagcatcgctactacggagagtccatgcctttcggtagcaaagccaaggcgtacagcgactccaagtccctggcgtatctcacggccgagcaggcgcttgctgactttgctgtgctgctcactgacctcaagaggaacctatcggcagagggcagccccgttgtgctctttgggggctcatacggtggaatgctagctgcttggatgagactcaaatatccccatattgctattggggctctcgcatcatcagctccgatcctgcagtttgaggacattgttccttctactatattctatgatctcgtatctgatgattttaggagggaaagtttaagttgttttcttacaataaaagactcctggaaagaattagatgaccaagcaaacgagcaagatggtcttctgaaactaagtaaaacgttccacctttgccagaccctgaaaacaagtggagacctttcagattggttgagctcagcgtacagttatctggccatggtggattacccacttccatcagaatttctcatgcctttgccagccaatcctattaaagaagtatgcagaaatatcgacagtcaacctaagggtactggtactctggaacgtatatatgcaggagtaaatgtatactacaattatactggcactgttgactgctttgatctaaatgatgacccccatggaatgggtggatgggactggcaggcttgtaccgagatggtaatgccaatgtcttacagtgaacaaaggagcatgtatccaccttataaatttgactacgcttcctatgctgaggattgcatcaaaagctatggtgtcaggccaaggcctaagtggattacaacagaatttggtgggcataatatcactaaggtcctggaaaattttggtagtaacatcatattcttcaacggacttcttgacccatggagtggcggaggtgtcctgaagaatatatctgagagtgtcgttgctattgtggctccattaggagcacatcacatcgatctgcgcccggcaactccagatgacccggattggctggtggccctgagagaatcagagctggagatcatatctggctggctatgggattactacggggctggaggagcactcttccagcctgtagctgtgaagggctcctcttcatactgaggaaccgcaccctggctaataactcaaatgcttggtctcagaaataagagggccctgctgcaagtgccaaccaccgttaatgctgctgcagtgctgcgtcatggagaaggaagatcttcatgttgatgatcgggtccgctcctgcatcatgtgccatatcagtagcatttggtctgtgtatcaaatgggacatgtacttggctgatgaggtgaggaaaacactggataacgtaacgactctttcgcagtggtggtggcggtcagcaggtgctctagaggcttgatatcacgtgcatgtgccgctgtaaataacataatgctctatgtacgtgtacatctctactactctataagcctgtagtgtaggcgtgcacaccccgtgcaccgtgttctgcctccaacgtcctctcgcccacgcgctccgtcaatcacgcaagttatgccaccgatgtcgcccgaccgccccatccgcattgcccccacccccgtccgccgctagatgcggatcccgccgcttccagcatccagccaagcccgtgagccgcacgccgctcctgctcccgctccgagcgccttaggtcaggcggcgttggcccgacggcggggggaggcatcacgctgccatccatgggcgcgcccccgccgccgctgcacccgacgcccacctctcccacggcgcgcccgcaccaccaccactacctcttctccatcaagcagctcaacacgctgggcgcggcggccgtgctcgccttctccaccacggtcccgctctcggagactgccttcgcggtgctcctcccccctacctcctcgtcctcgcctggctcgccttcccgcagcgcccaggccgctcgagacccggatcccgcctctacccctcggcaccatcgtcagtgtcttcgatggccacaacggccccgacgcccccaccccgacagacactgagccctcttccgctcgcgtgactggtgccccctcaaccctcgactctcctccccaccgtggccccttccccagccccagtgaccagcgcctcccttcctaagtgcggccatggcgaccatcgtgccctagcccgcccctgcaccatggcaagcacaccccttctactcctctcgccccaacccctgtgcagcccagcgcggtggcctataacccacagcaaggcgcaactagctggctggtggccctgccccggtgagcccctgctaggcgcggccagcaacccccgtggtctagcccctgcctaggcacacccaaaacccctgcccttgcaacttgtcctcggcgccgccccactcgcccgagatctgccgcgacaacaggaattggacgtacattgggactttgaagtgcagctaaggctacctggcgattggtggaaagagatctgatgacggcgatcatggtcgaagagtaggagaggccctagaagaaaggtgacatattctcgttcttcggcagcggaataaatgcaccgagctgagaaaggacagaacaaagaaagatcttaaaatcaaagctaaagaagtggagattcaaaatctaaaaaaaagctaatgtcatggaataaatgaggttgatgtggagctaaaaagggaggctatgtttttttgggtgaggcggttatcattggcttgttatgtgaacattattgtgatgtggtttcatgttgtccaggtgccagtttaacaactttttgcaccaccatgtcgagaatatcattgggtcatgtctggagagtaataatgatcaactgatgggccatgtccttgatgagtgtaaacttgttacaagaattttggaagcagagaagaactctgctctatcgtcagaattggacggtcgcatcgacgccaggttccagcagaggagtcgttactctccttgattccttcaccgagttcaccgaggaatatgaactgaaaatgaaagagaagggtgagcaactgattgtaagatctttcatcagtgcaacctctccttttttagctttcatcagtgctacactcccacagtccccacatgcacgcagatgtttgaaaatataaaataaaatcaacaacactgcaaatttactagctcaactacaagaggcatggagttattattaaaaaatgaagtactcatgatgaattccaaacaaaaaatctgacctaataatcaacataatataaattgttgtagctcagtcctatagtcatactgagctactgattagaatgttcaagaatgaaccattagatttcctgtgctaaaatgaggattgatcataagactaatgacgatcaagactatcaaggcccctacaaacaaagctcatgggaaattagaaagtgaaatgaaataccatgttgaaaacagggccaaagtagctagcaattcaaagaggcaaaatgctgcaaaatataatgcttcatgagttgttttcggtgttgtcaaaatctcaggtgccacaatggatgaaagaacaacatgtagaattgggttccaaaggacttgagggctacttcatcacaacctgtaactgaagatcttgaataactgactacatcaccatgcaagactaaagtttttattttattaagaaaatgaccccaaagaagaagatgtgtgatatatccctgatgactgcatatgtgttgagggttactacacactgaaaaatagaataacagactctgtggctgttagtgaagagggattagtcaaaaagagaacaaggcgtccaaaacctgttggcaatgagggggctgtcagaaagagaagaggctctgccatcccacaactataattgttcaatatattgtacctttttaaacctttagatggctgaattgaagggagaagatgatttatcagcaggctctatgagcacaactgcatagtcaagacataattcttcggcccctgcagacttcaagcagctaagaagtgttacgcccattgacatctttccacgacaagagacctgggcaagagaatccggacgtgctgagggggagaggaaggagaggaggaagatatcgggcaagagaacccattgacatccttggatagggtccgtctgatgccattcatcgctgtctttgatctcaggaaggcatcttagccagctcaattttattagaaatattgttgttttaagatacagagtccatggttactattgtacgcttttctgagaaacttgtcatcccaataatttggttctggagctatatactgatctagcttgttttagtaacaaatgtaagttgctcacatttcctttagactgtcactagaactttgaacgatcaactcgtgcttctaaatcaagaattaccatatgtgttttttgagttcgatcccttctattttttatttggccaccaaacgaagtttttacatgacaagaatgttataaatacttctttaaatcacgagtttcgtgtgtcacgtacgtgcaatgtaggtatatttctctttcatgcttctcgcgatcgattgtgccgtcgcaacgcacgggcattaacctagtctgtacatatgctgccagtgtgctgtgtgcgtctggtgtcgcactcgagtagtacgcgacgggtctcctgcggccctgttggagtcgtcaattgtcagccaccttcgaatacgagtagggatgacaattgacaacggggacagaccaggagctgtatgaaataaagaacattgtagatgctcttaatgagcaacgcgagaagttgcaagagcaaagaaagctgcttcattcagaccgagaaccaatctgacagcaaatccagcagcttactgggttagaagagctgaaaattgaatctgagaacgggcaactaactgtctttgacacaatgtgagaacttaaagaaataaaggtggcgtggaaaacctgaaagagaacggtgttcacatgtctcctgacgagaggatgtataaaaacgcaaatgcaaagcacactactgtgaagagattggaaccgtctcctgcgatccacaccaattttcctgggtgttattagaaaatgtgctcaggtgatattcaaaggctgtgcagagaagagcgctgatgatccccacaacacaacgatagattggtacctgcaaagttggcaatgcaaatgtcaatggctctagcttaattagctgctgctgcctattcagatgaactgttatttggtcatcagctggaaaatggtgctgggaaaaaggcttcgaaatgggtgtgcatacgatcgtgacaccatccgtcggcgtgcatatgtgtgacgtggcagcataatgag

SEQ ID NO: 209507 - DNA, 5915 bp, Zea Mays
cgtgcgcggcagcgagcgtgcgtacacgtcacgcaccacgtcagaagccccccaacccaccggtcccccactcagaccgtccgacgaacgactcgacgactgtcgactcctgcacaggcaacacctcacctcgatgatgcatccgctccgccgcatcctcgctctcttactcgtcggcctcctccccgcggccgcgtggtccttggcaccaccccgcttcccgaggccccaaccccgctcgcggccgggagctaatggggtgggagactacgagtacgagacgcgatacttccggcagcggctggaccacttcagctttccaggggtcggggacgaggacgaggacgaggcggctgcgttcttccagcagcggtacctggtgggccgcggcggtgggtgggctggacccggcggccccatcttcttctactgcggcaacgagggcgacatcgcctggttcgccgccaactccggcctcgtctgggaggccgccccacgcttcgccgccctcgtcgtcttcgccgagcatcgctactacggagagtccatgcctttcggtagcaaagccaaggcgtacagcgactccaagtccctggcgtatctcacggccgagcaggcgcttgctgactttgctgtgctgctcactgacctcaagaggaacctatcggcagagggcagccccgttgtgctctttgggggctcatacggtggaatgctagctgcttggatgagactcaaatatccccatattgctattggggctctcgcatcatcagctccgatcctgcagtttgaggacattgttccttctactatattctatgatctcgtatctgatgattttaggagggaaagtttaagttgttttcttacaataaaagactcctggaaagaattagatgaccaagcaaacgagcaagatggtcttctgaaactaagtaaaacgttccacctttgccagaccctgaaaacaagtggagacctttcagattggttgagctcagcgtacagttatctggccatggtggattacccacttccatcagaatttctcatgcctttgccagccaatcctattaaagaagtatgcagaaatatcgacagtcaacctaagggtactggtactctggaacgtatatatgcaggagtaaatgtatactacaattatactggcactgttgactgctttgatctaaatgatgacccccatggaatgggtggatgggactggcaggcttgtaccgagatggtaatgccaatgtcttacagtgaacaaaggagcatgtatccaccttataaatttgactacgcttcctatgctgaggattgcatcaaaagctatggtgtcaggccaaggcctaagtggattacaacagaatttgaatatcactaaggtcctggaaaattttggtagtaacatcatattcttcaacggacttcttgacccatggagtggcggaggtgtcctgaagaatatatctgagagtgtcgttgctattgtggctccattaggagcacatcacatcgatctgcgcccggcaactccagatgacccggattggctggtggccctgagagaatcagagctggagatcatatctggctggctatgggattactacggggctggaggagcactcttccagcctgtagctgtgaagggctcctcttcatactgaggaaccgcaccctggctaataactcaaatgcttggtctcagaaataagagggccctgctgcaagtgccaaccaccgttaatgctgctgcagtgctgcgtcatggagaaggaagatcttcatgttgatgatcgggtccgctcctgcatcatgtgccatatcagtagcatttggtctgtgtatcaaatgggacatgtacttggctgatgaggtgaggaaaacactggataacgtaacgactctttcgcagtggtggtggcggtcagcaggtgctctagaggcttgatatcacgtgcatgtgccgctgtaaataacataatgctctatgtacgtgtacatctctactactctataagcctgtagtgtaggcgtgcacaccccgtgcaccgtgttctgcctccaacgtcctctcgcccacgcgctccgtcaatcacgcaagttatgccaccgatgtcgcccgaccgccccatccgcattgcccccacccccgtccgccgctagatgcggatcccgccgcttccagcatccagccaagcccgtgagccgcacgccgctcctgctcccgctccgagcgccttaggtcaggcggcgttggcccgacggcggggggaggcatcacgctgccatccatgggcgcgcccccgccgccgctgcacccgacgcccacctctcccacggcgcgcccgcaccaccaccactacctcttctccatcaagcagctcaacacgctgggcgcggcggccgtgctcgccttctccaccacggtcccgctctcggagactgccttcgcggtgctcctcccccctacctcctcgtcctcgcctggctcgccttcccgcagcgcccaggccgctcgagacccggatcccgcctctacccctcggcaccatcgtcagtgtcttcgatggccacaacggccccgacgcccccaccccgacagacactgagccctcttccgctcgcgtgactggtgccccctcaaccctcgactctcctccccaccgtggccccttccccagccccagtgaccagcgcctcccttcctaagtgcggccatggcgaccatcgtgccctagcccgcccctgcaccatggcaagcacaccccttctactcctctcgccccaacccctgtgcagcccagcgcggtggcctataacccacagcaaggcgcaactagctggctggtggccctgccccggtgagcccctgctaggcgcggccagcaacccccgtggtctagcccctgcctaggcacacccaaaacccctgcccttgcaacttgtcctcggcgccgccccactcgcccgagatctgccgcgacaacaggaattggacgtacattgggactttgaagtgcagctaaggctacctggcgattggtggaaagagatctgatgacggcgatcatggtcgaagagtaggagaggccctagaagaaagcggaataaatgcaccgagctgagaaaggacagaacaaagaaagatcttaaaatcaaagctaaagaagtggagattcaaaatctaaaaaaaagctaatgtcatggaataaatgaggttgatgtggagctaaaaagggaggctatgtttttttgggtgaggcggttatcattggcttgttatgtgaacattattgtgatgtggtttcatgttgtccaggtgccagtttaacaactttttgcaccaccatgtcgagaatatcattgggtcatgtctggagagtaataatgatcaactgatgggccatgtccttgatgagtgtaaacttgttacaagaattttggaagcagagaagaactctgctctatcgtcagaattggacggtcgcatcgacgccaggttccagcagaggagtcgttactctccttgattccttcaccgagttcaccgaggaatatgaactgaaaatgaaagagaagggtgagcaactgattgtaagatctttcatcagtgcaacctctccttttttagctttcatcagtgctacactcccacagtccccacatgcacgcagatgtttgaaaatataaaataaaatcaacaacactgcaaatttactagctcaactacaagaggcatggagttattattaaaaaatgaagtactcatgatgaattccaaacaaaaaatctgacctaataatcaacataatataaattgttgtagctcagtcctatagtcatactgagctactgattagaatgttcaagaatgaaccattagatttcctgtgctaaaatgaggattgatcataagactaatgacgatcaagactatcaaggcccctacaaacaaagctcatgggaaattagaaagtgaaatgaaataccatgttgaaaacagggccaaagtagctagcaattcaaagaggcaaaatgctgcaaaatataatgcttcatgagttgttttcggtgttgtcaaaatctcaggtgccacaatggatgaaagaacaacatgtagaattgggttccaaaggacttgagggctacttcatcacaacctgtaactgaagatcttgaataactgactacatcaccatgcaagactaaagtttttattttattaagaaaatgaccccaaagaagaagatgtgtgatatatccctgatgactgcatatgtgttgagggttactacacactgaaaaatagaataacagactctgtggctgttagtgaagagggattagtcaaaaagagaacaaggcgtccaaaacctgttggcaatgagggggctgtcagaaagagaagaggctctgccatcccacaactataattgttcaatatatatggctgaattgaagggagaagatgatttatcagcaggctctatgagcacaactgcatagtcaagacataattcttcggcccctgcagacttcaagcagctaagaagtgttacgcccattgacatctttccacgacaagagacctgggcaagagaatccggacgtgctgagggggagaggaaggagaggaggaagatatcgggcaagagaacccattgacatccttggatagggtccgtctgatgccattcatcgctgtctttgatctcaggaaggcatcttagccagctcaattttattagaaatattgttgttttaagatacagagtccatggttactattgtacgcttttctgagaaacttgtcatcccaataatttggttctggagctatatactgatctagcttgttttagtaacaaatgtaagttgctcacatttcctttagactgtcactagaactttgaacgatcaactcgtgcttctaaatcaagaattaccatatgtgttttttgagttcgatcccttctattttttatttggccaccaaacgaagtttttacatgacaagaatgttataaatacttctttaaatcacgagtttcgtgtgtcacgtacgtgcaatgtaggtatatttctctttcatgcttctcgcgatcgattgtgccgtcgcaacgcacgggcattaacctagtctgtacatatgctgccagtgtgctgtgtgcgtctggtgtcgcactcgagtagtacgcgacgggtctcctgcggccctgttggagtcgtcaattgtcagccaccttcgaatacgagtagggatgacaattgacaacggggacagaccaggagctgtatgaaataaagaacattgtagatgctcttaatgagcaacgcgagaagttgcaagagcaaagaaagctgcttcattcagaccgagaaccaatctgacagcaaatccagcagcttactgggttagaagagctgaaaattgaatctgagaacgggcaactaactgtctttgacacaatgtgagaacttaaagaaataaaggtggcgtggaaaacctgaaagagaacggtgttcacatgtctcctgacgagaggatgtataaaaacgcaaatgcaaagcacactactgtgaagagattggaaccgtctcctgcgatccacaccaattttcctgggtgttattagaaaatgtgctcaggtgatattcaaaggctgtgcagagaagagcgctgatgatccccacaacacaacgatagattggtacctgcaaagttggcaatgcaaatgtcaatggctctagcttaattagctgctgctgcctattcagatgaactgttatttggtcatcagctggaaaatggtgctgggaaaaaggcttcgaaatgggtgtgcatacgatcgtgacaccatccgtcggcgtgcatatgtgtgacgtggcagcataatgag

SEQ ID NO: 209508 - DNA, 5155 bp, Zea Mays
cacatttctgtgtatgcttcttctcaaagaaaaaggacggacccagtgctggcagctcccacatcactggggtatggggaaagaataaccgattaagtgaggtatgcagaaatatcgacagtcaacctaagggtactggtactctggaacgtatatatgcaggagtaaatgtatactacaattatactggcactgttgactgctttgatctaaatgatgacccccatggaatgggtggatgggactggcaggcttgtaccgagatggtaatgccaatgtcttacagtgaacaaaggagcatgtatccaccttataaatttgactacgcttcctatgctgaggattgcatcaaaagctatggtgtcaggccaaggcctaagtggattacaacagaatttggtgggcataatatcactaaggtcctggaaaattttggtagtaacatcatattcttcaacggacttcttgacccatggagtggcggaggtgtcctgaagaatatatctgagagtgtcgttgctattgtggctccattaggagcacatcacatcgatctgcgcccggcaactccagatgacccggattggctggtggccctgagagaatcagagctggagatcatatctggctggctatgggattactacggggctggaggagcactcttccagcctgtagctgtgaagggctcctcttcatactgaggaaccgcaccctggctaataactcaaatgcttggtctcagaaataagagggccctgctgcaagtgccaaccaccgttaatgctgctgcagtgctgcgtcatggagaaggaagatcttcatgttgatgatcgggtccgctcctgcatcatgtgccatatcagtagcatttggtctgtgtatcaaatgggacatgtacttggctgatgaggtgaggaaaacactggataacgtaacgactctttcgcagtggtggtggcggtcagcaggtgctctagaggcttgatatcacgtgcatgtgccgctgtaaataacataatgctctatgtacgtgtacatctctactactctataagcctgtagtgtaggcgtgcacaccccgtgcaccgtgttctgcctccaacgtcctctcgcccacgcgctccgtcaatcacgcaagttatgccaccgatgtcgcccgaccgccccatccgcattgcccccacccccgtccgccgctagatgcggatcccgccgcttccagcatccagccaagcccgtgagccgcacgccgctcctgctcccgctccgagcgccttaggtcaggcggcgttggcccgacggcggggggaggcatcacgctgccatccatgggcgcgcccccgccgccgctgcacccgacgcccacctctcccacggcgcgcccgcaccaccaccactacctcttctccatcaagcagctcaacacgctgggcgcggcggccgtgctcgccttctccaccacggtcccgctctcggagactgccttcgcggtgctcctcccccctacctcctcgtcctcgcctggctcgccttcccgcagcgcccaggccgctcgagacccggatcccgcctctacccctcggcaccatcgtcagtgtcttcgatggccacaacggccccgacgcccccaccccgacagacactgagccctcttccgctcgcgtgactggtgccccctcaaccctcgactctcctccccaccgtggccccttccccagccccagtgaccagcgcctcccttcctaagtgcggccatggcgaccatcgtgccctagcccgcccctgcaccatggcaagcacaccccttctactcctctcgccccaacccctgtgcagcccagcgcggtggcctataacccacagcaaggcgcaactagctggctggtggccctgccccggtgagcccctgctaggcgcggccagcaacccccgtggtctagcccctgcctaggcacacccaaaacccctgcccttgcaacttgtcctcggcgccgccccactcgcccgagatctgccgcgacaacaggaattggacgtacattgggactttgaagtgcagctaaggctacctggcgattggtggaaagagatctgatgacggcgatcatggtcgaagagtaggagaggccctagaagaaagcggaataaatgcaccgagctgagaaaggacagaacaaagaaagatcttaaaatcaaagctaaagaagtggagattcaaaatctaaaaaaaagctaatgtgtaacatggaataaatgaggttgatgtggagctaaaaagggaggctatgtttttttgggtgaggcggttatcattggcttgttatgtgaacattattgtgatgtggtttcatgttgtccaggtgccagtttaacaactttttgcaccaccatgtcgagaatatcattgggtcatgtctggagagtaataatgatcaactgatgggccatgtccttgatgagtgtaaacttgttacaagaattttggaagcagagaagaactctgctctatcgtcagaattggacggtcgcatcgacgccaggttccagcagaggagtcgttactctccttgattccttcaccgagttcaccgaggtgccatactctcgaaacaaatacttgataattgttttgattttggttctttgttgtttatttagaggtgccataaattttaattcttattcggacatagaacttcataacttaatcatgatcttctccaggaatatgaactgaaaatgaaagagaagggtgagcaactgattgtaagatctttcatcagtgcaacctctccttttttagctttcatcagtgctacactcccacagtccccacatgcacgcagatgtttgaaaatataaaataaaatcaacaacactgcaaatttactagctcaactacaagaggcatggagttattattaaaaaatgaagtactcatgatgaattccaaacaaaaaatctgacctaataatcaacataatataaattgttgtagctcagtcctatagtcatactgagctactgattagaatgttcaagaatgaaccattagatttcctgtgctaaaatgaggattgatcataagactaatgacgatcaagactatcaaggcccctacaaacaaagctcatgggaaattagaaagtgaaatgaaataccatgttgaaaacagggccaaagtagctagcaattcaaagaggcaaaatgctgcaaaatataatgcttcatgaggtcagtaaatacatatttggtaattccatgctaatacactgatgctttaagatgcctgagacatctatcttctttgttagttgttttcggtgttgtcaaaatctcaggtgccacaatggatgaaagaacaacatgtagaattgggttccaaaggacttgagggctacttcatcacaacctgtaactgaagatcttgaataactgactacatcaccatgcaagactaaagtttttattttattaagaaaatgaccccaaagaagaagatgtgtgatatatccctgatgactgcatatgtgttgagggttactacacactgaaaaatagaataacagactctgtggctgttagtgaagagggattagtcaaaaagagaacaaggcgtccaaaacctgttggcaatgagggggctgtcagaaagagaagaggctctgccatcccacaactataattgttcaatatatatggctgaattgaagggagaagatgatttatcagcaggctctatgagcacaactgcatagtcaagacataattcttcggcccctgcagacttcaagcagctaagaagtgttacgcccattgacatctttccacgacaagagacctgggcaagagaatccggacgtgctgagggggagaggaaggagaggaggaagatatcgggcaagagaacccattgacatccttggatagggtccgtctgatgccattcatcgctgtctttgatctcaggaaggcatcttagccagctcaattttattagaaatattgttgttttaagatacagagtccatggttactattgtacgcttttctgagaaacttgtcatcccaataatttggttctggagctatatactgatctagcttgttttagtaacaaatgtaagttgctcacatttcctttagactgtcactagaactttgaacgatcaactcgtgcttctaaatcaagaattaccatatgtgttttttgagttcgatcccttctattttttatttggccaccaaacgaagtttttacatgacaagaatgttataaatacttctttaaatcacgagtttcgtgtgtcacgtacgtgcaatgtaggtatatttctctttcatgcttctcgcgatcgattgtgccgtcgcaacgcacgggcattaacctagtctgtacatatgctgccagtgtgctgtgtgcgtctggtgtcgcactcgagtagtacgcgacgggtctcctgcggccctgttggagtcgtcaattgtcagccaccttcgaatacgagtagggatgacaattgacaacggggacagaccaggagctgtatgaaataaagaacattgtagatgctcttaatgagcaacgcgagaagttgcaagagcaaagaaagctgcttcattcagaccgagaaccaatctgacagcaaatccagcagcttactgggttagaagagctgaaaattgaatctgagaacgggcaactaactgtctttgacacaatgtgagaacttaaagaaataaaggtggcgtggaaaacctgaaagagaacggtgttcacatgtctcctgacgagaggatgtataaaaacgcaaatgcaaagcacactactgtgaagagattggaaccgtctcctgcgatccacaccaattttcctgggtgttattagaaaatgtgctcaggtgatattcaaaggctgtgcagagaagagcgctgatgatccccacaacacaacgatagattggtacctgcaaagttggcaatgcaaatgtcaatggctctagcttaattagctgctgctgcctattcagatgaactgttatttggtcatcagctggaaaatggtgctgggaaaaaggcttcgaaatgggtgtgcatacgatcgtgacaccatccgtcggcgtgcatatgtgtgacgtggcagcataatgag

SEQ ID NO: 209509 - DNA, 2772 bp, Zea Mays
cggcgaacctgcagtcagacttaccaccaagtggacgcagcagctttaaccccccaaagcctcgacgccgcgagcacagctccgccgccaccgcccccttctcatccgcggtctcctccgcctgctgcatctctatcgatctagcgggactggctccttcccgtgctgggtccttcgtcaatcgtcagcgcgcaagatcggcacttgtgtacatctgagcagtttccggtgccctaattcaggcgcgggcgttgttgggttttcgataattttgggggttcacctgaaccctcatgacccaggtgaagcccgcccctgggggaaggatgctgaccgtgctgcgggtgcacctcccgtcggagatcccgatcgtcggctgtgagatcacgccgtatgtgctcctgcggcgccccgacggaggcgtcttcaccgacgacgtgtctgagaccgcgcccgtggatgggtacttcatgcgctacaagtggtaccgcatacaaagtgatcgtagagctgctatctgcagtgtacacccaacagaacaagcaacacttcagtgcatagggtgtctgaagtcaaaaatacctgttgctaagagctaccattgttcttctaagtgcttctccgatgcttggcaacaccacaaggttttgcatgaccgtgctataagtgctttaaatgaaaacggaaccgaagatgatgagttgtttggcagatttggtagcggcagttcgagctcaggggttattagtgctgcgttgtctggttcaacatcaaacctttcactgagctcaggtgttaataatggacctacacctgtgtatccaacaggcactgagaagagttctggtgaaacttggtttgaagtgggatggtcacgaacatatacggcaactactgatgatattggacatgtgctaagatttgaatgtatagttgtggatgtggaaacacgggggactgtgagagctcctacttcagtcatgacatcccgtgtaatcccagcaccgaccccgacaccacgccgcttgatccctgttaatgcagctgatgcaatggtccacttcgatttagatagccggacttcttcttttgggacatttactgtgctgtcctacaatattcttgctgatacatatgcaacaagtgatacatacagctattgtccaacttgggcacttacatgggcttatagaaggcaaaatttgttgcgtgaaattattggttaccatgctgatattatctgccttcaggaggtacaaagtaatcactttgaagattttttttcaccggagcttgataaacatgggtaccaacctctatataagaaaaggacgacagaggtgtacagcggaagtcctcaagcaattgatggttgcgctactttctttcgtcgggacagattttcgcatgtcaaaaaatatgaggtcgagttcaataaggctgcacagtctttaactgatgcaattattcctgccgctcaaaaaaagttagctctaaatcgtttggttaaggataatattgcgctaattgcagttttagaagctaaatttagtaaccatggaactgaaaaccctagtaaaaggcaacttctctgtgtggctaatacacatataaatatccaccatgaccttaaagatgtgaagctatggcagattcataccctcctaaaagggttggaaaaaatagctgttagtgcagacattccaatgttggtctgtggagattttaattcaactcctggaagtacgtcacatgggcttcttgcaaggggcaaagttgatcatttgcatccagatctagcaatagatcctcttggaattttgcgcccactaagcaagctgacacaccagcttcctctgtgcatactcatcattcgtgagtatggctggtgttggctatgatttggatcaccagcgaaggaggatggaccctgggacaaatgagccattgttcacaaattgcacaagggattttaccggtaccctagattacatattttacacagcggattcattgactgtagagtcattattggagctgttggatgaggatagcttgagaaaagacacggctcttccttctcctgaatggtcatcggatcatatagcgctcctagcagaattccggtgcaagcttagagttagacgatgatactttaggaggagctgtaggggagggattcttgacaatcgcatgagatgatgagaatgtaccctggcgaaggcaggaacgagaagcctaagggaaagaggcttgttatgttcctcacccttttacatttccgcctcgatgttctctagtggcactagttggaatgcgacttccaatagaagatatattatcaatgcaaagagaaatgatttaatagattcgtgtgccgtttttagttttccatcctcacattctcgcccccctcccccccccccccccccccctcttcaatgtgagttcattgtccacatttttgtttcctaccatgaatgtgctctagttcttacaaactaaaaatggccccttccatagtgtatgtatgtctcttgagcagggatcagctttggcgtagtttactgtgttgaagatgcttagttgaaaagtgatgtcgggttatctatgatggatattgaacgaatacctggtgactagagagagcttcacattggggaagctatactgaatgaaaactgtgaattttgatgtctctcttgcagtggtttctgaagcacccatctcaatctattgttatatatatatatttttattcctgaacttgtt

SEQ ID NO: 209510 - DNA, 3102 bp, Zea Mays
cgaacctgcagtcagacttaccaccaagtggacgcagcagctttaaccccccaaagcctcgacgccgcgagcacagctccgccgccaccgcccccttctcatccgcggtctcctccgcctgctgcatctctatcgatctagcgggactggctccttcccgtgctgggtccttcgtcaatcgtcagcgcgcaagatcggcacttgtgtacatctgagcagtttccggtgccctaattcaggcgcgggcgttgttgggttttcgataattttgggggttcacctgaaccctcatgacccaggtgaagcccgcccctgggggaaggatgctgaccgtgctgcgggtgcacctcccgtcggagatcccgatcgtcggctgtgagatcacgccgtatgtgctcctgcggcgccccgacggaggcgtcttcaccgacgacgtgtctgagaccgcgcccgtggatgggtacttcatgcgctacaagtggtaccgcatacaaagtgatcgtagagctgctatctgcagtgtacacccaacagaacaagcaacacttcagtgcatagggtgtctgaagtcaaaaatacctgttgctaagagctaccattgttcttctaagtgcttctccgatgcttggcaacaccacaaggttttgcatgaccgtgctataagtgctttaaatgaaaacggaaccgaagatgatgagttgtttggcagatttggtagcggcagttcgagctcaggggttattagtgctgcgttgtctggttcaacatcaaacctttcactgagctcaggtgttaataatggacctacacctgtgtatccaacaggcactgagaagagttctggtgaaacttggtttgaagtgggatggtcacgaacatatacggcaactactgatgatattggacatgtgctaagatttgaatgtatagttgtggatgtggaaacacgggggactgtgagagctcctacttcagtcatgacatcccgtgtaatcccagcaccgaccccgacaccacgccgcttgatccctgttaatgcagctgatgcaatggtccacttcgatttagatagccggacttcttcttttgggacatttactgtgctgtcctacaatattcttgctgatacatatgcaacaagtgatacatacagctattgtccaacttgggcacttacatgggcttatagaaggcaaaatttgttgcgtgaaattattggttaccatgctgatattatctgccttcaggaggtacaaagtaatcactttgaagattttttttcaccggagcttgataaacatgggtaccaacctctatataagaaaaggacgacagaggtgtacagcggaagtcctcaagcaattgatggttgcgctactttctttcgtcgggacagattttcgcatgtcaaaaaatatgaggtcgagttcaataaggctgcacagtctttaactgatgcaattattcctgccgctcaaaaaaagataatattgcgctaattgcagttttagaagctaaatttagtaaccatggaactgaaaaccctagtaaaaggcaacttctctgtgtgggatctatttgcatgttatctatattcataataacccatggaaatgctgagtatcattaggtacaactagttatttgatatcttttggttttgagttctttaggttttgttgttattttttgttgttgtgagtacttgatggtatctttacccatgagaatgctttcttttttctcatcaaggattcactctcatgccacataaatttggcacttctatttttttatcacttgttcatttggaatttagtgatattgatgaagatgttagccataggatcaaagcagggtggacgaaatggtgtcaagcatcgagagtcctatgtgataagagagtgctacaaaagctgaaaggctaatacacatataaatatccaccatgaccttaaagatgtgaagctatggcagattcataccctcctaaaagggttggaaaaaatagctgttagtgcagacattccaatgttggtctgtggagattttaattcaactcctggaagtacgtcacatgggcttcttgcaaggggcaaagttgatcatttgcatccagatctagcaatagatcctcttggaattttgcgcccactaagcaagctgacacaccagcttcctctggtcagtgcatactcatcattcgtgagtatggctggtgttggctatgatttggatcaccagcgaaggaggatggaccctgggacaaatgagccattgttcacaaattgcacaagggattttaccggtaccctagattacatattttacacagcggattcattgactgtagagtcattattggagctgttggatgaggatagcttgagaaaagacacggctcttccttctcctgaatggtcatcggatcatatagcgctcctagcagaattccggtgcaagcttagagttagacgatgatactttaggaggagctgtaggggagggattcttgacaatcgcatgagatgatgagaatgtaccctggcgaaggcaggaacgagaagcctaagggaaagaggcttgttatgttcctcacccttttacatttccgcctcgatgttctctagtggcactagttggaatgcgacttccaatagaagatatattatcaatgcaaagagaaatgatttaatagattcgtgtgccgtttttagttttccatcctcacattctcgcccccctcccccccccccccccccccctcttcaatgtgagttcattgtccacatttttgtttcctaccatgaatgtgctctagttcttacaaactaaaaatggccccttccatagtgtatgtatgtctcttgagcagggatcagctttggcgtagtttactgtgttgaagatgcttagttgaaaagtgatgtcgggttatctatgatggatattgaacgaatacctggtgactagagagagcttcacattggggaagctatactgaatgaaaactgtgaattttgatgtctctcttgcagtggtttctgaagcacccatctcaatctattgttatatatatatatttttattcctgaacttgtt

SEQ ID NO: 209511 - DNA, 2769 bp, Zea Mays
gtcagacttaccaccaagtggacgcagcagctttaaccccccaaagcctcgacgccgcgagcacagctccgccgccaccgcccccttctcatccgcggtctcctccgcctgctgcatctctatcgatctagcgggactggctccttcccgtgctgggtccttcgtcaatcgtcagcgcgcaagatcggcacttgtgtacatctgagcagtttccggtgccctaattcaggcgcgggcgttgttgggttttcgataattttgggggttcacctgaaccctcatgacccaggtgaagcccgcccctgggggaaggatgctgaccgtgctgcgggtgcacctcccgtcggagatcccgatcgtcggctgtgagatcacgccgtatgtgctcctgcggcgccccgacggaggcgtcttcaccgacgacgtgtctgagaccgcgcccgtggatgggtacttcatgcgctacaagtggtaccgcatacaaagtgatcgtagagctgctatctgcagtgtacacccaacagaacaagcaacacttcagtgcatagggtgtctgaagtcaaaaatacctgttgctaagagctaccattgttcttctaagtgcttctccgatgcttggcaacaccacaaggttttgcatgaccgtgctataagtgctttaaatgaaaacggaaccgaagatgatgagttgtttggcagatttggtagcggcagttcgagctcaggggttattagtgctgcgttgtctggttcaacatcaaacctttcactgagctcaggtgttaataatggacctacacctgtgtatccaacaggcactgagaagagttctggtgaaacttggtttgaagtgggatggtcacgaacatatacggcaactactgatgatattggacatgtgctaagatttgaatgtatagttgtggatgtggaaacacgggggactgtgagagctcctacttcagtcatgacatcccgtgtaatcccagcaccgaccccgacaccacgccgcttgatccctgttaatgcagctgatgcaatggtccacttcgatttagatagccggacttcttcttttgggacatttactgtgctgtcctacaatattcttgctgatacatatgcaacaagtgatacatacagctattgtccaacttgggcacttacatgggcttatagaaggcaaaatttgttgcgtgaaattattggttaccatgctgatattatctgccttcaggaggtacaaagtaatcactttgaagattttttttcaccggagcttgataaacatgggtaccaacctctatataagaaaaggacgacagaggtgtacagcggaagtcctcaagcaattgatggttgcgctactttctttcgtcgggacagattttcgcatgtcaaaaaatatgaggtcgagttcaataaggctgcacagtctttaactgatgcaattattcctgccgctcaaaaaaagttagctctaaatcgtttggttaaggataatattgcgctaattgcagttttagaagctaaatttagtaaccatggaactgaaaaccctagtaaaaggcaacttctctgtgtggatcaaagcagggtggacgaaatggtgtcaagcatcgagagtcctatgtgataagagagtgctacaaaagctgaaagagagccagagatgcatatgttgcgttggatatgtgggcacacaagattggaccgagtgagaaatgatgacattcgcgatcggctatgagtagcgccaattgaagaaaaacttattgaacaccgattgagatggtttgggcatgtccaccagagacccacaaagtcaccggtgcacagaggcatcataagacatgacactaatatgaagagaggtatagggtggccaaacttgacatggggggaggcaatcgaaagggacttgaagaaatggaatatcgcaaaggagttgtgtttggatagaagggcttggaaataagctatccacgtgcctgaaccgtgattaggccttttccattttagttctctcaaaagctttccccctccctttctctttctttctttttggtgacttcttgctgggtttcaactttagcctaccccaacttgcttgggactaaaaggctatgttgatgttgatgttgatgttcatttggaatttattatggttaggccagtgttcattggccataatttgcttgccatctttttaataagctaccctagatgcgggatccttagaatgaatataaatgacacgatttagctagatccatgcaatgatcaggtcagactgaactgctttgctagacatggggataatggtaatagttaggggaataaaaaagatattggaacttggaagacaggtaaactggtcctctatgctttttattctggaaggtggccaaccatgtttttacatggcagaagtgacaagaaaacgatttcactgaacagtagagctcttttgactagatcatgccaattgtccctctaattctttttgttgggtttttgaatatagcaattgatcttgttttattgtgtgggtcttataccacctatgtttatatttacttgttgtatcggatataaatatgatctctggtcaaagtatgtgctagcgaaattcaataattttattacgataaagaagtaacttcgatggtggtctatttgtatcaattttacgctttacggataatggtggtcaaagtttctaaagtttggctatgtctgctgtaggaggcatctgttttagactgg

SEQ ID NO: 209512 - DNA, 1259 bp, Zea Mays
cataagtgctacatgttttagaagctaaatttagtaaccatggaactgaaaaccctagtaaaaggcaacttctctgtgtggctaatacacatataaatatccaccatgaccttaaagatgtgaagctatggcagattcataccctcctaaaagggttggaaaaaatagctgttagtgcagacattccaatgttggtctgtggagattttaattcaactcctggaagtacgtcacatgggcttcttgcaaggggcaaagttgatcatttgcatccagatctagcaatagatcctcttggaattttgcgcccactaagcaagctgacacaccagcttcctctggtcagtgcatactcatcattcgtgagtatggctggtgttggctatgatttggatcaccagcgaaggaggatggaccctgggacaaatgagccattgttcacaaattgcacaagggattttaccggtaccctagattacatattttacacagcggattcattgactgtagagtcattattggagctgttggatgaggatagcttgagaaaagacacggctcttccttctcctgaatggtcatcggatcatatagcgctcctagcagaattccggtgcaagcttagagttagacgatgatactttaggaggagctgtaggggagggattcttgacaatcgcatgagatgatgagaatgtaccctggcgaaggcaggaacgagaagcctaagggaaagaggcttgttatgttcctcacccttttacatttccgcctcgatgttctctagtggcactagttggaatgcgacttccaatagaagatatattatcaatgcaaagagaaatgatttaatagattcgtgtgccgtttttagttttccatcctcacattctcgcccccctcccccccccccccccccccctcttcaatgtgagttcattgtccacatttttgtttcctaccatgaatgtgctctagttcttacaaactaaaaatggccccttccatagtgtatgtatgtctcttgagcagggatcagctttggcgtagtttactgtgttgaagatgcttagttgaaaagtgatgtcgggttatctatgatggatattgaacgaatacctggtgactagagagagcttcacattggggaagctatactgaatgaaaactgtgaattttgatgtctctcttgcagtggtttctgaagcacccatctcaatctattgttatatatatatatttttattcctgaacttgtt

SEQ ID NO: 209513 - DNA, 1063 bp, Zea Mays
aaataaacttggtctaattagttggagcgtgatgctggtcggctggtcaactgcagggagcgaatgaatttctgtcctcttggtgcttgtgctttggctggaactggacttcccattgataggtttcaaactgctaaagatttgaaatttacagctccaatgaagaatagcattgatgcagtatcagaccgtgattttgtacttgagtttcttgctgccaattcgattgctgctgtccatctttcgcgaattggtgaagaatgggttctttgggcatcagaggaatttgggtttctgataccaagtgacaaagtttcaactggaagcagcattatgccccagaagaaaaatccagacccaatggagcttgttcgtgggaaatctgctagggttgttggagacctcatgactgttctaaccctctgtaaaggccttccacaggcctacaaccgtgaccttcaggaagacaaggaacccttgtttgatagtgtgaaagctgtattaggaatgcttgaagtatgcacagagtttgctcaaaatatctcttttaattcaaaaagaatacaaagttcacttccagctggttatctggatgcaacgacgctggcggattatctcgtgaagaagggagtccctttcagaacttctcacgagatagttggaaggtctgttgctctatgcgtctccaagaactgtcagctagctgagcttgaattggctgacctaaaatctgtccatcctgtatttgaggatgacgtctatgaatacctgggggttgaaaacgctgtaaacaagttcatatcctatggctctactggttcagaacaagtgaaaaagcagcttgaggattggcgcatccagctcggggtgagctcataagggttggcatggttcaagaaataagctcgcaaattagtgcttgcgatttttgaaggtgtatgttgacgtcgtgaactttttctgtgtgtttgttcatacatttcgaaaactggaatgaatgatgtaaacatgttggacaccttgagcctcttttatatattattattgcactgtgttttatttt

SEQ ID NO: 209514 - DNA, 2843 bp, Zea Mays
gtcgtgatggtgtagaagagatatgcaactctggattgatgcggaataaatgcaccgagctgagaaaggacagaacaaagaaagatcttaaaatcaaagctaaagaagtggagattcaaaatctaaaaaaaagctaatgtcatggaataaatgaggttgatgtggagctaaaaagggaggctatgtttttttgggtgaggcggttatcattggcttgttatgtgaacattattgtgatgtggtttcatgttgtccaggtgaggtgccagtttaacaactttttgcaccaccatgtcgagaatatcattgggtcatgtctggagagtaataatgatcaactgatgggccatgtccttgatgagtgtaaacttgttacaagaattttggaagcagagaagaactctgctctatcgtcagaattggacggtcgcatcgacgccaggttccagcagaggagtcgttactctccttgattccttcaccgagttcaccgaggaatatgaactgaaaatgaaagagaagggtgagcaactgattgtaagatctttcatcagtgcaacctctccttttttagctttcatcagtgctacactcccacagtccccacatgcacgcagatgtttgaaaatataaaataaaatcaacaacactgcaaatttactagctcaactacaagaggcatggagttattattaaaaaatgaagtactcatgatgaattccaaacaaaaaatctgacctaataatcaacataatataaattgttgtagctcagtcctatagtcatactgagctactgattagaatgttcaagaatgaaccattagatttcctgtgctaaaatgaggattgatcataagactaatgacgatcaagactatcaaggcccctacaaacaaagctcatgggaaattagaaagtgaaatgaaataccatgttgaaaacagggccaaagtagctagcaattcaaagaggcaaaatgctgcaaaatataatgcttcatgagttgttttcggtgttgtcaaaatctcaggtgccacaatggatgaaagaacaacatgtagaattgggttccaaaggacttgagggctacttcatcacaacctgtaactgaagatcttgaataactgactacatcaccatgcaagactaaagtttttattttattaagaaaatgaccccaaagaagaagatgtgtgatatatccctgatgactgcatatgtgttgagggttactacacactgaaaaatagaataacagactctgtggctgttagtgaagagggattagtcaaaaagagaacaaggcgtccaaaacctgttggcaatgagggggctgtcagaaagagaagaggctctgccatcccacaactataattgttcaatatatatggctgaattgaagggagaagatgatttatcagcaggctctatgagcacaactgcatagtcaagacataattcttcggcccctgcagacttcaagcagctaagaagtgttacgcccattgacatctttccacgacaagagacctgggcaagagaatccggacgtgctgagggggagaggaaggagaggaggaagatatcgggcaagagaacccattgacatccttggatagggtccgtctgatgccattcatcgctgtctttgatctcaggaaggcatcttagccagctcaattttattagaaatattgttgttttaagatacagagtccatggttactattgtacgcttttctgagaaacttgtcatcccaataatttggttctggagctatatactgatctagcttgttttagtaacaaatgtaagttgctcacatttcctttagactgtcactagaactttgaacgatcaactcgtgcttctaaatcaagaattaccatatgtgttttttgagttcgatcccttctattttttatttggccaccaaacgaagtttttacatgacaagaatgttataaatacttctttaaatcacgagtttcgtgtgtcacgtacgtgcaatgtaggtatatttctctttcatgcttctcgcgatcgattgtgccgtcgcaacgcacgggcattaacctagtctgtacatatgctgccagtgtgctgtgtgcgtctggtgtcgcactcgagtagtacgcgacgggtctcctgcggccctgttggagtcgtcaattgtcagccaccttcgaatacgagtagggatgacaattgacaacggggacagaccaggagctgtatgaaataaagaacattgtagatgctcttaatgagcaacgcgagaagttgcaagagcaaagaaagctgcttcattcagaccgagaaccaatctgacagcaaatccagcagcttactgggttagaagagctgaaaattgaatctgagaacgggcaactaactgtctttgacacaatgtgagaacttaaagaaataaaggtggcgtggaaaacctgaaagagaacggtgttcacatgtctcctgacgagaggatgtataaaaacgcaaatgcaaagcacactactgtgaagagattggaaccgtctcctgcgatccacaccaattttcctgggtgttattagaaaatgtgctcaggtgatattcaaaggctgtgcagagaagagcgctgatgatccccacaacacaacgatagattggtacctgcaaagttggcaatgcaaatgtcaatggctctagcttaattagctgctgctgcctattcagatgaactgttatttggtcatcagctggaaaatggtgctgggaaaaaggcttcgaaatgggtgtgcatacgatcgtgacaccatccgtcggcgtgcatatgtgtgacgtggcagcataatgag

SEQ ID NO: 209515 - DNA, 2901 bp, Zea Mays
gagatatgcaactctggattgatgcggaataaatgcaccgagctgagaaaggacagaacaaagaaagatcttaaaatcaaagctaaagaagtggagattcaaaatctaaaaaaaagctaatgtcatggaataaatgaggttgatgtggagctaaaaagggaggctatgtttttttgggtgaggcggttatcattggcttgttatgtgaacattattgtgatgtggtttcatgttgtccaggtgccagtttaacaactttttgcaccaccatgtcgagaatatcattgggtcatgtctggagagtaataatgatcaactgatgggccatgtccttgatgagtgtaaacttgttacaagaattttggaagcagagaagaactctgctctatcgtcagaattggacggtcgcatcgacgccaggttccagcagaggagtcgttactctccttgattccttcaccgagttcaccgaggaatatgaactgaaaatgaaagagaagggtgagcaactgattgtaagatctttcatcagtgcaacctctccttttttagctttcatcagtgctacactcccacagtccccacatgcacgcagatgtttgaaaatataaaataaaatcaacaacactgcaaatttactagctcaactacaagaggcatggagttattattaaaaaatgaagtactcatgatgaattccaaacaaaaaatctgacctaataatcaacataatataaattgttgtagctcagtcctatagtcatactgagctactgattagaatgttcaagaatgaaccattagatttcctgtgctaaaatgaggattgatcataagactaatgacgatcaagactatcaaggcccctacaaacaaagctcatgggaaattagaaagtgaaatgaaataccatgttgaaaacagggccaaagtagctagcaattcaaagaggcaaaatgctgcaaaatataatgcttcatgaggtcagtaaatacatatttggtaattccatgctaatacactgatgctttaagatgcctgagacatctatcttctttgttagttgttttcggtgttgtcaaaatctcaggtgccacaatggatgaaagaacaacatgtagaattgggttccaaaggacttgagggctacttcatcacaacctgtaactgaagatcttgaataactgactacatcaccatgcaagactaaagtttttattttattaagaaaatgaccccaaagaagaagatgtgtgatatatccctgatgactgcatatgtgttgagggttactacacactgaaaaatagaataacagactctgtggctgttagtgaagagggattagtcaaaaagagaacaaggcgtccaaaacctgttggcaatgagggggctgtcagaaagagaagaggctctgccatcccacaactataattgttcaatatatatggctgaattgaagggagaagatgatttatcagcaggctctatgagcacaactgcatagtcaagacataattcttcggcccctgcagacttcaagcagctaagaagtgttacgcccattgacatctttccacgacaagagacctgggcaagagaatccggacgtgctgagggggagaggaaggagaggaggaagatatcgggcaagagaacccattgacatccttggatagggtccgtctgatgccattcatcgctgtctttgatctcaggaaggcatcttagccagctcaattttattagaaatattgttgttttaagatacagagtccatggttactattgtacgcttttctgagaaacttgtcatcccaataatttggttctggagctatatactgatctagcttgttttagtaacaaatgtaagttgctcacatttcctttagactgtcactagaactttgaacgatcaactcgtgcttctaaatcaagaattaccatatgtgttttttgagttcgatcccttctattttttatttggccaccaaacgaagtttttacatgacaagaatgttataaatacttctttaaatcacgagtttcgtgtgtcacgtacgtgcaatgtaggtatatttctctttcatgcttctcgcgatcgattgtgccgtcgcaacgcacgggcattaacctagtctgtacatatgctgccagtgtgctgtgtgcgtctggtgtcgcactcgagtagtacgcgacgggtctcctgcggccctgttggagtcgtcaattgtcagccaccttcgaatacgagtagggatgacaattgacaacggggacagaccaggagctgtatgaaataaagaacattgtagatgctcttaatgagcaacgcgagaagttgcaagagcaaagaaagctgcttcattcagaccgagaaccaatctgacagcaaatccagcagcttactgggttagaagagctgaaaattgaatctgagaacgggcaactaactgtctttgacacaatgtgagaacttaaagaaataaaggtggcgtggaaaacctgaaagagaacggtgttcacatgtctcctgacgagaggatgtataaaaacgcaaatgcaaagcacactactgtgaagagattggaaccgtctcctgcgatccacaccaattttcctgggtgttattagaaaatgtgctcaggtgatattcaaaggctgtgcagagaagagcgctgatgatccccacaacacaacgatagattggtacctgcaaagttggcaatgcaaatgtcaatggctctagcttaattagctgctgctgcctattcagatgaactgttatttggtcatcagctggaaaatggtgctgggaaaaaggcttcgaaatgggtgtgcatacgatcgtgacaccatccgtcggcgtgcatatgtgtgacgtggcagcataatgag

SEQ ID NO: 209516 - DNA, 1987 bp, Zea Mays
atcttcgcagcattgttgctgtccgaggtcagccgccctctctctctcctcgtgctccgattcgtgggctcgagctccggtgactaggaacagcggcaaggaaacaatgcttctttctcccttcgcacctttgtgatgcactgaacactagtcaggagctctagtaatcctctaatggccgaatgttcattggcaacgctgagagtgagaggccagtatcaagggagatggacctggtccaacagcaagttgaatatgccaatcatggatccaaagaggaactacgccctcaagattcatcttccatgccaatccaaagcagcaagagaatggacaagtgttgcatttaccccttttggttttcatggaagggatcacagggtggaaacttcagttaaatgttactgtttgcagccactcatggattcggagagcatggtctcaccaaatctaatactgatttcggatgaagctcttctcactatcagcatggtttttgcatatttggctggagttgtaccctctgggcagacatctcctcgtgtcagaaatcagaatgtttctcaacatattccagagccaagctcctctcattctgggacctaaagttcttgcctgaaaggaatgctgcatttgaccccaacgatatgtggagtgaagtaagaaatatctctggaagttctgaactcgatggaatcaggtggttgcaagtatcgactaccttgatagatagtttaattcaaccagtatttatgaaatggattgaagaagaacaggccttggaaaatggacaaatcaacgaaaaacttatgaagacgataagcagcaaactaaaggagggcaataagatcttgaggaggtttaacagatttgggaaatctgaactctatttggatatgctctttttcctaagatttggttctgcaaggtgtgacagttattttaatgtcaaatttcttgctgaacatggagaaagaattttagaggaccttgttatttccttagctgatgtgattgctagtatttatctggagcttatgtcagtggatggtgatatgtctgctgaagttgttggttccagcttggttctatgttctctatcaaccagagaactccaaaagctgcgcaatgaggtggcaattaattggtggttgcaccaatacttcaagtcagttgtttcaatgtatgaggacaggttcgagttatatgttctatgcagcaaaaaatgtgaaaaaacagccgacaatcaagctgagagggcaaattggtggaggattgcatctggcaagcctaatgtgcttactcttgattatgttaacatcagtccattttcccttccagcaagaaggacaaaggaattaagagctttgattggatggaggtattacttcagcttattcttagagttgtcagatattgccatgcccttcataagggttgctatcagcaaagtgagctctgcggtgtcctacttctgggtgtcaatgattggaaggtctcttgggctgattttctcagggattagacaatcactaggctggaaataagcttatacggtcatacctgttgagttttgagtctgacttctgggactgaatgaatgtctgttaggttatgcattgtaaatctttgagatggctgtcatttttctctgctttctttttcatcttagtgtgtaagaaagtccattgatttcgtggacggaatatgttaatctgtggattactgaaatccatccacatccagtctttctcaaaacagaattcatgtacacgaaatgtctagatgcatttttgtttttttattcaagagggacggaacatcatatttttctcgagacagaatagcaaggacagcatacattacgagcacgcatcattaattttgtacagggtttcatttctctccacccatacaatctggaacgaaatcatgtagtgtcaagaaatggaaaattcatccaaaaacgaaacaaaacggaactgag

SEQ ID NO: 209517 - DNA, 3323 bp, Zea Mays
ctactctctccctagtccccgcgacggcacaagcgaccgtccccacgacggtccagactccagagcctgcagaccccgacgccgctcgcgttcgggaccgtaccgccctcccctgccgtatccgcccacacaccctccctccccgccgcttccgcccggtatcccccactcgcgcggccgtaggacacggccacgtgcgccgcctcaaactgggggctgtggctggggcgggaggagcggcggcgttagggtttccccatggacggtggcgaggatcggacgttcaaggcgaactttaccagcgagggggtgacgatgctgcaggaccgcgtcaaggagaagctcagtgagctcatgggcgactactccgacgacactcttgccgagtatgttgtagtattgctaaggaacgggaggcacaaggatgaggctgcaaaggagctacatgtttttttaggcgatgacaatgatgcatttgtatcctggttgtgggatcatctgtcctcaaatttgcacctttatgttcaacctaaagctgcctcttctaaggatgacactagaagcagtcacaatgctgccagaggattgcctgttcacagtgtgataagcagcacacaagttaatcatgaacctgaagctgaaacccagaagacagtgataactcataaaaaaaaagattggggtcatcgaaaaagagattggggaacaatcggtcgaggtcaatcagaaacagttcctcttagaagcgttgtcgacaatgtttctcttgcaaaggagaaggatcttcatgagtcacatgcagatgaaaaggcttttcataaatcacattctgtaagacgaacccgctctcctgacatgcataaccacagaaagaggagcagagaggcagatgtgcggtctactaagagtgcaacacacccagttaatggtgcaccacgtcggcttcttcagtttgctgttcgtgatgctgtcagaactgtgcccccagttacttctggttcagaatcagcttccaagcgactttgttctgtagtgtctacattggcttcagattccacacttgatattactcatattaggttacagaaaacaaattcagatttgagaataccagttgccacagcagcactaagagctgcagctgaggctgctgaagatgctctcaaggatagcttttgtggaagtgtttttagtagattgggcagaatgcccacaataaattctagtgaacaatcacctgatcgtagatcacaagatcttgaaggcaaagaatatgagaatatagataacatacaagctgaaaatcaagttgaattttatggaagaaatcaacatggtggcagtgatgtttacatgcgtgatcggagaacagaggaagccacaggttctctttctaatattgatgagtatggtcacaacagttctgttaggtataatggattgggttctctccgaagtgcattgcctgctagtggaggtaaagagtcattagtactggggtacgtaagaggagcttctgaagtacgaagcggaagattgatagctcaggggccacctgctggttcaggaccaagatcatctgaaaagatcctaaatgtttctggtaacactaagacacagaagcttcgaactcatgtaactagggatgcccttgcatttgaccctcaagtgccaatggagaaggtttctggtgcaaggaagtcgataggtcaggggccacatgctggttcaggaccaagaccatctgaaaggattctaaatgtttctggtaacactaacacacagaagcttccaactcatgtaactagggatgaccttgcatttgaccctcaagtgccaatggagaaggttgctgatgcaaggaaatcacatgtgaagattgcacatgctaacgatatgtccatgacaactgataagtccaaagatttgatacagtcaagttcaatgctggaggcacaaaaggctacatcaggtggtcaacccgaaggtggctctgattctagaactgtctttgttagcaacgtacattttggtgcaacaaaagatgctctttctcgacacttcaataagtttggagcgatcttgaagacccatattgtgaccgatggtgtcactggtcagtcaactggctcagcgtatattgagttcttgcacaaagaatcagcagagcaggcgttaaccctgaacggggcatcatttatgttacgcattttgaaggtcgttcggaaaaactccactgaagcaacccgatcgcctggcttgcttcgtgtttcgcggggatcaccatttgcttcaaggctcattagaactgcatacccaaggccaacgtttcctggtgcaatccgtggacgactgccactcaggggtgttgcccagagcttacagtggaagcgcagtgccacagattcctcaaatgctgtaaaaccaagtcaggctgcaccttcagctcctgggaatcagttggtcaccccgaccccacgaagcttcacctacacacgcacggagccaaaaccaaatgacggtgcgatggcttgactgctcagctgcagcatgccgcagctcctgatgaatctcgcagaaagagttcgtgatactgttacgtggttcattcagctgcttttggtaaatatttaagtagctgcagatgttagtttgtagcaggctggtttttgtggaccaaaacctttgagcgatattctgtgaggttttctgtgctgtttttcaccgtcagcacatattctgtgctggctggctgttcggagttcgtggatggagagtaaaatatatataaaaaaagtggtagtaaaggaaaacacggacgcgataaaaacgttgcaacatttgttattattttttgatggattatttagcctccacggtttccttgtcaaggggggtgatctgtgagattgatcataatatccaaactaccggatggtcttgctgtctcagttttgtaaatagaaaaaccttcacctgtggggtatggttgcctactgcacgtctgcacattagcaagtgatggtgcgtgtttcgactcaaatgtttttttgcatcctgtcttgtgtagaaaaagaaaactgaagacctgtctgttctgggtgtctgctgtatctattttctcagagagaagtgcattttatcttggaatcagcgggactcacgggtggctgaagtccaagtactgttcgcattcaccattgagccatgaaaatcaagtgattggagaatcagaagaggacaacagctctgtggtagcccctaatctatcaatgtccccctgcgtacttcgtccaataatacaataatagttgtcgttttag

SEQ ID NO: 209518 - DNA, 3368 bp, Zea Mays
caacatcgcacggcacgagagaacccctcctaggctcctactctctccctagtccccgcgacggcacaagcgaccgtccccacgacggtccagactccagagcctgcagaccccgacgccgctcgcgttcgggaccgtaccgccctcccctgccgtatccgcccacacaccctccctccccgccgcttccgcccggtatcccccactcgcgcggccgtaggacacggccacgtgcgccgcctcaaactgggggctgtggctggggcgggaggagcggcggcgttagggtttccccatggacggtggcgaggatcggacgttcaaggcgaactttaccagcgagggggtgacgatgctgcaggaccgcgtcaaggagaagctcagtgagctcatgggcgactactccgacgacactcttgccgagtatgttgtagtattgctaaggaacgggaggcacaaggatgaggctgcaaaggagctacatgtttttttaggcgatgacaatgatgcatttgtatcctggttgtgggatcatctgtcctcaaatttgcacctttatgttcaacctaaagctgcctcttctaaggatgacactagaagcagtcacaatgctgccagaggattgcctgttcacagtgtgataagcagcacacaagttaatcatgaacctgaagctgaaacccagaagacagtgataactcataaaaaaaaagattggggtcatcgaaaaagagattggggaacaatcggtcgaggtcaatcagaaacagttcctcttagaagcgttgtcgacaatgtttctcttgcaaaggagaaggatcttcatgagtcacatgcagatgaaaaggcttttcataaatcacattctgtaagacgaacccgctctcctgacatgcataaccacagaaagaggagcagagaggcagatgtgcggtctactaagagtgcaacacacccagttaatggtgcaccacgtcggcttcttcagtttgctgttcgtgatgctgtcagaactgtgcccccagttacttctggttcagaatcagcttccaagcgactttgttctgtagtgtctacattggcttcagattccacacttgatattactcatattaggttacagaaaacaaattcagatttgagaataccagttgccacagcagcactaagagctgcagctgaggctgctgaagatgctctcaaggatagcttttgtggaagtgtttttagtagattgggcagaatgcccacaataaattctagtgaacaatcacctgatcgtagatcacaagatcttgaaggcaaagaatatgagaatatagataacatacaagctgaaaatcaagttgaattttatggaagaaatcaacatggtggcagtgatgtttacatgcgtgatcggagaacagaggaagccacaggttctctttctaatattgatgagtatggtcacaacagttctgttaggtataatggattgggttctctccgaagtgcattgcctgctagtggaggtaaagagtcattagtactggggtacgtaagaggagcttctgaagtacgaagcggaagattgatagctcaggggccacctgctggttcaggaccaagatcatctgaaaagatcctaaatgtttctggtaacactaagacacagaagcttcgaactcatgtaactagggatgcccttgcatttgaccctcaagtgccaatggagaaggtttctggtgcaaggaagtcgataggtcaggggccacatgctggttcaggaccaagaccatctgaaaggattctaaatgtttctggtaacactaacacacagaagcttccaactcatgtaactagggatgaccttgcatttgaccctcaagtgccaatggagaaggttgctgatgcaaggaaatcacatgtgaagattgcacatgctaacgatatgtccatgacaactgataagtccaaagatttgatacagtcaagttcaatgctggaggcacaaaaggctacatcaggtgctgctggatcaaatactacaggtcaacccgaaggtggctctgattctagaactgtctttgttagcaacgtacattttggtgcaacaaaagatgctctttctcgacacttcaataagtttggagcgatcttgaagacccatattgtgaccgatggtgtcactgctcagcgtatattgagttcttgcacaaagaatcagcagagcaggcgttaaccctgaacggggcatcatttatgttacgcattttgaaggtcgttcggaaaaactccactgaagcaacccgatcgcctggcttgcttcgtgtttcgcggggatcaccatttgcttcaaggctcattagaactgcatacccaaggccaacgtttcctggtgcaatccgtggacgactgccactcaggggtgttgcccagagcttacagtggaagcgcagtgccacagattcctcaaatgctgtaaaaccaagtcaggctgcaccttcagctcctgggaatcagttggtcaccccgaccccacgaagcttcacctacacacgcacggagccaaaaccaaatgacggtgcgatggcttgactgctcagctgcagcatgccgcagctcctgatgaatctcgcagaaagagttcgtgatactgttacgtggttcattcagctgcttttggtaaatatttaagtagctgcagatgttagtttgtagcaggctggtttttgtggaccaaaacctttgagcgatattctgtgaggttttctgtgctgtttttcaccgtcagcacatattctgtgctggctggctgttcggagttcgtggatggagagtaaaatatatataaaaaaagtggtagtaaaggaaaacacggacgcgataaaaacgttgcaacatttgttattattttttgatggattatttagcctccacggtttccttgtcaaggggggtgatctgtgagattgatcataatatccaaactaccggatggtcttgctgtctcagttttgtaaatagaaaaaccttcacctgtggggtatggttgcctactgcacgtctgcacattagcaagtgatggtgcgtgtttcgactcaaatgtttttttgcatcctgtcttgtgtagaaaaagaaaactgaagacctgtctgttctgggtgtctgctgtatctattttctcagagagaagtgcattttatcttggaatcagcgggactcacgggtggctgaagtccaagtactgttcgcattcaccattgagccatgaaaatcaagtgattggagaatcagaagaggacaacagctctgtggtagcccctaatctatcaatgtccccctgcgtacttcgtccaataatacaataatagttgtcgttttag

SEQ ID NO: 209519 - DNA, 3401 bp, Zea Mays
caacatcgcacggcacgagagaacccctcctaggctcctactctctccctagtccccgcgacggcacaagcgaccgtccccacgacggtccagactccagagcctgcagaccccgacgccgctcgcgttcgggaccgtaccgccctcccctgccgtatccgcccacacaccctccctccccgccgcttccgcccggtatcccccactcgcgcggccgtaggacacggccacgtgcgccgcctcaaactgggggctgtggctggggcgggaggagcggcggcgttagggtttccccatggacggtggcgaggatcggacgttcaaggcgaactttaccagcgagggggtgacgatgctgcaggaccgcgtcaaggagaagctcagtgagctcatgggcgactactccgacgacactcttgccgagtatgttgtagtattgctaaggaacgggaggcacaaggatgaggctgcaaaggagctacatgtttttttaggcgatgacaatgatgcatttgtatcctggttgtgggatcatctgtcctcaaatttgcacctttatgttcaacctaaagctgcctcttctaaggatgacactagaagcagtcacaatgctgccagaggattgcctgttcacagtgtgataagcagcacacaagttaatcatgaacctgaagctgaaacccagaagacagtgataactcataaaaaaaaagattggggtcatcgaaaaagagattggggaacaatcggtcgaggtcaatcagaaacagttcctcttagaagcgttgtcgacaatgtttctcttgcaaaggagaaggatcttcatgagtcacatgcagatgaaaaggcttttcataaatcacattctgtaagacgaacccgctctcctgacatgcataaccacagaaagaggagcagagaggcagatgtgcggtctactaagagtgcaacacacccagttaatggtgcaccacgtcggcttcttcagtttgctgttcgtgatgctgtcagaactgtgcccccagttacttctggttcagaatcagcttccaagcgactttgttctgtagtgtctacattggcttcagattccacacttgatattactcatattaggttacagaaaacaaattcagatttgagaataccagttgccacagcagcactaagagctgcagctgaggctgctgaagatgctctcaaggatagcttttgtggaagtgtttttagtagattgggcagaatgcccacaataaattctagtgaacaatcacctgatcgtagatcacaagatcttgaaggcaaagaatatgagaatatagataacatacaagctgaaaatcaagttgaattttatggaagaaatcaacatggtggcagtgatgtttacatgcgtgatcggagaacagaggaagccacaggttctctttctaatattgatgagtatggtcacaacagttctgttaggtataatggattgggttctctccgaagtgcattgcctgctagtggaggtaaagagtcattagtactggggtacgtaagaggagcttctgaagtacgaagcggaagattgatagctcaggggccacctgctggttcaggaccaagatcatctgaaaagatcctaaatgtttctggtaacactaagacacagaagcttcgaactcatgtaactagggatgcccttgcatttgaccctcaagtgccaatggagaaggtttctggtgcaaggaagtcgataggtcaggggccacatgctggttcaggaccaagaccatctgaaaggattctaaatgtttctggtaacactaacacacagaagcttccaactcatgtaactagggatgaccttgcatttgaccctcaagtgccaatggagaaggttgctgatgcaaggaaatcacatgtgaagattgcacatgctaacgatatgtccatgacaactgataagtccaaagatttgatacagtcaagttcaatgctggaggcacaaaaggctacatcaggtgctgctggatcaaatactacaggtcaacccgaaggtggctctgattctagaactgtctttgttagcaacgtacattttggtgcaacaaaagatgctctttctcgacacttcaataagtttggagcgatcttgaagacccatattgtgaccgatggtgtcactggtcagtcaactggatctcctttcgattgatcagctcagcgtatattgagttcttgcacaaagaatcagcagagcaggcgttaaccctgaacggggcatcatttatgttacgcattttgaaggtcgttcggaaaaactccactgaagcaacccgatcgcctggcttgcttcgtgtttcgcggggatcaccatttgcttcaaggctcattagaactgcatacccaaggccaacgtttcctggtgcaatccgtggacgactgccactcaggggtgttgcccagagcttacagtggaagcgcagtgccacagattcctcaaatgctgtaaaaccaagtcaggctgcaccttcagctcctgggaatcagttggtcaccccgaccccacgaagcttcacctacacacgcacggagccaaaaccaaatgacggtgcgatggcttgactgctcagctgcagcatgccgcagctcctgatgaatctcgcagaaagagttcgtgatactgttacgtggttcattcagctgcttttggtaaatatttaagtagctgcagatgttagtttgtagcaggctggtttttgtggaccaaaacctttgagcgatattctgtgaggttttctgtgctgtttttcaccgtcagcacatattctgtgctggctggctgttcggagttcgtggatggagagtaaaatatatataaaaaaagtggtagtaaaggaaaacacggacgcgataaaaacgttgcaacatttgttattattttttgatggattatttagcctccacggtttccttgtcaaggggggtgatctgtgagattgatcataatatccaaactaccggatggtcttgctgtctcagttttgtaaatagaaaaaccttcacctgtggggtatggttgcctactgcacgtctgcacattagcaagtgatggtgcgtgtttcgactcaaatgtttttttgcatcctgtcttgtgtagaaaaagaaaactgaagacctgtctgttctgggtgtctgctgtatctattttctcagagagaagtgcattttatcttggaatcagcgggactcacgggtggctgaagtccaagtactgttcgcattcaccattgagccatgaaaatcaagtgattggagaatcagaagaggacaacagctctgtggtagcccctaatctatcaatgtccccctgcgtacttcgtccaataatacaataatagttgtcgttttag

SEQ ID NO: 209520 - DNA, 3273 bp, Zea Mays
ccgaaggcaatgccaagcctgctggcccgcgacgaacccgcccggatgtcgccgtacgcgcctgcgttgcatcggttcgtgcacggatgaggcccaacatcgcacggcacgagagaacccctcctaggctcctactctctccctagtccccgcgacggcacaagcgaccgtccccacgacggtccagactccagagcctgcagaccccgacgccgctcgcgttcgggaccgtaccgccctcccctgccgtatccgcccacacaccctccctccccgccgcttccgcccggtatcccccactcgcgcggccgtaggacacggccacgtgcgccgcctcaaactgggggctgtggctggggcgggaggagcggcggcgttagggtttccccatggacggtggcgaggatcggacgttcaaggcgaactttaccagcgagggggtgacgatgctgcaggaccgcgtcaaggagaagctcagtgagctcatgggcgactactccgacgacactcttgccgagtatgttgtagtattgctaaggaacgggaggcacaaggatgaggctgcaaaggagctacatgtttttttaggcgatgacaatgatgcatttgtatcctggttgtgggatcatctgtcctcaaatttgcacctttatgttcaacctaaagctgcctcttctaaggatgacactagaagcagtcacaatgctgccagaggattgcctgttcacagtgtgataagcagcacacaagttaatcatgaacctgaagctgaaacccagaagacagtgataactcataaaaaaaaagattggggtcatcgaaaaagagattggggaacaatcggtcgaggtcaatcagaaacagttcctcttagaagcgttgtcgacaatgtttctcttgcaaaggagaaggatcttcatgagtcacatgcagatgaaaaggcttttcataaatcacattctgtaagacgaacccgctctcctgacatgcataaccacagaaagaggagcagagaggcagatgtgcggtctactaagagtgcaacacacccagttaatggtgcaccacgtcggcttcttcagtttgctgttcgtgatgctgtcagaactgtgcccccagttacttctggttcagaatcagcttccaagcgactttgttctgtagtgtctacattggcttcagattccacacttgatattactcatattaggttacagaaaacaaattcagatttgagaataccagttgccacagcagcactaagagctgcagctgaggctgctgaagatgctctcaaggatagcttttgtggaagtgtttttagtagattgggcagaatgcccacaataaattctagtgaacaatcacctgatcgtagatcacaagatcttgaaggcaaagaatatgagaatatagataacatacaagctgaaaatcaagttgaattttatggaagaaatcaacatggtggcagtgatgtttacatgcgtgatcggagaacagaggaagccacaggttctctttctaatattgatgagtatggtcacaacagttctgttaggtataatggattgggttctctccgaagtgcattgcctgctagtggaggtaaagagtcattagtactggggtacgtaagaggagcttctgaagtacgaagcggaagattgatagctcaggggccacctgctggttcaggaccaagatcatctgaaaagatcctaaatgtttctggtaacactaagacacagaagcttcgaactcatgtaactagggatgcccttgcatttgaccctcaagtgccaatggagaaggtttctggtgcaaggaagtcgatagggatgaccttgcatttgaccctcaagtgccaatggagaaggttgctgatgcaaggaaatcacatgtgaagattgcacatgctaacgatatgtccatgacaactgataagtccaaagatttgatacagtcaagttcaatgctggaggcacaaaaggctacatcaggtgctgctggatcaaatactacaggtcaacccgaaggtggctctgattctagaactgtctttgttagcaacgtacattttggtgcaacaaaagatgctctttctcgacacttcaataagtttggagcgatcttgaagacccatattgtgaccgatggtgtcactggtcagtcaactggctcagcgtatattgagttcttgcacaaagaatcagcagagcaggcgttaaccctgaacggggcatcatttatgttacgcattttgaaggtcgttcggaaaaactccactgaagcaacccgatcgcctggcttgcttcgtgtttcgcggggatcaccatttgcttcaaggctcattagaactgcatacccaaggccaacgtttcctggtgcaatccgtggacgactgccactcaggggtgttgcccagagcttacagtggaagcgcagtgccacagattcctcaaatgctgtaaaaccaagtcaggctgcaccttcagctcctgggaatcagttggtcaccccgaccccacgaagcttcacctacacacgcacggagccaaaaccaaatgacggtgcgatggcttgactgctcagctgcagcatgccgcagctcctgatgaatctcgcagaaagagttcgtgatactgttacgtggttcattcagctgcttttggtaaatatttaagtagctgcagatgttagtttgtagcaggctggtttttgtggaccaaaacctttgagcgatattctgtgaggttttctgtgctgtttttcaccgtcagcacatattctgtgctggctggctgttcggagttcgtggatggagagtaaaatatatataaaaaaagtggtagtaaaggaaaacacggacgcgataaaaacgttgcaacatttgttattattttttgatggattatttagcctccacggtttccttgtcaaggggggtgatctgtgagattgatcataatatccaaactaccggatggtcttgctgtctcagttttgtaaatagaaaaaccttcacctgtggggtatggttgcctactgcacgtctgcacattagcaagtgatgagagaagtgcattttatcttggaatcagcgggactcacgggtggctgaagtccaagtactgttcgcattcaccattgagccatgaaaatcaagtgattggagaatcagaagaggacaacagctctgtggtagcccctaatctatcaatgtccccctgcgtacttcgtccaataatacaataatagttgtcgttttag

SEQ ID NO: 209521 - DNA, 936 bp, Zea Mays
gttgtggtggtaaacccgaagattccatgaagatttgtcaactccaattaacagctacacgattttcaaaacagaataattctggcgaggatgacgagctcctttctgaactaaaagataagtgggatgcaatggagaacaagtcctctcttgccttgtatggtgctggagcaatcctcgctgtctggatatccttggtcgtagtgagatctctcgactctgtcccattgctcccaggcatattggagctagtcgggctcagctactctggatggtttgtgtaccgatacctgctttttcaggaaaaccggaaagaattggcgggtgttatcgatgatataaagagaaggattgttggcgatgatgaatagctgtttcctggtttgtaattctatttatctcgccctgtttggttctgaggaattgaaaaataatccaatggtgaagtgagaaagcactttctagctattggttttaattcatggggtccaaacaggctcttgatagaatcttgtaggtttctgttcttaattaatgccagtcagagctacgaggtattggcctttccacatctcttgtgccgtctgcagttgaacatgttatttgcagaatctttttatttagcatggtctagaaaaattcttgtatcatccgtatattccgctgaggtatggccttccacaccaagatgtacctccagtttagcatggtctacaaaaaaaaatattttattctctgcatatgccgctccagttcctctcaaattccctgtgctgccctagccagaagttagccgtcagagcatataattgtaataagatataaaatcatctgaaacataaccggtagcacttttgtcctcacctgctcaaccgagcacctgagtttcggcttttttttaagtaagaaaaaagggaaaatctaaatcgattaaac

SEQ ID NO: 209522 - DNA, 1177 bp, Zea Mays
aacaatgtttttttcccaaccacttgccacttgtgatacgctgacctctgagcagcctcgatctggctcgttcaaacttgaccgaacggcagccattacctggtggcgcctcctccttgccggtcggagccggctcgccggcgggtggcgacgctcccgccgctgtcacagggctgctcgcaccacgtgcactcctctccagtacacccaccgagacgcgagacctctaaggctctaacccaagaataattctggcgaggatgacgagctcctttctgaactaaaagataaggttgcatacaaagttatattcctctatgctaataatcttggcacaaaaaattacgatgatgtttactacagtgggatgcaatggagaacaagtcctctcttgccttgtatggtgctggagcaatcctcgctgtctggatatccttggtcgtagtgagatctctcgactctgtcccattgctcccaggcatattggagctagtcgggctcagctactctggatggtttgtgtaccgatacctgctttttcaggaaaaccggaaagaattggcgggtgttatcgatgatataaagagaaggattgttggcgatgatgaatagctgtttcctggtttgtaattctatttatctcgccctgtttggttctgaggaattgaaaaataatccaatggtgaagtgagaaagcactttctagctattggttttaattcatggggtccaaacaggctcttgatagaatcttgtaggtttctgttcttaattaatgccagtcagagctacgaggtattggcctttccacatctcttgtgccgtctgcagttgaacatgttatttgcagaatctttttatttagcatggtctagaaaaattcttgtatcatccgtatattccgctgaggtatggccttccacaccaagatgtacctccagtttagcatggtctacaaaaaaaaatattttattctctgcatatgccgctccagttcctctcaaattccctgtgctgccctagccagaagttagccgtcagagcatataattgtaataagatataaaatcatctgaaacataaccggtagcacttttgtcctcacctgctcaaccgagcacctgagtttcggcttttttttaagtaagaaaaaagggaaaatctaaatcgattaaac

SEQ ID NO: 209523 - DNA, 2114 bp, Zea Mays
aaagtcgcgtagccacttctccgaatcgagccaaattggctcatgcgccaccagctcctccctctccaccccgatcgcaatgccactacgtgatcaaccccaaaggtcgccgtgaccgtgccggagagatctcgcgctccgggcccgttaccgcgcagctgtgctgtcgcaggcccacccgttcacccactccgccacgctctcgataaggccgccgcacgcggccgcacgcaccgacaagctggagccgccgcagcaggaggcggtgaaaccatcgccgaccaacggtcgcatccgctaccgtacgccctcggcagccgatctgctccccgctgacgatgtcgcggcggatgccgcggcagccacagtggtggccgcgaggatgcgccgctactcgggcgccggagcacggcagcagcagcaaacggaggcggtggccgaccgcgtgcaccggtaccgtcgggtgctgatggtgttgctctcgccggtactcctcatctcgttcgtgctccttctcatgccgcgcgcgccggcctccgcctcagggggtgtgctcctcgccgttggtggtcggaggtggggaccccgggccgtcgaggacggactgaacaagtatgcggtcatatttgacgccggcagctctgggagccgcgtgcacgtgtattgcttcgacgaaaacctggatctagtgcccatagggaaggagattgagctgttcaaacagaaaaaaccaggcctgagtgctgcaaagggtccacaggaggctgctgaatcacttatttctcttttagaggaagctgagaaagtagttccagcagagttgcgtgaacaaacacctgtgagggttggggccactgcaggtctcagagcattagggactcaaaggtctgaagaaattttgcaagcggttagggaacttctccatgacagttctttcaaatctcagccaaattgggtcactgttctagatggatctcaggaaggcgcattccagtgggttaccatcaattatcttttgggaaaattgggaaagccatactcaaacacagttggagttgttgatttaggaggtggctcagtccaaatggcttatgctatctcagagaaggatgcagcaaaggcacctttagtagcagatggtgaagattcatatgtcaaggagctgctacttaagggaacaacatactatctttatgttcacagttatttgcattatggtttgctggcggctagaggggagatcttaaaagctggcgaaggcagtgattacagcgactgtatgttggaggggcatcttgggaaatacaattacggtggtaatacatttgaagcatcaggctcaccttctggtgctagttattccaagtgcagggctcttgcagttagagctcttaaagttgatgagccagcatgcacacacatgaaatgcacatttggtggtgtgtggaatggtggtggtggagatggacaaaagaatctttttgtggcatcctttttctttgatagggctgccgaggctggttttgtggacccaaaagcagcagttgctaaggttaaaccttcagactttgaagaaactgcacgccgggtttgtaaattgaacttgaaggatgcacatgcaacctaccctgatgtctcagaggagaacattccctacctttgcatagatcttgtctaccagtacacattacttgtcgatggatttggcgttgatccttatcaagacattaccttggtaaagaaagtgccttatggtgattcgtatgttgaagcagcatggccccttggtagtgccattgagatcgcatcttcatcatagaaacagcacggttctgtgtggcgcatattttccagcagcttcacgagtcatttgaagttgttttgagctgaacaggcgagctcttacactgaagttgtgagacagtgagagtacatggaagaatttgtaagtgtgttttagagccagtttggcacagcttctatagtaggttttgggtaaatatagaagcttcgtcaaagagttttagtttttttactgataagtgattctgattctttgttgactctggaagtgtttctttgaaatgtactaggggtagcgggtgacaatgggc

SEQ ID NO: 209524 - DNA, 2147 bp, Zea Mays
ccacaacgcggctcggttgcgaccacggcgaaagtcgcgtagccacttctccgaatcgagccaaattggctcatgcgccaccagctcctccctctccaccccgatcgcaatgccactacgtgatcaaccccaaaggtcgccgtgaccgtgccggagagatctcgcgctccgggcccgttaccgcgcagctgtgctgtcgcaggcccacccgttcacccactccgccacgctctcgataaggccgccgcacgcggccgcacgcaccgacaagctggagccgccgcagcaggaggcggtgaaaccatcgccgaccaacggtcgcatccgctaccgtacgccctcggcagccgatctgctccccgctgacgatgtcgcggcggatgccgcggcagccacagtggtggccgcgaggatgcgccgctactcgggcgccggagcacggcagcagcagcaaacggaggcggtggccgaccgcgtgcaccggtaccgtcgggtgctgatggtgttgctctcgccggtactcctcatctcgttcgtgctccttctcatgccgcgcgcgccggcctccgcctcagggggtgtgctcctcgccgttggtggtcggaggtggggaccccgggccgtcgaggacggactgaacaagtatgcggtcatatttgacgccggcagctctgggagccgcgtgcacgtgtattgcttcgacgaaaacctggatctagtgcccatagggaaggagattgagctgttcaaacagaaaaaaccaggcctgagtgctgcaaagggtccacaggaggctgctgaatcacttatttctcttttagaggaagctgagaaagtagttccagcagagttgcgtgaacaaacacctgtgagggttggggccactgcaggtctcagagcattagggactcaaaggtctgaagaaattttgcaagcggttagggaacttctccatgacagttctttcaaatctcagccaaattgggtcactgttctagatggatctcaggaaggcgcattccagtgggttaccatcaattatcttttgggaaaattgggaaagccatactcaaacacagttggagttgttgatttaggaggtggctcagtccaaatggcttatgctatctcagagaaggatgcagcaaaggcacctttagtagcagatggtgaagattcatatgtcaaggagctgctacttaagggaacaacatactatctttatgttcacagttatttgcattatggtttgctggcggctagaggggagatcttaaaagctggcgaaggcagtgattacagcgactgtatgttggaggggcatcttgggaaatacaattacggtggtaatacatttgaagcatcaggctcaccttctggtgctagttattccaagtgcagggctcttgcagttagagctcttaaagttgatgagccagcatgcacacacatgaaatgcacatttggtggtgtgtggaatggtggtggtggagatggacaaaagaatctttttgtggcatcctttttctttgatagggctgccgaggctggttttgtggacccaaaagcagcagttgctaaggttaaaccttcagactttgaagaaactgcacgccgggtttgtaaattgaacttgaaggatgcacatgcaacctaccctgatgtctcagaggagaacattccctacctttgcatagatcttgtctaccagtacacattacttgtcgatggatttggcgttgatccttatcaagacattaccttggtaaagaaagtgccttatggtgattcgtatgttgaagcagcatggccccttggtagtgccattgagatcgcatcttcatcatagaaacagcacggcagttctgtgtggcgcatattttccagcagcttcacgagtcatttgaagttgttttgagctgaacaggcgagctcttacactgaagttgtgagacagtgagagtacatggaagaatttgtaagtgtgttttagagccagtttggcacagcttctatagtaggttttgggtaaatatagaagcttcgtcaaagagttttagtttttttactgataagtgattctgattctttgttgactctggaagtgtttctttgaaatgtactaggggtagcgggtgacaatgggc

SEQ ID NO: 209525 - DNA, 1463 bp, Zea Mays
cctgcacaacacgactcctccccatctaccgctacctttctacctacccatctagcacccctcgctcgcaaatcgcaatggcgctggccaccaactccgccgcagcagccgcggccgtgtccggtggcgcggcatcgcagccgcgccgcgcagccgcgttcctcccgctgaagaggcgtaccatctccgccatccacgcagccgacccgtccaagaacaacgggcccgtggtccccgcggccgcaggcgccaagtcgtcctcctcggcggtggccacgccggagaaaaagccagcggcgcccgggaagtgggcggtcgacagctggaggtcgaagaaggcgttgcagctccccgagtacccgaacgcggaggagctggacgcggtgctcaagaccatcgagatgttcccgccggtggtgccggtcgtcaaggtggggaggatggctggccagttcgccaagccaaggtccgagccgttcgaggagaaggacagcgttaagctgccgagctataggggcggcaacgtcaacggcgacgacttcaccgagaagagccgcgtgtcagacccgcagaggatgatccgcgcctacgcacagtcggtggcgacactcaacctgctccgcgcgttcgccaccggaggtagcgatgttggtgtagaaggttgtcaagtcactgtcatgtcagaacgaaaaacatatctcgttatcacgatggtgagcaacaaaatgaaccccagtgagttggtgaagctgattgagattctgaacccttcaaacaaacctggaaggatcaccataattacaaggatgggggcagagagcatgagggtgaagttgcctcatctcatccgtgctgttcgcaatgctggactaattgtcacatggattactgatcctatacatggaaacaccatcaaggccccttgtggcctgaagactcgtccatttgactccattctggtcagatctattaaagcatcagcattaattttacaagcttttggtttagttcctaacaaattgcacgcaactatcttaacaacaaaagaggctcgtacaatcgcagctgcaactgctaaacagctgcaactgctaaaccacttgtgcatgcaaagtatcaaaaaggaggctagacacatgatgaaacatctaaaaaggtttgccaacatgagcagtttatacttgcttccccgcaccctccacttccttgtcgtcgtgctgattccaaatcaaggggtagtgatccggaaggagactatgatttttgtaagtgcgaggctcaagatcttattcaaggaaggtggctatgatacttttgatcctctgttcctcaacttgattgcatctatgcagcactacaaccagattgaagcccagtctgctgctagcatgacacctatgtggaccatatgcaatatgtgtatgataggatgtgtcatgcgtgagttgatatatgttaactga

SEQ ID NO: 209526 - DNA, 2732 bp, Zea Mays
caactacatttttatgatgtttggatgagagtcacacggaaataagatacgagcatagactacaggctcaaagttccaattccaacccacccgacgtccgacgacagctggtccgggtctcctccatttcccggggacccgtccgatccgatcccagtcctcaacgccaacggtgggagatctagatcggagctagccagccagccggccgacgctgtccgccggccgccccggcgattctgacccgagatggcggtcgtccctgctgcagagaccctcgacgggctcaaggacaggttcgatctcggggtcttcgtaggcgacctcgccctcgatgaggaagtcaccagtgacgacgagtccctggaggggctgcagcaggagcttgacaactgcaagaatgaccaggaagtcgcaaacattctagccagtggcatcaaactgcgcgagtacacaaaaggcgtcgagaataacatacgccaaatcgagctggattctatccaggattacattaaggaaagtgaaaatctagtttctctgcatgatcaaatttgtgattgtgacaatattttgttacaaatggaaacagttctgactggattccagacagaaattggttccataagttcagagataaaggtccttcaggagaaatctatggacatgggattaaagctgaaaaatcgtaaggctgcagaatctaaattgtcaaaatttgtcgaggatataatagtacctccaagaatgattgacataattgttgatggagaggtcaatgatgaatacatgaaaacacttgagactctaagcaaaaaaatcaaattcatcgatgctgaccccatggttaaatcatccaaggctctaaaagatgttcaacctgaggttgagagactacgacagaaagccgtctcaaagattttcgagtttgtcatccaaaagttctatgccttgagaaaaccaaagactaatattcagattctacagcagagtgttcttcttaaatacaagtacacgataaatttccttaaggaacatgctaaggagatatatgcagaagttcgtacggcgtatattgacaccatgaataaggtgctaagtgcacatttccgggcttacatacaagcattggagaaactacagatggacatagcaacttccactgatttgcttggtgttgaaaccagaagcacaggcttcattttctccattggaaaagaacctctgaaaacccgtccttcagtgtttgctctgggtgaacgaataaacattttgaaggaaatcgaccagccagcattgatacctcatatagctgaagcgaagtcacagaaatactcgtatgaagttcttttcagaagcttgcagaaacttcttattgatactgccacttcagaatacctgtttactgatgatttctttggcgaagaatccatattccatgatatatttgcaggaccgattcaagttgttgatgaacatttcaatactgtactcctgaactgttatgatgcaattggcataatgcttatgatcagaataattcatcagcaccagctcatcatgtttaagcggcgaatcccatgtttggactcttacctagacaaagttaatatgtcactctggcctcgcttcaagatggtgttcgacttgcatttgaacagcttgcgaaatgcaaatattaaaacactttgggaggatgatgtccatccacactatgttacaaggagatatgctgaatttacagcttctctagttcatctcaatgttgagcatggggacggtcagcttgatctaaatttggagcgattgcggatggccattgaggatttgcttgttaagttggccaagatgttttccaaaccgaagctacaaactgtctttctgataaacaactatgatttaacaatttccattttgaaggaagctggaactgagggtgggaaagcacaacaacacttcgaggaggttcttaagagcaacatcgcaatatatgtggaagagttgctcctggagcagttcagtagtttgatcagattcgtcaaatctcgtccagcggatgagacggctgcaaattccgagaaagccagcattgccgaagttgagccactggtaaaggatttcgcgagccggtataaggccgcgatcgagctgatgcactatgatgtgatcacatctttcagcaactttctttgcgggatggagatcttgagagcgacgctcgcacagctcctgctatactacaccaggctctccgagtgtgtcaagagaatcaacggcggctctgctctcaacaaggaccttgtctccatatcctccatcctgttcgaaatcaagaagtattctaggacgttttagttgtttcacccccttccatgtacactaggacggctagctgaggggtagctgtgtatccttactttgtaactggtatgtgcgactgcaggggaaacaagggcattttgtcgtggtttgtatcttcgtctgtgttacccgacttgacccctgcccctttccagcacagaactatgatctctaggctgtctccacagttatcctattctatcttctgtcctatcatctattttaaacttcattttgtaaacagtatcgattatagtgcaaatctacaattttatacgatccgctgtggataaccatatgctgcatactaatgaatgcgtaccaaacgcttgccttaatgttatttttatgactggcaattttctagtgtttat

SEQ ID NO: 209527 - DNA, 2415 bp, Zea Mays
ccattttcgagcgcagaagcgagagagatccggagcagccgcagtcccaccgacctcgccgccggtcgccctccatctcctcgccgctgcctctcggaagtcgcaaacattctagccagtggcatcaaactgcgcgagtacacaaaaggcgtcgagaataacatacgccaaatcgagctggattctatccaggattacattaaggaaagtgaaaatctagtttctctgcatgatcaaatttgtgattgtgacaatattttgttacaaatggaaacagttctgactggattccagacagaaattggttccataagttcagagataaaggtccttcaggagaaatctatggacatgggattaaagctgaaaaatcgctgcagaatctaaattgtcaaaatttgtcgaggatataatagtacctccaagaatgattgacataattgttgatggagaggtcaatgatgaatacatgaaaacacttgagactctaagcaaaaaaatcaaattcatcgatgctgaccccatggttaaatcatccaaggctctaaaagatgttcaacctgaggttgagagactacgacagaaagccgtctcaaagattttcgagtttgtcatccaaaagttctatgccttgagaaaaccaaagactaatattcagattctacagcagagtgttcttcttaaatacaagtacacgataaatttccttaaggaacatgctaaggagatatatgcagaagttcgtacggcgtatattgacaccatgaataaggtgctaagtgcacatttccgggcttacatacaagcattggagaaactacagatggacatagcaacttccactgatttgcttggtgttgaaaccagaagcacaggcttcattttctccattggaaaagaacctctgaaaacccgtccttcagtgtttgctctgggtgaacgaataaacattttgaaggaaatcgaccagccagcattgatacctcatatagctgaagcgaagtcacagaaatactcgtatgaagttcttttcagaagcttgcagaaacttcttattgatactgccacttcagaatacctgtttactgatgatttctttggcgaagaatccatattccatgatatatttgcaggaccgattcaagttgttgatgaacatttcaatactgtactcctgaactgttatgatgcaattggcataatgcttatgatcagaataattcatcagcaccagctcatcatgtttaagcggcgaatcccatgtttggactcttacctagacaaagttaatatgtcactctggcctcgcttcaagatggtgttcgacttgcatttgaacagcttgcgaaatgcaaatattaaaacactttgggaggatgatgtccatccacactatgttacaaggagatatgctgaatttacagcttctctagttcatctcaatgttgagcatggggacggtcagcttgatctaaatttggagcgattgcggatggccattgaggatttgcttgttaagttggccaagatgttttccaaaccgaagctacaaactgtctttctgataaacaactatgatttaacaatttccattttgaaggaagctggaactgagggtgggaaagcacaacaacacttcgaggaggttcttaagagcaacatcgcaatatatgtggaagagttgctcctggagcagttcagtagtttgatcagattcgtcaaatctcgtccagcggatgagacggctgcaaattccgagaaagccagcattgccgaagttgagccactggtaaaggatttcgcgagccggtataaggccgcgatcgagctgatgcactatgatgtgatcacatctttcagcaactttctttgcgggatggagatcttgagagcgacgctcgcacagctcctgctatactacaccaggctctccgagtgtgtcaagagaatcaacggcggctctgctctcaacaaggaccttgtctccatatcctccatcctgttcgaaatcaagaagtattctaggacgttttagttgtttcacccccttccatgtacactaggacggctagctgaggggtagctgtgtatccttactttgtaactggtatgtgcgactgcaggggaaacaagggcattttgtcgtggtttgtatcttcgtctgtgttacccgacttgacccctgcccctttccagcacagaactatgatctctaggctgtctccacagttatcctattctatcttctgtcctatcatctattttaaacttcattttgtaaacagtatcgattatagtgcaaatctacaattttatacgatccgctgtggataaccatatgctgcatactaatgaatgcgtaccaaacgcttgccttaatgttatttttatgactggcaattttctagtgtttat

SEQ ID NO: 209528 - DNA, 3002 bp, Zea Mays
atggaattgatgtcaggattaatggaattggaattgaaattggatctacatcatggagagaaaattgggatgagtgcatcaggatgggagcaagggacaaacaagcaacagagggagaagaaggttattggatataagcatgtggttgcaaaatctgctgcactatcatcaatttgctacagctgtgttgttgtcattggcagctttgttaaattatgcacacctaatttgctagtggagttacagaagactgtaaatctctctagcttatttaattgtttgttggcccagaaaaaccaacacgtcttatttgaaacactcaaaatttcaaggatccttgcaaaaaaagatcagcactttttcttggagagctttaccaaggagggtgtaaagcatgcaattgagtatatcgtatcacaatcaaaaaataacagtcaccagaacatgaaagaatattgcctttgcttttacatggaaacttcctcgactgttgaggcatgcagcattgcgaataattctgttacggaactagcaaaagagataaagaaaaacttcttatcggtaaaagggagtaacaaatctccaaataggtttggatttactctcaaaagtgtcagggacttttttgctaggttgaatttatattcctcgacacaccttgctgaaaatcctgatagctgcaagcagttgtctgatctttcaaggagattattgtcagatgaactgccagttacttctaattttgagtttgtgcagagtgggtctatcaaatgtttgtcagtttatctctcaaacggggcatactgcaatgcagaccttaatgatggacctgtacttgagcagcttagtgtggtgcatagtcggttgcataaatttgctaatttggctctcacccccttcaatgaaagttcagcaaatccacttgggattttggtggagaagctgctagacactttgcacatgtgctatggcagttttccggtactgctatcttatgaacagatgtcacgtgaggacatgacgatgattccgctgagatatcctgaggccaagaaaccaacatcattgctattaaaattccataggtcgcagaaggagagagaattgtacaactacaatggtgttcttattgtcgaccttttctcaacaccagatagcaccgaaccaattctatttcctgaggtctttagaagaactgatcaggaacctgcatccgagaattccaatcaagataaaaatgacgatgatgggaacaaatcctcaagactggaattcttctacaatggcgtgacactccaaccatctgttacattttttgaatcgattctccatctgatgtacaagggacaatctgatttatggatcgacccatctttctgggttcaagaacacagcataacctataggaaaagaatcaaaagcaataaggagatctcgtctcagagttcctactatactcggttatcctacgtgcatgaaatccttcaacgtgcatggttaaaggacccttttttcactgccatacttaatggcaaacttcctggcaatctggatgtgtctgacctgtcatacaatctcttattcatgcttaaagttcttgaaggggtgaaccgtttttcatatcaactcttgatggatgaacagataaacaaatttgctgaaggtattcaagaagatatcaatgatattgaagtggcaatatgtccagtaccacgacatcagttcctcagtagtcttctcataaataagctagaggtgcaaatgcaagatgtcttgttcgatgatggcctcataccctcgtggtgtgtctatctggtcgagaactgcccattcctgttgtccttggacacacggtggaagtacttctgcctgactgtacatcgctcattctttccagaccagattaaccgttattatccacaaactaaaaagtacagggtagcccgaagtgctatcattgaaggtgctgtatcagtgatgaccaatcatggtccaagcaatagaatcattgaggtggagttcgaaggagagattgggactgggcgaggtccaacatttgaattctactctacagttagtcatgaacttcaaagagctgggctcggaatgtggagaggagacagcggtgaacatggattcgttcatgctccttttggactatttccaaagccgtggccaccatcatcacaaggaattgattttactaatatgctacaaaaattcaaacttctagggaatcttgtagtgagagcggttctggatggaaggattctggatattccactttctaaagcattttacaaaatcatgcttgagcaggaactcgatatgtatgacatcctatcatttgatcctgagctgggccggacagtaattgagtttcaagcacttgttagcaggaagaattttttggaaacctcttcagaggaatctaaccctacggctgacttgtcctataaaaacgtgaaattggaggatttgtgccttgacttcactcttcctggaaatcctgaatatgaacttgttcctggaggctcagagaagatggtaacacttgacagtttagatcaatatgtatctttggtcgtttatgccacactgaagagtgggattgccaagcagatcgaagctttcaagtctggaattaatgaggtttttgatctcaaggccctcaaaatgtttacagaagaggaaatggaacgcatactatgtggtgaacagggtgcttgggatttaaagaaccttgaggatcacattgtgtttgagcatggctacgatatgagcagtcaaccggttattatttttctggagatattgcgagagtttggaagagaggagcagcgggctttcacacaattcagcactggagcccctcatctcccacttggcggcctagcttcgcttgatcccaagctcactgtcgtacgcaagcaatgcgatggcaatgtagacgacgaattgccaagcgtcactacctgccggcactttatcaagctccctcc

SEQ ID NO: 209529 - DNA, 1810 bp, Zea Mays
acttgcccctaattcggcccaaacatcagaaaggcccattagtccattacacaccataaaccctaaacccaacagcagcctctagtccctcacatcgacctgcccgtcgccagcccctcacgttgtcctgcccaccgccagcccctcctctgccccccgccggccgcccacctccagccccacctctacccgccgccctcctctggccgcctcccctcctctggccgccgcccaggcacccaccgccagccgtcgaggcctgcaccgccctctaatcaccgcccaggcgtccacctctgactgccgcccacctccagccgtcgaggcttctggtggaaactcgtttgctaagatggaagagggcaatgactactatgttgttaggaaaggtgatgtggtggcagtttacaaaactctaagtgattgccagggtcagatttgctcttcggtatctggtcctgctgcaagtgcctacaagggtcactcttggagcagaggaaaggaggaatacctgtcttcacggggactaagtgatgctacatacgtaatcaatgcagccgaactcagggaagatatacttggcccccttgtgccctgtagtttccaggacatacttggttctagttcaaatcaactggctccaaatcatataggcttccataatgttatagcatctcagactggagcacaatatgttgatctgaaccatgaagccagatctagttcatccagacatatctcaccagcaaatttcaatcataccggaactgttgatgcacaacctatctcaaaacaatacatggtgggtattcttcattttgatggtgcttcaaaagggaacccaggtaaagcaggtgctggagctgtgcttatgactgaagatggaagagtgatatctcggcttcgtgagggtcttggtgtcgctactaataatgttgctgagtatcgaggcctgatcttaggactgaaatatgcgattcggcatggattcaagagaattaaagtacatggggactctcaacttgtctgcaatcaggtgaatggtgtttggcaaacgaagcagccgaatatgatggagctgtgcactgaagcgagaaagctaaaagagaacttccattcctttgagatcatccatgttcgacgggagtggaatgctgaggcggatcgtcaggcgaacatcggtatcacgcttgcaagtggcgccgtgtttgaggagcgtggtgacatctgatacatagctagcaacgtatgtatttaactaactagcttgacctttgacttgcacctttgtcgagcttctatgctgctctgcagcagccatcaggagctgaggtgatggcctgccgtctagtaggcactatatccaattactttacactagttggacctatttcaccatcaagctgctacggaagcctgatttctgctatggggcctcagtttgatgtgaaactgtgctttggaagcttgatgttgctcgataagttgatctatgaatggagaattttaatttgtcagctagcctttagatcgctatttagattttggatttgaacactctttgaactagcatccttaggctatcttcaacaccttactcataatcatactcatattcaaactttattctgtatagtggaaaacagtggtgaattcacggacatggtctaacgtttcatgccatgaattttggtagaattaacatattccttttgcatataaaaatttgagtaaaaatgtattaacgatccttgaacttggtgtgctgtgttacttaggtcattaaaaggggcggatgcaagaggtagtc

SEQ ID NO: 209530 - DNA, 1831 bp, Zea Mays
cccacacctacagcagcagaactgcagaagcggtccctctccacagaactgcagaagcagcgcggcgcggccgttaactcggctccctcaccttgctgccccctccgcaggcgcaggcgctcgcttccgaattggaggtgccatttgccaggggcgtactccattgattcgggctgagttgtgcaaattgtgatagaactttcccgagattcaagcccatacaatgcagggcatctctatatgcggttcagttgcctcaccccatggagcaaactgcagaagggcttgtgttgcaaggaacgatgtgaggctgccttgtgaagttaatgcagtaagccagggattgcactctctgcattggtggtgtgcacacaaaccgcaaatgaagaacaatggaagaagaatgaatgccgcagtgaaaactaatgccagatggttgtttggaggagatgggcgtagcaatgatgcaaggctggagcgcagtgagtctgctaatgaagatattttgatcttctacttccagatggatctacagacccggatacagtatgcattgaatatagaacaatttgatgtggcaaagcaattgagggaaaaactaaccgagattgaaacagaaattattaggcagcgtgaagctagaaggggttcaccaaagactgaagcccaagacaaagctctaaatcttatacgtgtgcgacttgcagaaggctattgacagtgaaaactatgctttggcagctggtctccgtgatgacattgccaaacttgaggttgagtctcttgcagtatctgctaaagctcttgcttatcaaaatgtgaaatatgcatttcgattagggcagaaagtacgtcacaatatacatggatatagaggcgtgatatgtggcatggacccggtgtgctgtgaatccaagtcctggatggagacagcaaacgtggagaagctgtctaagggtccaaatcaacctttttatcaggtcctggttgatgtatatgttgatccagaactgctggttgcatatgtcgcagaagaaaatctttctgcagctgaagaatcagaaaaaggaaggtttgatcacccctacattgagtttctcttttacggtgaggacacagctggggatttcattcctatcaagcagctccgtgagaagtatgaccagccacgctatgaagcttctggagatgaaagtgacaacgatggcaacacaaatagctaaaggtcaaggtaatcacttaaaatggtatttgtgcatcatcaaactgacctgcaaacttagtttcaatccctgtctgtgcagtgccttcgtgttgctagagttgttttggaaccattttgattcacctccaccaactcagatgtgaagtgctgaactatctggtacagatgcagatgtaagacaaggcaaccattggcgaactgggcatcctcagtaacctgcagtaattctctgcatatgccgtccaaccttgcagatcgaaaattactcttttagagttttaccgtcaccaatcgattaagccatgcttgagataagctacgtgtgccttgcttttacattataataccatcgataaatataaacgaaggaaagaaaggaagaaagaaagaaagaaaaaaatatatatccctatggatgttctgtgtatagttctctgagatctatctagttctgtactgtaccctctggtggacaattgtgcatatgtaacactggcaacttgtgtggagtctcgaataaattacgcgaagacttcacatgcagttgtttggactctgcattcatggaatcaatcatgtggaaataacattttttgttgactgctt

SEQ ID NO: 209531 - DNA, 907 bp, Zea Mays
gtatgccacgtgatgcaagcaattctgagggtgaactcgaccaaatcaatgactgggcatcttataggagcagctggtggaatagaagcagttgcttctatacaagctataagaactggttgggtccatccaaatttgaatttagaaaatcctgaggacactgtggatgtgggcatcttggtaggatcacagaaggagagatgtgaggtgaaggtggcgttatccaactcattcggcttcggtgggcacaactcatcaattctctttgccccctttaaggaactgccatcttcctcatcgtccaaatagattcatatatctggatctccacatagaagacaagtggactctgcaacttcctcggtgccatagatattacagggaggtccaaactgagcgtatctgagcgaacaaaacatcagcccccctacatgtttcatctatatcacgaagttgcagatatgtggtaactatcaaaaggatttaccgtacctgggccagtgttttcgccttcaccatacctgcccattgtcagtactatttcctagatttggagtagtcccgtagctaatcctcttccctgcggaggtgatgggattttatgttgtattgatgttgtcaacaatgtcgttcttagccatgaattgctggttccactgtaagcaccgctggatgtttatcgctttggctgtttttctgctgttcataactgagttaaagatttgtaaatggcgacgctgttcggcctttgatcatctgtgaaacttgagcggagggagcaacaagtatggcctagcctagcagtacgctagtgcctttgaagaaggcaggctagctgctgctcctcaaagtttagcacctagccgaccatagtctctttctcttttacagtcttctctaaaaaatc

SEQ ID NO: 209532 - DNA, 2123 bp, Zea Mays
cgaaacgactctccactcgcacacgccatcactcccaccagatagccaccaaccgattcgtcggcccacatttcagagcgacgagtacacgccgcaccacgtcaggaagataaaataaagatcccacgaggagaatcaagatgcgtccctatcggaatctggacctttgcccacccactgccactaatccttcctacccttgcgtgcttaatccttcttccattgccttatctctccttcctcagtttaatcaccagacggccagccctagcgagctcatattccgctcctggttgtccgtccatggccgcgtcgctgcttcgccgtggcgccgtcaccagccgccggcgatgcccggtggagatgctgcggcggctggtctcgtccgaggcggcggctgatcgggcaccgtcgcggccgccgccggagatgccgccgttcgactaccggccccgcccatatgccgggctgggtggcgccgagatcttcgagaagaggaaggcggtgctcggcccgtctctcttccattactaccagaagccgctcaacattgtggaggggaagatgcagtacctgtatgacgagcatggaaagagatatctcgattgctttgggggcatcgtgacagtgtcgtgtggccactgccatccggatattgtgaatgctgtggtggagcagaccaagttgctccagcacacaaccaccatttacttgcaccacactattgtagagtttgcagaggcactcacctccaaaatgcctggcaatctcaaggttgcgtattttgtgaattctgggaccgaagcgaatgagttggcaatgttgatggcccggctgtatagtgggaatctcagtatggttgcgctcagaaatgcatatcatggcggaagtgccggtacgattggattgactgcttatgctaaggaagtcgaagaacacataacttatggaagttcaggaagggttgcaggcttcattgcagaaacattccaaggtgtgggaggtgctgttgaactagctcctggatacctaaagttagcttatgacattgtgcgcaaggctggtggcgtttgtattgctgatgaagtccagagtggttttggccgtactggcagtcattactggggattccagacacaaggtgtcattcctgacatagtcaccatggcaaagggaattggcaatggcctaccattgggggcagttgtgacaactcctgagattgcaagtgtgttagctcaaaaaatccaatttaacacatttggtggaaatccagtttgttctgctggtgggttagctgtgcttaaggttcttgacaaggagaaacgccaggcacattgtgctgatgttggatctcacttgttggagcgtctaaaatcgcttcaggagaagcacgaaatcataggtgatgttagaggaaggggactgatgcttggggtggaactcgttacggacagaaaggagaagacccctgccaagtcagaaaccattgaactgtttgagaagctcagagatctcggggtactagttggaaagggcggtctgcatggtaacgtcttcagaataaaaccaccgatgtgcttttcgaaggacgatgcagacttcttggtggactccatggactacgcaatgtcaaggctctgaaggaacatgctctgagttgacaatgtgtctgcgtggaaacaacacttcctgcaaccgcaagatgcatggcctgaaatgaaactgaaaggcagatgatttaatgggcatgctccccgggtggtatgttggtggtgttatggtgaagtttaatagtccccctcccccgaataaattgatgaaaggggacagaacgtcttgcccagcttgtgagttgtttgtagaagaactgcagttaataaatagaacagcgagcgagcaagcgtgatatcaatctgcatacggtcattttcatttattaccagataagttgacaactgcatgagcccggccatgtgtggagtctctcgtcgaggttcgggtcgggtgagtcggctcctgtttggtaggcagatccaaagagaggccaaagagtcatggctcactcaattttttataacctttttatacctaatgttaaagatagaaaaaataaagttttg

SEQ ID NO: 209533 - DNA, 1719 bp, Zea Mays
ctttgttatccgtgcgatgaaataagattagtgttccaaaaagctcaacattgtggaggggaagatgcagtacctgtatgacgagcatggaaagagatatctcgattgctttgggggcatcgtgacagtgtcgtgtggccactgccatccggatattgtgaatgctgtggtggagcagaccaagttgctccagcacacaaccaccatttacttgcaccacactattgtagagtttgcagaggcactcacctccaaaatgcctggcaatctcaaggttgcgtattttgtgaattctgggaccgaagcgaatgagttggcaatgttgatggcccggctgtatagtgggaatctcagtatggttgcgctcagaaatgcatatcatggcggaagtgccggtacgattggattgactggtatgcagacgtggaaatacccaattcctcagggtgaaatacatcatgtcatgaaccctgatccttatcgggggactttcgggtctgatgctgcagcttatgctaaggaagtcgaagaacacataacttatggaagttcaggaagggttgcaggcttcattgcagaaacattccaaggtgtgggaggtgctgttgaactagctcctggatacctaaagttagcttatgacattgtgcgcaaggctggtggcgtttgtattgctgatgaagtccagagtggttttggccgtactggcagtcattactggggattccagacacaaggtgtcattcctgacatagtcaccatggcaaagggaattggcaatggcctaccattgggggcagttgtgacaactcctgagattgcaagtgtgttagctcaaaaaatccaatttaacacatttggtggaaatccagtttgttctgctggtgggttagctgtgcttaaggttcttgacaaggagaaacgccaggcacattgtgctgatgttggatctcacttgttggagcgtctaaaatcgcttcaggagaagcacgaaatcataggtgatgttagaggaaggggactgatgcttggggtggaactcgttacggacagaaaggagaagacccctgccaagtcagaaaccattgaactgtttgagaagctcagagatctcggggtactagttggaaagggcggtctgcatggtaacgtcttcagaataaaaccaccgatgtgcttttcgaaggacgatgcagacttcttggtggactccatggactacgcaatgtcaaggctctgaaggaacatgctctgagttgacaatgtgtctgcgtggaaacaacacttcctgcaaccgcaagatgcatggcctgaaatgaaactgaaaggcagatgatttaatgggcatgctccccgggtggtatgttggtggtgttatggtgaagtttaatagtccccctcccccgaataaattgatgaaaggggacagaacgtcttgcccagcttgtgagttgtttgtagaagaactgcagttaataaatagaacagcgagcgagcaagcgtgatatcaatctgcatacggtcattttcatttattaccagataagttgacaactgcatgagcccggccatgtgtggagtctctcgtcgaggttcgggtcgggtgagtcggctcctgtttggtaggcagatccaaagagaggccaaagagtcatggctcactcaattttttataacctttttatacctaatgttaaagatagaaaaaataaagttttg

SEQ ID NO: 209534 - DNA, 3705 bp, Zea Mays
gacgcaccgcacagccccgggttcggtggtccccatccaacccacgcctggaacgaccggcgtgccgcctgccgcgcctggtgggggagtgcgtgagccctgaggcacttgttgctctaaagaaaggcactcaactccttaaatatggtcgcaaaggaaagcctaaattcattcccttcagactatcgaatgatgaatcgactcttgtttgggtttcaaataacaaagataaaagtttgaaactagcttctgtgtctaggattctctcaggccaaagaacgctggtttttcaacgttttctgctccccgagaaggaccatttatccttctccctcatatataatgatggcaagcggtctctcgatctgatctgcaagaataaagtcgaggcggaggcttggtttactggtcttagtgccttgatatgtcgaggacagcatggatcccaggtccaacatatagatggaatccggatcgctggacttccttttgatggtgcaagagaaagtagcctaagtggtagctctactttcacttcggattcctttgagaataagctgagctcggtaaactcttccaaggatcgttcttcgggagaatatacatattcagaaaggactgatgtgtcggatatgcaagtgaaaagtgtttcttcttcagacattcgaatcagtgtttccagtgcccttagcacatccagccatggctctggaggtgaagattccgaatcgtttggagatatttatgtatggggggaagtcatctgtgataccatctcaagatcagggtctgatagaagtgcttactctcctggcacaactacagatgttcttgtaccaaagcccctagagtcaaatgtaatgctcgatgtgagttatgtggcttgtggcgtgaaacacgctgcccttgttacaagacaggcagaggtatttacgtggggagaagaatgcagcggtcgtctcggtcatggcattggaacaaatgttttccagccacgtcttgttgagtcactatcgacctgcaatgtcgaactaattgcctgtggtgaattccacacttgcgctgtcactgcaactggtgatctctacacctggggagatggcacacataatgctggattgcttggtcatggtagtaacgtgagccactggatcccaaaaagagtgtcaggtccactggatggtcttccggtatcagctgtatcttgcggcacatggcatacagccttgataactagctctgggcagttatacacatttggtgatggcacatttggagtcttaggtcatggaaacagagcatcatgctcatatccaaaggaagtggagtctttgaagggtctgaggacaatttctgtttcgtgtggtgtgtggcatactgctgctgttgttgaggttatcatttcacagtcaaatgcttcatctggaaagttgttcacttggggtgatggagacaaatatcgcctgggtcatggtgataggtcttcaaaactgaaaccaacatgcgtcccctcgttgatagattacaacttccataaggctgcatgtggccatactcttacgattgggttgactacctcagggcacatttttactgttggaagccctgtgtatggacagcttggcaatccaaataatgatggaaggtatcctcgcctggtcgaagagcagcttgggggtggcggtgttgtggaggttgcttgtgggtcttatcatgtcgcggttttgacaaatgctggtgaagtttacacatggggtaagggtacaaatggaagattaggccatggtgatattgcggatcgtaaagtgcctacactcgttgaggcattgaaggataggtctgtaaaacgtgttgcttgtggatcaagctttacagcagccatctgtcagcacaaatgggtgtctgggatggagcagtctcagtgctcggcatgcaggcagccatttggtttcactcgaaaaaggcacaactgttacaattgtggtttagtacactgccattcgtgcagttcaaagaaggctctgagagcagcattgtctccaaacccgggtaagccataccgtgtctgtgattcatgttacgtgaagctaagtaaagttttggattctggtgttagttatagcagaaatactatcccccgcttacctggtgatacaaaggccgagagaatagacacaaaggcaaccagagttgcacagtctaatagttcagatatgattaggaatttggatgtgaaggcagccaagcagacgaagaagtctgagtattcgtcgcaagttccagcgacgttgcagctgaaagacatccctttcatcagcgcacctgacctgcagaacctgtctacagtggctaatcagtacccttatgaccccagatctactttaccatccttgagaatgccatatctgaactactccagctccatgtcctcggaaagctccgagagtcttaaggatgcaaatgaactcctgaagcaagaggttcaaaaactacaagcggaggttaatagtttgagacaggaacgtgaacagcaagatgctgagctgcagaaagcagatgctaaagcccgtgaagcgatgaaccttgccaccgaggaagcatccaaactgaagacagcgaaggatgtcataaattcactaacagcccagctaaaagaaatgtctgaaaggcttcctcctggagcatgtgacgtgaagaacaatggacgcgttatgggcgatttagcgcccgaaatggggagagagaagcagatgcgatatggtgatcggttcagtggattgcctgctcaagtttaccaaacaagcaactacagtgaaacagccatggttcctccacaagggagcagcaggagcgagcacgtcgacggtgtccgagagttcttctcccctgtgcagcagatggccaatggaggagggtctacgactattgggtatcgttacaggtcagatgaccacgaccgaagggagacagacaggttccagataaatctgcagagcttgaatacgagaagctctaattctcccagtaaccaagtcgacgcggagtggatagaacagtatgagccaggagtgtacctgactctagtttctcttcgtgatggaaccaaagagctgaaacgcgtacggttcagccgaaggagatttggtgaacaccaagcagaatcatggtggaaagacaactgtgagaaagtgtacgacaagtacaatgtctgcggaacagatcgtctctcttcggtaacgacagcctagcgtaggccctgcatgcatgacatccaaaaaggagggcaaagccagtgcgcctgtagcatcgttgtgccctctttctttctctccatcatttgaagagcgggaggcatccagcttggttttggaacgtgcgctgcttaatcgacttgtttatctttttctgtcacctgcttggattcccctctctctcgttgtcgttgtatagaggagatgatggaaccaaagcagttgttgctcctttgactgagatatactatatacacgtagctgggcgtaaatcgtaatgcaagccccgttatcgtcgccttgtgatgtatctcttctgtcagtcgtcatgcatactctgtctgtaacacctggtacactctcgtattgatggtacatatttctgacagtcctttttaaaaccatagctcatccttagatcaacactagtcttttgtgcgtgttttgctttcac

SEQ ID NO: 209535 - DNA, 789 bp, Zea Mays
cttagttggccgccctcctctcctccgccgccacagcagtcagcagacatcagcagaccgccggccgaccgccccacaggcgacctttccggcagagaatcaacgctcgctggtttgctaaactcattgtctgtcagagatgggacgtccggaaggggtcacgatcggatgacaacacacgtcgagaagatgacaacgacgagcagcgtcaggaacgggacatcagagtagattggttcaagtgatgttggaaagaatgggatcagatagatagattatacaacacttaagcggttaagcccttgtctgatagagtgcttgtaaagataaactgttctgaggagaagagagaagacaactggtggaattttgcatcctacgactgctcagtccatacctcagggcagtgaggtagttgctgttgcagaaggaagggtaagtggagataagatagttgatgtcagcattcaggttggagttcaagctgtatattcaaaagtacgctggaactgaggtcggcgttgaatgattccagacatctggttctcaaagaggatgtcaggatggcactatattcatcttagaaaccgatggtgtgaatgaaagacatgaagcctttgaatgatcatgttctaatcaaggtcgaggttcaactgtaggcccgccatcttgtttgtgtgggtgggaaaggggttcccttgcggcctaccaatactgtagggtcgtacgtcttgtctgactgtcctctgagaagcaacagtaggcattcaaaaattcggtcgcaggatg

SEQ ID NO: 209536 - DNA, 1024 bp, Zea Mays
attgatgatagcataactatgcaatcttctgaaatcaagggttcaatcgcctgaatttctcgagaagctagatactcttcagaagtcagtatatcaacatggtgcagtggatgaaacagtatcatgggatattataagtgcggcagatatatgggatgataagagtatgaacgttagtgatgattcagaggacggatatgttcttgttaagcaagaggacatagtcgatggtattgcatgcttcatggctgcatacttgctgtcgctgaaacaaactaagtattgatggcacaaaaaattcatgttatgcaggacctgacacccaaccaacttcaacaagctcttagcaagacattttcagctaaaaagaggaaaagcaaactgcagaaggcatgggatggaacgaaagttgtttataatatagcatcatggagcgcgacggctattggtatctaccagaatcctgcgattgtgcaagcagcaactgcagccttctggacatcctgtcgtgtaatatccaagtttctgtgactagtcatggctggacctggacggtgcaaatatgcaaacattgtgtggctgtggcctctccgtttctaaagatcaaccgaagatgaaaaaagttgccaaactccgtggcgtgcttagattatgatgtaaataggctgcaagttcgttgattgatttaacagcgacatcagttactggtgatgagcaatatggggctgttcgacagtatctcacccatataatctaaaggtatgaatggacacaccaccatctatttgccaataccagctgtatccgacaatcaagaaccgatgtacataagccctcccgcgcaacattggtatatcagtgtgattgtaaatatttcgattcatttgaataaattcgctcgcatgtgtttcaccccttcgcaggaatatacaatgctctaattgctatcagaaattcctagcattgttcttaacagatgatacacggcatacgtatttagggcttaatgcccagatccatatgc

SEQ ID NO: 209537 - DNA, 1597 bp, Zea Mays
ccccaccactcagtagcacgcagcgtgcgggcaacaccacaccaccacccacggccaccaggcagcagcccaccgccgtgtcctagcttcgtaacgacacaaccggccgggttatccctatcgccagcaagccgccaccaaaaacaacacgcccggacggaaaggtccgccacggacacagcgacacgcacgtctccctcccctagtcccctcttcgccgtccgggtcgggtgtttgcgaagcgagacaagccaccggtcgccgcgcgactagggtttggttgcgatggagccggcctcctcgtccgcgcttccttctcctcctccggccgaggcgaggcggacgccgccggaggagctgaagctgcggcggaggacgcttgagacggtgctggagcagtgccagcgcgcgctcgagatgatgcatgaggacggtctggggacggctgcggagggggcaagcttcaaggaggtggaggtggaggaggaggaggaggaggaggagggcagcggcgacagcggcggggtcgagagggcgccgcccccaccgccctcggaggccgactacgaggcggacgagatttgtggcagccatgtatgttacatattgatgatagcataactatgcaatcttctgaaatcaagggttcaatcgcctgaatttctcgagaagctagatactcttcagaagtcagtatatcaacatggtgcagtggatgaaacagtatcatgggatattataagtgcggcagatatatgggatgataagagtatgaacgttagtgatgattcagaggacggatatgttcttgttaagcaagaggacatagtcgatggtattgcatgcttcatggctgcatacttgctgtcgctgaaacaaactaaggacctgacacccaaccaacttcaacaagctcttagcaagacattttcagctaaaaagaggaaaagcaaactgcagaaggcatgggatggaacgaaagttgtttataatatagcatcatggagcgcgacggctattggtatctaccagaatcctgcgattgtgcaagcagcaactgcagccttctggacatcctgtcgtgtaatatccaagtttctgtgactagtcatggctggacctggacggtgcaaatatgcaaacattgtgtggctgtggcctctccgtttctaaagatcaaccgaagatgaaaaaagttgccaaactccgtggcgtgcttagattatgatgtaaataggctgcaagttcgttgattgatttaacagcgacatcagttactggtgatgagcaatatggggctgttcgacagtatctcacccatataatctaaaggtatgaatggacacaccaccatctatttgccaataccagctgtatccgacaatcaagaaccgatgtacataagccctcccgcgcaacattggtatatcagtgtgattgtaaatatttcgattcatttgaataaattcgctcgcatgtgtttcaccccttcgcaggaatatacaatgctctaattgctatcagaaattcctagcattgttcttaacagatgatacacggcatacgtatttagggcttaatgcccagatccatatgc

SEQ ID NO: 209538 - DNA, 1467 bp, Zea Mays
ggaaagtaaaagtttcagaatttacatcattcagaagaatggggagcagcgagaagaccgttaccgcttacggcgagtacacctacgctgagctggagagggagccctactggccgagtgagaagctgaggatttcgattactggggctggtggtttcattggatcccacattgctcgccgtctgaagaacgagggccattacatcattgcctctgactggaagaagaacgagcacatgaccgaggacatgttctgccatgagttccacctcgttgatctcagggtcatggacaactgtctcaaggtcacccatggtgtcgaccatgtcttcaatcttgctgcagatatgggtggcatggggttcatccagtcaaatcactctgtgatcatgtacaacaacaccatgatcagttttaacatgctggaggctgcacgtatcaatggtgtgaagaggttcttctatgcctcgagtgcatgcatttaccctgagttcaagcagcttgacacaaatgtgagcttgaaggaatctgatgcctggcctgctgagcctcaagatgcctatggcttggagaagcttgcaaccgaggagctgtgcaagcactacaccaaggactttggcatcgagtgccgcgtcggccgcttccacaacatctacggccctttcggaacatggaaaggtggccgcgagaaggcaccggctgccttctgcagaaaggctcagacatccacggagaggtttgagatgtggggcgatggtctccagaccaggtccttcaccttcatcgacgagtgcgtggagggtgttctgagattgaccaagtcagacttccgcgagccagtgaacatcggaagcgatgagatggtgagcatgaacgagatggctgagatcgtgctgggctttgaggataggaagctgcccatccaccacatccctggcccggaaggggtccgcgggcgcaactctgacaacacccttatcaaggagaagcttggctgggccccgacgatgaagctcaaggatgggctgcggttcacctacttctggatcaaagagcagatcgagaaggagaagacgcagggggtcgacatcgcggcgtacgggtcgtccaaggtggtgtccacccaggcgcccgtgcagctgggctccctccgcgccgccgacggcaaggagggcctctaaagcgacgacccagggctgtctggcgtaccatggcgggatatactgtttgcggtagaatatcacagtagcagcaaaactagtacttttggaggttcagacatgacggtcgccttcttttctattttcccattcatcgctccatttatttatgatgccatgcaactcgttgaatttttgctgtactccctttatttggtcttggccggccggcaataaaattctccctgtttctactacatgtggacaacatgtatgtatgatcctatactagattggtatgggctct

SEQ ID NO: 209539 - DNA, 1479 bp, Zea Mays
cacgacttgctgtaaagattccctggacccatgattggctgataatttgaatggggagcagcgagaagaccgttaccgcttacggcgagtacacctacgctgagctggagagggagccctactggccgagtgagaagctgaggatttcgattactggggctggtggtttcattggatcccacattgctcgccgtctgaagaacgagggccattacatcattgcctctgactggaagaagaacgagcacatgaccgaggacatgttctgccatgagttccacctcgttgatctcagggtcatggacaactgtctcaaggtcacccatggtgtcgaccatgtcttcaatcttgctgcagatatgggtggcatggggttcatccagtcaaatcactctgtgatcatgtacaacaacaccatgatcagttttaacatgctggaggctgcacgtatcaatggtgtgaagaggttcttctatgcctcgagtgcatgcatttaccctgagttcaagcagcttgacacaaatgtgagcttgaaggaatctgatgcctggcctgctgagcctcaagatgcctatggcttggagaagcttgcaaccgaggagctgtgcaagcactacaccaaggactttggcatcgagtgccgcgtcggccgcttccacaacatctacggccctttcggaacatggaaaggtggccgcgagaaggcaccggctgccttctgcagaaaggctcagacatccacggagaggtttgagatgtggggcgatggtctccagaccaggtccttcaccttcatcgacgagtgcgtggagggtgttctgagattgaccaagtcagacttccgcgagccagtgaacatcggaagcgatgagatggtgagcatgaacgagatggctgagatcgtgctgggctttgaggataggaagctgcccatccaccacatccctggcccggaaggggtccgcgggcgcaactctgacaacacccttatcaaggagaagcttggctgggccccgacgatgaagctcaaggatgggctgcggttcacctacttctggatcaaagagcagatcgagaaggagaagacgcagggggtcgacatcgcggcgtacgggtcgtccaaggtggtgtccacccaggcgcccgtgcagctgggctccctccgcgccgccgacggcaaggagggcctctaaagcgacgacccagggctgtctggcgtaccatggcgggatatactgtttgcggtagaatatcacagtagcagcaaaactagtacttttggaggttcagacatgacggtcgccttcttttctattttcccattcatcgctccatttatttatgatgccatgcaactcgttgaatttttgctgtactccctttatttggtcttggccggccggcaataaaattctccctgtttctactacatgtggacaacatgtatgtatgatcctatactagattggtatgggctct

SEQ ID NO: 209540 - DNA, 2644 bp, Zea Mays
gagacacgggacccacccccggtctgcccgtggtatctctctcttgtccctgcctcccttcctccctccctccaacccagtgtgcgcacttcaccccccctctcggtctcaccctcctggcgacgactgggcggccgaacggccgtcgccgccgccccacgccaggtttcaaagtcttcgtcaggcccttctccggcgactcgagcaccacagggtgacaaggatagctttctcgggtcactgaaggaagacatcttctcgacgcggtagaccttctgacggttggctggttgtgctataagtgttcaaggggtggattaggaccgggaaactctgtactgaagggaaggtcaaaagtgtcaagagagcttgttccaagatggatgaaggtcagggagttaggtattggtgccacatgtgtcaggaggtgatagatcctatgcccgagatgaagtgcccaggctgcgagggcgggtttgtggaggagatggactccgaagacttcgagccagctgcgaacgcgagatcaagactcaggagggaggccatggttgaagctgatgccgaccaggatgacgaagaggatgattcagaccatgagcttgaactttccaggaggaggcggaggaggaggcgctcatcagcgcttttcagtgtgcttgaggctatgcgtgaccgtgatgaagtaaggggctcggatgacaccgacagtgatacagagagagacctggagagagggagaagggagaggatggagaggcagagggagaggttaaggcagatcgagagggtgagtgctcgtggcagagagaggacggaaagcttaatactgatcaactccaacaacgaggctattattctgcagggaacattcggatctgatgacaaccaggaggactcaagcaacacaagttctggtgtatcacttggggattactttcttggtcctgccttagacactctcttgcagcgtttggcggagagtgacctcagtcgttctggcacaccgcctgccaagaaggaagcagtcgccgcgctaccaaccgtgaacatcgaggaagcgttgggctgttcagtctgtcttgaggatttcgagatgggaggagaagcgaagcagatgccctgtcagcataagttccactcgcactgcatactcccgtggctggagctccacagctcttgcccaatctgccggtttcagttgcctactgaggagacgaagaacaacccatgcgaatcagccagcaccgcagggaccgtgaacggcggtggagacaacgctgctgcaagcggcagcgatacagaaagtactaaccacaatgaagatgaccattccgatagccctatcttctctgctctgagcacactcttctctgatccgttctcatccgacgatgatgaaagtgttccacactcttacgagaactgaagatagcgtcggacgcaggcttgcaatatggtgaagacgttctgcttctgaggctggcatctttatattgtagcttctgtacatatctctctgaacggtcgccccccataagacaaactattacctctccgttttactgaaaactatgtggcttgtaatctgctagtgcttgctatgttcacttgcctcgaataaatgttatcctttagcgtgcttattaccatctccggacggccctagacgtgcatgtggacgcagatttgattgacagtatggccaatgtaaggcatatatgtatgcagtggcgttgcgtcttactcctatattttaactgtcaatgagaaggtccttggaagatggctggatagttacttctgtgaaggcgaatatcgtccagtggtcctcacaacacgctccactgcattctgaggtggatggaacgttgcaggtgatgctgccccatatggtcctgaatgtcacgcccttgaggatctccgccagctccaagcgcattcgtgttggtattttgtcgtaaggaggtcgctgaaaggaaaaaaaaaaacatttgccatcgtagctggaccagtcgggcgacgggtgggataagcggagcaggttgctgccatgcgtatcaccacctccttggaactattgcctgagcaagaacaattctgcttgctgattattctgacggcgtggtcgtttggtaggttcgggttggtcgcccggttcttcactctgttggttcttctgcttgtacagttgtgctgcagcgtcccatttgggagggcatcaaacttggaatgtttttgatttgcaacgctttgcttagcaggcatggctggattcgaagacaaattcaagattgtttctgggaatttcaagctcctttttttttcttcctttctcgcgatttttggtgttggtttgccacgcttgttcggtgtagtgtaggcggtagcttgcgtgcagtgtggactgtggagtctcggctgctgcctgctggagtgctggtgttgccggtccttgttcttcggctctggtctcttgacttggaggcaagggggtgcgcgacgctcacggaatgtttgggacgtcttttcttctcggtgctgcggcgaccgaagacgcctgagtcaaccgggaccgtagctctccagtctccaccgtcatctatcatatctcatcatcttttattttaaactttactataca

SEQ ID NO: 209541 - DNA, 633 bp, Zea Mays
gctctgtggggatacagcaagatccagacccggagtggatcctctggtgactaaaggtgcaagcttggttccgctgttggggattgatgtctgggagcatgcgtactacctgcagtacaagaatgttaggccggattacctgaacaacatctggaaggtgatgaactggaaatatgctggagaggtgtacgaaaatgttcttgcttgaattgtcttaatggacaatactcatctgcgcgggtttgttttcggctgtttgaccatgtgaaataaagatggacttgtgtacctgctggaccaagtgtacatttcgctaagatagactaacgcacaatggcctgccgattttgtccatcctgtattcctgcttgcgtgccactccactttctgctgctcgtagtggcaggcacatagtatgtgcttaacgttagactacggcacggccctttcagagttcgagcatggtgatgcccaaaagaaccatttctactcttgtctccattaataaaatctgccgaggtgccgatgtttgcttgaatttgttgccatgcgtttccagtttttggccttcacacttgttgcagcaaaatcttgcaaatcatcttcattaggcatcatgtttgtgttgagctc

SEQ ID NO: 209542 - DNA, 1098 bp, Zea Mays
ggccggccgaccgccccccaccccacgtattaacaaaacgcctcccgaagcagacagagcctcactccgcgcgcccgcgcagcgaagctggagggagcatggagctgaggccgccgcgcctgcgaccgtgagcacgctctgtagccagccgggtccggctgggcggccatggcagccaccgttctcttcactccggcgcagtgccaccgcgccaccgcgacgacgagcgggcggggagccccctcgcattgcgccctggcccctgggcaccggcgcccggggcggggatcggtgagggcggtgcctcccgagcagagcagcttgcctcaggcggcggcggctgctgtctacgggactgctggcgacgtcaaggccgcgctgtaccgagcgctggacggcgccaacagggggatattcgggatgacgtccgccaagcgctcggagatccatggcctggtggagctgctcgagtccaggaaccccacgccggagcccaccgccaagctgcaggacaaggaaaaggcggtgaatgtggtagagttcagcgcgagagcactgaagatactgacggggaagctcaccatcgaggcttcgtacagagttaccagccaaacaagagtggatatcaagctcgagagctcaaccatcacccctgagcagctgatgaacatatttcagaagaactacgacatgctcctggacatattcaatccagagggctggctggagataacatatgttgatgaatcgctacggattggacgagacgacaaagaaaacatattcgtgctggagagagcagacctgccagacgtctgatgacgcgcagttcatgcgcacaggcgatccgtaattttgtgacgaggagcgagtgtatgtaacacgcagaaaacatagcctgcaaatatataaatatggtatatccgacagctaggactcttgcatggttattggcagttcgatgcagacaatctaccactcgaagtaaaaacaaacaaaaaaaaacttttcttctcgaataaagtaggtatgtatacgcacaggcacaggccgttcttcttcatttttgagtttttatgagcatcaaagagcagcgtg

SEQ ID NO: 209543 - DNA, 1321 bp, Zea Mays
ccgccccccaccccacgtattaacaaaacgcctcccgaagcagacagagcctcactccgcgcgcccgcgcagcgaagctggagggagcatggagctgaggccgccgcgcctgcgaccgtgagcacgctctgtagccagccgggtccggctgggcggccatggcagccaccgttctcttcactccggcgcagtgccaccgcgccaccgcgacgacgagcgggcggggagccccctcgcattgcgccctggcccctgggcaccggcgcccggggcggggatcggtgagggcggtgcctcccgagcagagcagcttgcctcaggcggcggcggctgctgtctacgggactgctggcgacgtcaaggccgcgctgtaccgagcgctggacggcgccaacagggggatattcgggatgacgtccgccaagcgctcggagatccatggcctggtggagctgctcgagtccaggaaccccacgccggagcccaccgccaagctgcaggacaaggtggatggatgctggaagctcatctacagcacgatctccatactggggaagaagaggaccaagttagggctgcgagatttcatcagcctaggggacttcctccagataattgacgtcaaacagagagtggatatcaagctcgagagctcaaccatcacccctgagcagctgatgaacatatttcagaagaactacgacatgctcctggacatattcaatccagagggctggctggagataacgtatcctctgatttcgtttctatcactgtggctcactagctgggtgtttaatttctatgaactaatttttttgtccctccattttagttccctaaactaacaaatacggaaactctgtgttttggtttccgcatgtatttgtacactaaaacgaggggtctaatttggtgtcggcatgtcttcctcaactttgatggattaattaacagatatgttgatgaatcgctacggattggacgagacgacaaagaaaacatattcgtgctggagagagcagacctgccagacgtctgatgacgcgcagttcatgcgcacaggcgatccgtaattttgtgacgaggagcgagtgtatgtaacacgcagaaaacatagcctgcaaatatataaatatggtatatccgacagctaggactcttgcatggttattggcagttcgatgcagacaatctaccactcgaagtaaaaacaaacaaaaaaaaacttttcttctcgaataaagtaggtatgtatacgcacaggcacaggccgttcttcttcatttttgagtttttatgagcatcaaagagcagcgtg

SEQ ID NO: 209544 - DNA, 1226 bp, Zea Mays
ccgccccccaccccacgtattaacaaaacgcctcccgaagcagacagagcctcactccgcgcgcccgcgcagcgaagctggagggagcatggagctgaggccgccgcgcctgcgaccgtgagcacgctctgtagccagccgggtccggctgggcggccatggcagccaccgttctcttcactccggcgcagtgccaccgcgccaccgcgacgacgagcgggcggggagccccctcgcattgcgccctggcccctgggcaccggcgcccggggcggggatcggtgagggcggtgcctcccgagcagagcagcttgcctcaggcggcggcggctgctgtctacgggactgctggcgacgtcaaggccgcgctgtaccgagcgctggacggcgccaacagggggatattcgggatgacgtccgccaagcgctcggagatccatggcctggtggagctgctcgagtccaggaaccccacgccggagcccaccgccaagctgcaggacaaggtggatggatgctggaagctcatctacagcacgatctccatactggggaagaagaggaccaagttagggctgcgagatttcatcagcctaggggacttcctccagataattgacgtcaaacaggaaaaggcggtgaatgtggtagagttcagcgcgagagcactgaagatactgacggggaagctcaccatcgaggcttcgtacagagttaccagccaaacactttcttgttttcagagagtggatatcaagctcgagagctcaaccatcacccctgagcagctgatgaacatatttcagaagaactacgacatgctcctggacatattcaatccagagggctggctggagataacatatgttgatgaatcgctacggattggacgagacgacaaagaaaacatattcgtgctggagagagcagacctgccagacgtctgatgacgcgcagttcatgcgcacaggcgatccgtaattttgtgacgaggagcgagtgtatgtaacacgcagaaaacatagcctgcaaatatataaatatggtatatccgacagctaggactcttgcatggttattggcagttcgatgcagacaatctaccactcgaagtaaaaacaaacaaaaaaaaacttttcttctcgaataaagtaggtatgtatacgcacaggcacaggccgttcttcttcatttttgagtttttatgagcatcaaagagcagcgtg

SEQ ID NO: 209545 - DNA, 1112 bp, Zea Mays
ccgccccccaccccacgtattaacaaaacgcctcccgaagcagacagagcctcactccgcgcgcccgcgcagcgaagctggagggagcatggagctgaggccgccgcgcctgcgaccgtgagcacgctctgtagccagccgggtccggctgggcggccatggcagccaccgttctcttcactccggcgcagtgccaccgcgccaccgcgacgacgagcgggcggggagccccctcgcattgcgccctggcccctgggcaccggcgcccggggcggggatcggtgagggcggtgcctcccgagcagagcagcttgcctcaggcggcggcggctgctgtctacgggactgctggcgacgtcaaggccgcgctgtaccgagcgctggacggcgccaacagggggatattcgggatgacgtccgccaagcgctcggagatccatggcctggtggagctgctcgagtccaggaaccccacgccggagcccaccgccaagctgcaggacaaggtggatggatgctggaagctcatctacagcacgatctccatactggggaagaagaggaccaagttagggctgcgagatttcatcagcctaggggacttcctccagataattgacgtcaaacagagagtggatatcaagctcgagagctcaaccatcacccctgagcagctgatgaacatatttcagaagaactacgacatgctcctggacatattcaatccagagggctggctggagataacatatgttgatgaatcgctacggattggacgagacgacaaagaaaacatattcgtgctggagagagcagacctgccagacgtctgatgacgcgcagttcatgcgcacaggcgatccgtaattttgtgacgaggagcgagtgtatgtaacacgcagaaaacatagcctgcaaatatataaatatggtatatccgacagctaggactcttgcatggttattggcagttcgatgcagacaatctaccactcgaagtaaaaacaaacaaaaaaaaacttttcttctcgaataaagtaggtatgtatacgcacaggcacaggccgttcttcttcatttttgagtttttatgagcatcaaagagcagcgtg

SEQ ID NO: 209546 - DNA, 1205 bp, Zea Mays
ccgccccccaccccacgtattaacaaaacgcctcccgaagcagacagagcctcactccgcgcgcccgcgcagcgaagctggagggagcatggagctgaggccgccgcgcctgcgaccgtgagcacgctctgtagccagccgggtccggctgggcggccatggcagccaccgttctcttcactccggcgcagtgccaccgcgccaccgcgacgacgagcgggcggggagccccctcgcattgcgccctggcccctgggcaccggcgcccggggcggggatcggtgagggcggtgcctcccgagcagagcagcttgcctcaggcggcggcggctgctgtctacgggactgctggcgacgtcaaggccgcgctgtaccgagcgctggacggcgccaacagggggatattcgggatgacgtccgccaagcgctcggagatccatggcctggtggagctgctcgagtccaggaaccccacgccggagcccaccgccaagctgcaggacaaggtggatggatgctggaagctcatctacagcacgatctccatactggggaagaagaggaccaagttagggctgcgagatttcatcagcctaggggacttcctccagataattgacgtcaaacaggcggtgaatgtggtagagttcagcgcgagagcactgaagatactgacggggaagctcaccatcgaggcttcgtacagagttaccagccaaacaagagtggatatcaagctcgagagctcaaccatcacccctgagcagctgatgaacatatttcagaagaactacgacatgctcctggacatattcaatccagagggctggctggagataacatatgttgatgaatcgctacggattggacgagacgacaaagaaaacatattcgtgctggagagagcagacctgccagacgtctgatgacgcgcagttcatgcgcacaggcgatccgtaattttgtgacgaggagcgagtgtatgtaacacgcagaaaacatagcctgcaaatatataaatatggtatatccgacagctaggactcttgcatggttattggcagttcgatgcagacaatctaccactcgaagtaaaaacaaacaaaaaaaaacttttcttctcgaataaagtaggtatgtatacgcacaggcacaggccgttcttcttcatttttgagtttttatgagcatcaaagagcagcgtg

SEQ ID NO: 209547 - DNA, 1771 bp, Zea Mays
ccgccccccaccccacgtattaacaaaacgcctcccgaagcagacagagcctcactccgcgcgcccgcgcagcgaagctggagggagcatggagctgaggccgccgcgcctgcgaccgtgagcacgctctgtagccagccgggtccggctgggcggccatggcagccaccgttctcttcactccggcgcagtgccaccgcgccaccgcgacgacgagcgggcggggagccccctcgcattgcgccctggcccctgggcaccggcgcccggggcggggatcggtgagggcggtgcctcccgagcagagcagcttgcctcaggcggcggcggctgctgtctacgggactgctggcgacgtcaaggccgcgctgtaccgagcgctggacggcgccaacagggggatattcgggatgacgtccgccaagcgctcggagatccatggcctggtggagctgctcgagtccaggaaccccacgccggagcccaccgccaagctgcaggacaaggtggatggatgctggaagctcatctacagcacgatctccatactggggaagaagaggaccaagttagggctgcgagatttcatcagcctaggggacttcctccagataattgacgtcaaacaggtcagtaaaggccacacctgctgtaaagttttccccctccgagtccttgtttggatgctctctattgacctcaatccacatgtattaaggtggattatgatttaaattaatttaaattacactctagatcaacttaatagatcaacttaatacatatggattgagttaaatacgacaaataaggcccctcactgttgactggctagctgcgggttaccgcttcatctgctcgaacttttgaacctgtaagcactacgcatatctcgtgttcttgacacaaaaactagtcacgttgggtcaatggactatacatgcatatttggatatatattctagctgcatatacaaagtacgtgaaataaatggagatttagcgtcgtcacttgtctacacccgaaggaaaaggcggtgaatgtggtagagttcagcgcgagagcactgaagatactgacggggaagctcaccatcgaggcttcgtacagagttaccagccaaacagtaaggcctcctttttttttcttctggtgctcgctagctcctagctcctggtctcggttattaggcgctgtttcggcgagtcttacactgctgttcctgaccgcctaatcgaaaagctagcttggagaattcctcacgacctgtagctttcttgttttcagagagtggatatcaagctcgagagctcaaccatcacccctgagcagctgatgaacatatttcagaagaactacgacatgctcctggacatattcaatccagagggctggctggagataacatatgttgatgaatcgctacggattggacgagacgacaaagaaaacatattcgtgctggagagagcagacctgccagacgtctgatgacgcgcagttcatgcgcacaggcgatccgtaattttgtgacgaggagcgagtgtatgtaacacgcagaaaacatagcctgcaaatatataaatatggtatatccgacagctaggactcttgcatggttattggcagttcgatgcagacaatctaccactcgaagtaaaaacaaacaaaaaaaaacttttcttctcgaataaagtaggtatgtatacgcacaggcacaggccgttcttcttcatttttgagtttttatgagcatcaaagagcagcgtg

SEQ ID NO: 209548 - DNA, 1420 bp, Zea Mays
ccgccccccaccccacgtattaacaaaacgcctcccgaagcagacagagcctcactccgcgcgcccgcgcagcgaagctggagggagcatggagctgaggccgccgcgcctgcgaccgtgagcacgctctgtagccagccgggtccggctgggcggccatggcagccaccgttctcttcactccggcgcagtgccaccgcgccaccgcgacgacgagcgggcggggagccccctcgcattgcgccctggcccctgggcaccggcgcccggggcggggatcggtgagggcggtgcctcccgagcagagcagcttgcctcaggcggcggcggctgctgtctacgggactgctggcgacgtcaaggccgcgctgtaccgagcgctggacggcgccaacagggggatattcgggatgacgtccgccaagcgctcggagatccatggcctggtggagctgctcgagtccaggaaccccacgccggagcccaccgccaagctgcaggacaaggtggatggatgctggaagctcatctacagcacgatctccatactggggaagaagaggaccaagttagggctgcgagatttcatcagcctaggggacttcctccagataattgacgtcaaacaggaaaaggcggtgaatgtggtagagttcagcgcgagagcactgaagatactgacggggaagctcaccatcgaggcttcgtacagagttaccagccaaacaagagtggatatcaagctcgagagctcaaccatcacccctgagcagctgatgaacatatttcagaagaactacgacatgctcctggacatattcaatccagagggctggctggagataacgtatcctctgatttcgtttctatcactgtggctcactagctgggtgtttaatttctatgaactaatttttttgtccctccattttagttccctaaactaacaaatacggaaactctgtgttttggtttccgcatgtatttgtacactaaaacgaggggtctaatttggtgtcggcatgtcttcctcaactttgatggattaattaacagatatgttgatgaatcgctacggattggacgagacgacaaagaaaacatattcgtgctggagagagcagacctgccagacgtctgatgacgcgcagttcatgcgcacaggcgatccgtaattttgtgacgaggagcgagtgtatgtaacacgcagaaaacatagcctgcaaatatataaatatggtatatccgacagctaggactcttgcatggttattggcagttcgatgcagacaatctaccactcgaagtaaaaacaaacaaaaaaaaacttttcttctcgaataaagtaggtatgtatacgcacaggcacaggccgttcttcttcatttttgagtttttatgagcatcaaagagcagcgtg

SEQ ID NO: 209549 - DNA, 1246 bp, Zea Mays
ccgccccccaccccacgtattaacaaaacgcctcccgaagcagacagagcctcactccgcgcgcccgcgcagcgaagctggagggagcatggagctgaggccgccgcgcctgcgaccgtgagcacgctctgtagccagccgggtccggctgggcggccatggcagccaccgttctcttcactccggcgcagtgccaccgcgccaccgcgacgacgagcgggcggggagccccctcgcattgcgccctggcccctgggcaccggcgcccggggcggggatcggtgagggcggtgcctcccgagcagagcagcttgcctcaggcggcggcggctgctgtctacgggactgctggcgacgtcaaggccgcgctgtaccgagcgctggacggcgccaacagggggatattcgggatgacgtccgccaagcgctcggagatccatggcctggtggagctgctcgagtccaggaaccccacgccggagcccaccgccaagctgcaggacaagtgggggcgcatgcatgtttgggtggtggatcgaaggtggatggatgctggaagctcatctacagcacgatctccatactggggaagaagaggaccaagttagggctgcgagatttcatcagcctaggggacttcctccagataattgacgtcaaacaggaaaaggcggtgaatgtggtagagttcagcgcgagagcactgaagatactgacggggaagctcaccatcgaggcttcgtacagagttaccagccaaacaagagtggatatcaagctcgagagctcaaccatcacccctgagcagctgatgaacatatttcagaagaactacgacatgctcctggacatattcaatccagagggctggctggagataacatatgttgatgaatcgctacggattggacgagacgacaaagaaaacatattcgtgctggagagagcagacctgccagacgtctgatgacgcgcagttcatgcgcacaggcgatccgtaattttgtgacgaggagcgagtgtatgtaacacgcagaaaacatagcctgcaaatatataaatatggtatatccgacagctaggactcttgcatggttattggcagttcgatgcagacaatctaccactcgaagtaaaaacaaacaaaaaaaaacttttcttctcgaataaagtaggtatgtatacgcacaggcacaggccgttcttcttcatttttgagtttttatgagcatcaaagagcagcgtg

SEQ ID NO: 209550 - DNA, 1868 bp, Zea Mays
gtacgcgctccggagtccggaggcactcgccgccgtcgaattattcccattctcatcacgccgtgcgccagggatactactatggaccggcgcaggatcttattcggccactagaacccagctttcagtcccgagacgtcgtaatcgctagatgatcgatgaacgccaagaagattaagctgcacgactatcaccactgctacggatcgccgatgtgtgacccacagctgttcccgcgcgccgccgccgccaccaccgcagggctctccttgcacccggggccggggctcgtgggctccctgccgcagcggcatggcggcggcggcggcggctgggtgcacgaggagcacaccgcgacgaccccgagggcggcgcaggggcagggcggctgcgtcgtcggctccgacgccgccgcgttcttcgccgccgaggagctcatgatgggcacggcgcggttcgactcccctctcggcggaacgacgacggcactccaggagctgacagcgtttgccaagggaccgccgtttggccggccgaggcccacgacggggggcgagcgcgagcgcgagcggctgtacccagtggacccgctgccgctccgcgactgcgcggcggtgaggacgtactacgtccggccgcagcagcgcgacggcgccacggaggcgcctccttcactcgagctgccattccagcggcggcagcagcaacaagtgcacgggctattcggcgacccttccaccggcaggctactcggcggcggcgagcctcaagctcactcctttccagctcacaccctgaagcaggttccggcgagcacgtttgtccccgcgatggaggcgccgccgggcatgcagagccttatggacaacccgctgtccaggagctgcagtatcatcggtgcggcggcgacccacgcagggagcggtaacgccgccgcgccggggcaaggtgctcccagcaagacgcggattcggtggacgcaggacctccacgagcgcttcgtcgactgcgtcaacaagctcggcggcgcggacaaggcgactcccaagggcattctgaagctgatgaactctgatggcctcacaatctaccacatcaagagccaccttcagaaataccgcatagccaagtacatgcccgtgtcatcgacgtccgaagggaaagagaaacgagctgctgccgccaatgacgtgcagaatctcgaccccggcaccgggatgaagatcacggaagcgctacgcgtccagctcgacgtgcagaggcgcctccacgagcagctcgagatccagaggaatctgcagctgaggatcgaggcgcaaggcaagaagctgcagaagatgttcgaggagcagatgaagacgagcaggaccgtgatggggccgccgcagggcgccgacgtcgccttcatcggcgccggcgagcaggaggaggaggtggaggtggaggacgcgttcgacgacgtgcagctactggcggccgtgtccagcgccagcgtcggctaccgcgacggcggattccagtcgaagataagctagcctgtcgcctccagcctccaggcttcagctggcttgtcggcattgtaattgtagggtttgactacaaatgccatcgtagctatccatggaagatgatgcctacaatgtttgggacgacgacgacgagtgttttggagggaaaaaaaggaaactaaattgttggggatgcaggcaagggacgatcctcgtcgtccacttatgtcgttgattggaaggtgtgatcgtgcacctagcctaaccacttagttttaaaagttctctctgaactttagaatgtgagtgtctatttttgcttatttatttttaataaaaaaccatcaggtctcttataga

SEQ ID NO: 209551 - DNA, 1472 bp, Zea Mays
ctggttttgagagcacagggatttatgtgataccacatgccaaattcgaaaaccgcaaatatattttactcaaaaggagtaacagcaacggtaacccattaatcacaaagaaaacaaaactaatggacctaaagtagtagccgagagcccagcaaagaaggcatccactcccactcggccactccccatgctttccttgcgcaacccagccccggcgccccgctgacctggtcgggtgcgcctccgcagctgccgctccggtgcccccaggccgcaggccgctgtcctcctgtgatgccatggtgatttggagttgctcttcttgtctccatggattcattcccagagcggcatggaggaggcactacccactcttgtctcccaggcctcctgcatcgccgccgcctatccaccacttctcctccgctagacggtccaccaagaaatctgccccaaaggcgccaatgggctcttccattcctgccgcaaaggcgctaatagactcttccagagagcccttctatgtcatccgcaagggggatgtcattggcgtctataagaacctcagtgattgccaagcccaagccagcaaatcggtacttcatccttcagtcactgtctacaaaggctattctctgcgtaaagaaactgaggaatatcttgctgcacgtgggttcaggaacgctgtctgttccattggtgcagcggatgcaagtgacgaattgtttggcgatctggttccctgcccttttcagcaacctgatgagaacacacaatctattttgaaaatgtcacagggacaggagatggaaacaagatcatcagagcatcccaaagttgctgatctggaaccattaccagatagcgaactctcttgtattcttgaatttgatggagcttgtaaaggaaatcctgggaaatcaggtgctggagtcattattcggcggttagatggatctgtgattgctgtactacgtgagggtttgggtattatgaccaacaacgctgctgaatatcgtgcattgatcctggggctaaattatgcttccaagaagggattcaagtatattcgttgtcaaggtgattctaagcttgtctgtaaccaggttcaaggtgcctggcgtgctaggagcgataatatgtctatcttgtgcgatatagccaaggaacttaaggaaacattccttacatttcaaatcaatcatgttttgagggtaggtctttcattttccattgttatttggccttgttgcgaaagggcctctagccgagtgggttaggtggtttgagtaacactcctcaggtcttgggttctacttctctgggagcgaatttcaggttgtgattaaaaaaaatcctctcgtctgtcccacgcctagcacaagtctaaggtctggacccggtcgtttctcacatgggctacggtagagcaggggttccgaggttttctcgatctacgtgagaagatcttt

SEQ ID NO: 209552 - DNA, 1328 bp, Zea Mays
ctggttttgagagcacagggatttatgtgataccacatgccaaattcgaaaaccgcaaatatattttactcaaaaggagtaacagcaacggtaacccattaatcacaaagaaaacaaaactaatggacctaaagtagtagccgagagcccagcaaagaaggcatccactcccactcggccactccccatgctttccttgcgcaacccagccccggcgccccgctgacctggtcgggtgcgcctccgcagctgccgctccggtgcccccaggccgcaggccgctgtcctcctgtgatgccatggtgatttggagttgctcttcttgtctccatggattcattcccagagcggcatggaggaggcactacccactcttgtctcccaggcctcctgcatcgccgccgcctatccaccacttctcctccgctagacggtccaccaagaaatctgccccaaaggcgccaatgggctcttccattcctgccgcaaaggcgctaatagactcttccagagagcccttctatgtcatccgcaagggggatgtcattggcgtctataagaacctcagtgattgccaagcccaagccagcaaatcggtacttcatccttcagtcactgtctacaaaggctattctctgcgtaaagaaactgaggaatatcttgctgcacgtgggttcaggaacgctgtctgttccattggtgcagcggatgcaagtgacgaattgtttggcgatctggttccctgcccttttcagcaacctgatgagaacacacaatctattttgaaaatgtcacagggacaggagatggaaacaagatcatcagagcatcccaaagttgctgatctggaaccattaccagatagcgaactctcttgtattcttgaatttgatggagcttgtaaaggaaatcctgggaaatcaggtgctggagtcattattcggcggttagatggatctgtggttcaaggtgcctggcgtgctaggagcgataatatgtctatcttgtgcgatatagccaaggaacttaaggaaacattccttacatttcaaatcaatcatgttttgagggtaggtctttcattttccattgttatttggccttgttgcgaaagggcctctagccgagtgggttaggtggtttgagtaacactcctcaggtcttgggttctacttctctgggagcgaatttcaggttgtgattaaaaaaaatcctctcgtctgtcccacgcctagcacaagtctaaggtctggacccggtcgtttctcacatgggctacggtagagcaggggttccgaggttttctcgatctacgtgagaagatcttt

SEQ ID NO: 209553 - DNA, 1662 bp, Zea Mays
ctggttttgagagcacagggatttatgtgataccacatgccaaattcgaaaaccgcaaatatattttactcaaaaggagtaacagcaacggtaacccattaatcacaaagaaaacaaaactaatggacctaaagtagtagccgagagcccagcaaagaaggcatccactcccactcggccactccccatgctttccttgcgcaacccagccccggcgccccgctgacctggtcgggtgcgcctccgcagctgccgctccggtgcccccaggccgcaggccgctgtcctcctgtgatgccatggtgatttggagttgctcttcttgtctccatggattcattcccagagcggcatggaggaggcactacccactcttgtctcccaggcctcctgcatcgccgccgcctatccaccacttctcctccgctagacggtccaccaagaaatctgccccaaaggcgccaatgggctcttccattcctgccgcaaaggcgctaatagactcttccagagagcccttctatgtcatccgcaagggggatgtcattggcgtctataagaacctcagtgattgccaagcccaagccagcaaatcggtacttcatccttcagtcactgtctacaaaggctattctctgcgtaaagaaactgaggaatatcttgctgcacgtgggttcaggaacgctgtctgttccattggtgcagcggatgcaagtgacgaattgtttggcgatctggttccctgcccttttcagcaacctgatgagaacacacaatctattttgaaaatgtcacagggacaggagatggaaacaagatcatcagagcatcccaaagttgctgatctggaaccattaccagatagcgaagaaatcctgggaaatcaggtgctggagtcattattcggcggttagatggatctgtggttcaaggtgcctggcgtgctaggagcgataatatgtctatcttgtgcgatatagccaaggaacttaaggaaacattccttacatttcaaatcaatcatgttttgagggaattcaactccgatgctgacgttcaagctaactttggatgccaacttgctgttgatgaagttcaagagctgtccgtttgaattgccattggcagagaaaacaagacacggtgcttgagagtagactgttaatcaatactaattgacccacgtgatcatatcacagggtgcaaagagctgtttcggctttttccaagagctgtttcgtttttaccggtaaaaagatggattggaaagaggagaaactggtagagagccacaagttctagcttcatgggctctgtgcgctgctaaagtaacaaacaacacgtagccgaagcaggtgagatatgcaccaagacctgcaatattttgctgttggtttggttttgtgttgccatgaggattgaggagcttgattctttgtacatgcaattgtgaactgaattgaagtatacttaactcacaaatacatgatttcagaaattattgagggtttattcgtttctttctcaatttatgtggattggatggatgaaatttaatctctagaaagtcaaaatttcttattttttcaattacatctaatccacgtggaatagcaataaccgaaaacctcaatgaaaacgaccgtgtatccttgaaatctg

SEQ ID NO: 209554 - DNA, 1753 bp, Zea Mays
ctggttttgagagcacagggatttatgtgataccacatgccaaattcgaaaaccgcaaatatattttactcaaaaggagtaacagcaacggtaacccattaatcacaaagaaaacaaaactaatggacctaaagtagtagccgagagcccagcaaagaaggcatccactcccactcggccactccccatgctttccttgcgcaacccagccccggcgccccgctgacctggtcgggtgcgcctccgcagctgccgctccggtgcccccaggccgcaggccgctgtcctcctgtgatgccatggtgatttggagttgctcttcttgtctccatggattcattcccagagcggcatggaggaggcactacccactcttgtctcccaggcctcctgcatcgccgccgcctatccaccacttctcctccgctagacggtccaccaagaaatctgccccaaaggcgccaatgggctcttccattcctgccgcaaaggcgctaatagactcttccagagagcccttctatgtcatccgcaagggggatgtcattggcgtctataagaacctcagtgattgccaagcccaagccagcaaatcggtacttcatccttcagtcactgtctacaaaggctattctctgcgtaaagaaactgaggaatatcttgctgcacgtgggttcaggaacgctgtctgttccattggtgcagcggatgcaagtgacgaattgtttggcgatctggttccctgcccttttcagcaacctgatgagaacacacaatctattttgaaaatgtcacagggacaggagatggaaacaagatcatcagagcatcccaaagttgctgatctggaaccattaccagatagcgaactctcttgtattcttgaatttgatggagcttgtaaaggaaatcctgggaaatcaggtgctggagtcattattcggcggttagatggatctgtgaagggattcaagtatattcgttgtcaaggtgattctaagcttgtctgtaaccaggttcaaggtgcctggcgtgctaggagcgataatatgtctatcttgtgcgatatagccaaggaacttaaggaaacattccttacatttcaaatcaatcatgttttgagggaattcaactccgatgctgacgttcaagctaactttggatgccaacttgctgttgatgaagttcaagagctgtccgtttgaattgccattggcagagaaaacaagacacggtgcttgagagtagactgttaatcaatactaattgacccacgtgatcatatcacagggtgcaaagagctgtttcggctttttccaagagctgtttcgtttttaccggtaaaaagatggattggaaagaggagaaactggtagagagccacaagttctagcttcatgggctctgtgcgctgctaaagtaacaaacaacacgtagccgaagcaggtgagatatgcaccaagacctgcaatattttgctgttggtttggttttgtgttgccatgaggattgaggagcttgattctttgtacatgcaattgtgaactgaattgaagtatacttaactcacaaatacatgatttcagaaattattgagggtttattcgtttctttctcaatttatgtggattggatggatgaaatttaatctctagaaagtcaaaatttcttattttttcaattacatctaatccacgtggaatagcaataaccgaaaacctcaatgaaaacgaccgtgtatccttgaaatctg

SEQ ID NO: 209555 - DNA, 2507 bp, Zea Mays
gaatctgtggggaccaaagcgagtagagagagagagagagagaggcggaaggaatggattcgttctcgtagagctagctgctcccgatctttagaattccgcgcgtcctccgagcgctccaagaacacgtacgccgtcgctggcttctcctatcggattgtggtccaggtcatctccccgttcgctggcttcagcagcagagctcttgctggcaaacaagtgatctttctacagttttagctcggagattatgaatacttctacctattacatgccttatgacaggccaagatatgcacctccatcaccccaggaggcaatgaggacttcttattatgcatcttatgacaggccaagctaccgaccaccatcatcccaggagccaccgaggaattcttatcatgtgccatatgacaggccaagcttcccacctccatcaccccaggagcaggaatcatcaccatgggactccttctggaacccattctcatcgctggacagctttggatatccccgccctcggagtagctatgacaacgtgaccaatgacgatgaactcgcgaggttacagcgggtacgagaggaggaaggaatcccagaacttgaagaggaagacgatgagtgtcaagagcatgtacaaatgcatagaaaagaagaacaagaagatcatgataatgcggatgatgatgatgaagacgatgaggaagatgacgatgacgaatgtgagcattcagatgagtatatggtttctgacgagggcacttgctctgtcaattttgatgctaatatgaagcaagaaacaaagggatttgaatccaaaggtattcagtgtactgaagcaccagaacctcgcaagacagtagaacttgagttaaaggcacacaagaaagaactgatgagaaacagagtagcaaatgcagaagaaactcctggtttcacagtatatctgaatcgaagaccagcaagcttggttgaggccatgaaggatatcgactgtcagttctcgggaatatgtgacgctgctcgggaaatctcagtaatgttggaggcaagtagagctcagtactcagcctcaaacgatctttctgcgaagatgctgaatccggttgcacttttgcgctctgtgtcgtcgcgttcatcgtcttctcgtttccttcttgctccctctagctcaatagatgatctctttgacaatgagactagcagctgttactctgaagaatcttgtagtaccatgtctggaagtcaccactctaccttagatagactctatacatgggagaagaaactgtacaaggaagtaaaggctggtgagcggttaagaatcgagtacgagaagaggttgacacatttgaggaaccaagatgtcaaaggcgaagaaccttcctctgttgataagacttgtgcagcattaagaagcttgcatactcggctgaaggtgtcaatacagacagttcagtcaatatcaacgaggattgaaattctaagggatgaggagctgcatcatcagcttatggagctgattcaagggctatcacggatgtggcgggccatggctgaacgccacaaagcccagaagcgcaccatcgaggacgccaagcttctcttcctccagcaccacccctcggccgccaccgccatctcccttggcccgctagaggctgcaggtcccccaccggctgccttggaattggagtccgagatccaggcgtggcgaggagcgctggaggcctggctgttcgcgcagcgcgcctacgcgcgcgcgctggccgcgtgggcgcgacggtgcctcggcatcagcaccgcggcgcggccaagtagccacgcgctgccgccggcgttcctggcgtgcatggagtgggggcgcgcggtcgacgcggccactgaggcgcgggtgatggacggtctggacttcttcgtcgccggcgtcgggtcggtgtgctcgggcgcggctgccgggatggagggcatggctgggcgcgtgctgtgtgctggcatggcagcggtcaccggcgccttggcggagttcgcggcggcgtctggcgacagctatgacgccgctgtcgcagctgtcgtcgccgcggcgcgtgcgccggagcgcgggaaagaggacggcgtgggacaagtgccggaacgctaggaaagtgctgcggcggttgctttgttggttgaccggcccccgtgacgtagagtggctctgctcaccttgtgatgacgatgggtagggtaggagatggaattaagcatgcagctacgtatgtagtcttgtgattgataagaatgctattacaaggctatctaattttgctagcgactgcttattatagtgtggtggtcctagaccgacaaatctaagcaatagcaacaattggttgtttgtgatacaagcacaagcgaatgggatggagtttgtttatgagagcaagaaccgctacgcgcggctacggggaaactatccgatacgaggaagacgaaggcttaccggtggcttcaaatgcggcttttcc

SEQ ID NO: 209556 - DNA, 2632 bp, Zea Mays
tttctctctcatcgccgctgatttctcctcccctctgaaagccttttgaccgttgcagtctctctctccctctgtccttccgttcccggccactcctctctccctctcttctctctctctgcagactgcacaaagccgccttcgtcttccactcgttcttgtttacacacacagcacagcacagcacagcagcctcccgggaaagagaaggcagttccctcactgtctctcaggattgtggtccaggtcatctccccgttcgctggcttcagcagcagagctcttgctggcaaacaagtgatctttctacagttttagaagggcaggcctttgacactgggtttgctctcttctcatgttcgaagctcggagattatgaatacttctacctattacatgccttatgacaggccaagatatgcacctccatcaccccaggaggcaatgaggacttcttattatgcatcttatgacaggccaagctaccgaccaccatcatcccaggagccaccgaggaattcttatcatgtgccatatgacaggccaagcttcccacctccatcaccccaggagcaggaatcatcaccatgggactccttctggaacccattctcatcgctggacagctttggatatccccgccctcggagtagctatgacaacgtgaccaatgacgatgaactcgcgaggttacagcgggtacgagaggaggaaggaatcccagaacttgaagaggaagacgatgagtgtcaagagcatgtacaaatgcatagaaaagaagaacaagaagatcatgataatgcggatgatgatgatgaagacgatgaggaagatgacgatgacgaatgtgagcattcagatgagtatatggtttctgacgagggcacttgctctgtcaattttgatgctaatatgaagcaagaaacaaagggatttgaatccaaaggtattcagtgtactgaagcaccagaacctcgcaagacagtagaacttgagttaaaggcacacaagaaagaactgatgagaaacagagtagcaaatgcagaagaaactcctggtttcacagtatatctgaatcgaagaccagcaagcttggttgaggccatgaaggatatcgactgtcagttctcgggaatatgtgacgctgctcgggaaatctcagtaatgttggaggcaagtagagctcagtactcagcctcaaacgatctttctgcgaagatgctgaatccggttgcacttttgcgctctgtgtcgtcgcgttcatcgtcttctcgtttccttcttgctccctctagctcaatagatgatctctttgacaatgagactagcagctgttactctgaagaatcttgtagtaccatgtctggaagtcaccactctaccttagatagactctatacatgggagaagaaactgtacaaggaagtaaaggctggtgagcggttaagaatcgagtacgagaagaggttgacacatttgaggaaccaagatgtcaaaggcgaagaaccttcctctgttgataagacttgtgcagcattaagaagcttgcatactcggctgaaggtgtcaatacagacagttcagtcaatatcaacgaggattgaaattctaagggatgaggagctgcatcatcagcttatggagctgattcaagggctatcacggatgtggcgggccatggctgaacgccacaaagcccagaagcgcaccatcgaggacgccaagcttctcttcctccagcaccacccctcggccgccaccgccatctcccttggcccgctagaggctgcaggtcccccaccggctgccttggaattggagtccgagatccaggcgtggcgaggagcgctggaggcctggctgttcgcgcagcgcgcctacgcgcgcgcgctggccgcgtgggcgcgacggtgcctcggcatcagcaccgcggcgcggccaagtagccacgcgctgccgccggcgttcctggcgtgcatggagtgggggcgcgcggtcgacgcggccactgaggcgcgggtgatggacggtctggacttcttcgtcgccggcgtcgggtcggtgtgctcgggcgcggctgccgggatggagggcatggctgggcgcgtgctgtgtgctggcatggcagcggtcaccggcgccttggcggagttcgcggcggcgtctggcgacagctatgacgccgctgtcgcagctgtcgtcgccgcggcgcgtgcgccggagcgcgggaaagaggacggcgtgggacaagtgccggaacgctaggaaagtgctgcggcggttgctttgttggttgaccggcccccgtgacgtagagtggctctgctcaccttgtgatgacgatgggtagggtaggagatggaattaagcatgcagctacgtatgtagtcttgtgattgataagaatgctattacaaggctatctaattttgctagcgactgcttattatagtgtggtggtcctagaccgacaaatctaagcaatagcaacaattggttgtttgtgatacaagcacaagcgaatgggatggagtttgtttatgagagcaagaaccgctacgcgcggctacggggaaactatccgatacgaggaagacgaaggcttaccggtggcttcaaatgcggcttttcc

SEQ ID NO: 209557 - DNA, 2585 bp, Zea Mays
tttctctctcatcgccgctgatttctcctcccctctgaaagccttttgaccgttgcagtctctctctccctctgtccttccgttcccggccactcctctctccctctcttctctctctctgcagactgcacaaagccgccttcgtcttccactcgttcttgtttacacacacagcacagcacagcacagcagcctcccgggaaagagaaggcagttccctcactgtctctcaggattgtggtccaggtcatctccccgttcgctggcttcagcagcagagctcttgctggcaaacaagtgatctttctacagttttagctcggagattatgaatacttctacctattacatgccttatgacaggccaagatatgcacctccatcaccccaggaggcaatgaggacttcttattatgcatcttatgacaggccaagctaccgaccaccatcatcccaggagccaccgaggaattcttatcatgtgccatatgacaggccaagcttcccacctccatcaccccaggagcaggaatcatcaccatgggactccttctggaacccattctcatcgctggacagctttggatatccccgccctcggagtagctatgacaacgtgaccaatgacgatgaactcgcgaggttacagcgggtacgagaggaggaaggaatcccagaacttgaagaggaagacgatgagtgtcaagagcatgtacaaatgcatagaaaagaagaacaagaagatcatgataatgcggatgatgatgatgaagacgatgaggaagatgacgatgacgaatgtgagcattcagatgagtatatggtttctgacgagggcacttgctctgtcaattttgatgctaatatgaagcaagaaacaaagggatttgaatccaaaggtattcagtgtactgaagcaccagaacctcgcaagacagtagaacttgagttaaaggcacacaagaaagaactgatgagaaacagagtagcaaatgcagaagaaactcctggtttcacagtatatctgaatcgaagaccagcaagcttggttgaggccatgaaggatatcgactgtcagttctcgggaatatgtgacgctgctcgggaaatctcagtaatgttggaggcaagtagagctcagtactcagcctcaaacgatctttctgcgaagatgctgaatccggttgcacttttgcgctctgtgtcgtcgcgttcatcgtcttctcgtttccttcttgctccctctagctcaatagatgatctctttgacaatgagactagcagctgttactctgaagaatcttgtagtaccatgtctggaagtcaccactctaccttagatagactctatacatgggagaagaaactgtacaaggaagtaaaggctggtgagcggttaagaatcgagtacgagaagaggttgacacatttgaggaaccaagatgtcaaaggcgaagaaccttcctctgttgataagacttgtgcagcattaagaagcttgcatactcggctgaaggtgtcaatacagacagttcagtcaatatcaacgaggattgaaattctaagggatgaggagctgcatcatcagcttatggagctgattcaagggctatcacggatgtggcgggccatggctgaacgccacaaagcccagaagcgcaccatcgaggacgccaagcttctcttcctccagcaccacccctcggccgccaccgccatctcccttggcccgctagaggctgcaggtcccccaccggctgccttggaattggagtccgagatccaggcgtggcgaggagcgctggaggcctggctgttcgcgcagcgcgcctacgcgcgcgcgctggccgcgtgggcgcgacggtgcctcggcatcagcaccgcggcgcggccaagtagccacgcgctgccgccggcgttcctggcgtgcatggagtgggggcgcgcggtcgacgcggccactgaggcgcgggtgatggacggtctggacttcttcgtcgccggcgtcgggtcggtgtgctcgggcgcggctgccgggatggagggcatggctgggcgcgtgctgtgtgctggcatggcagcggtcaccggcgccttggcggagttcgcggcggcgtctggcgacagctatgacgccgctgtcgcagctgtcgtcgccgcggcgcgtgcgccggagcgcgggaaagaggacggcgtgggacaagtgccggaacgctaggaaagtgctgcggcggttgctttgttggttgaccggcccccgtgacgtagagtggctctgctcaccttgtgatgacgatgggtagggtaggagatggaattaagcatgcagctacgtatgtagtcttgtgattgataagaatgctattacaaggctatctaattttgctagcgactgcttattatagtgtggtggtcctagaccgacaaatctaagcaatagcaacaattggttgtttgtgatacaagcacaagcgaatgggatggagtttgtttatgagagcaagaaccgctacgcgcggctacggggaaactatccgatacgaggaagacgaaggcttaccggtggcttcaaatgcggcttttcc

SEQ ID NO: 209558 - DNA, 3198 bp, Zea Mays
ctctctcgacactgtcactctcttcactcacttgtgctgctgctgccatcgtcgtcgatctcttgctccataaaaatcgtagtgttatatattaatatacaagaaatactctccccgtttacaccctttctctctcatcgccgctgatttctcctcccctctgaaagccttttgaccgttgcagtctctctctccctctgtccttccgttcccggccactcctctctccctctcttctctctctctgcagactgcacaaagccgccttcgtcttccactcgttcttgtttacacacacagcacagcacagcacagcagcctcccgggaaagagaaggcagttccctcactgtctctcaggattgtggtccaggtcatctccccgttcgctggcttcagcagcagagctcttgctggcaaacaagtgatctttctacagttttagctcggagattatgacacaagcatgactggtccttgaaaactatacacggctttggagagatgggatgtgctgcttccaggttagaagatgaggaagccatcaagatgtgccgggacagaagggacttcatcaagcaggcactggagcagcgcaaccgatttgcatcttctcacattgcttacatcgagtccctgaagcgtgtttcaatggctctccaacggtttgttgctggagatgaccaccatgagctcatcttcgatacattcatctcccctgtcaagcaacagaagccagagacgctcagcctgccttatggttcatatgagaagagaaccattcatgtctcgagatacttgaggtcagggcctaacccatcagtgtcagttgaggagcacccacgaccggtggaaacagtccgtgttgagtcacattaccctatggacaatcacagtggcatggataggttcttacaatcgcactcctcaccggtggtatcgtcttcatactacccaccaccttataccaggccaagctacccatctccatcgtcccaggaaccagttatgaatacttctacctattacatgccttatgacaggccaagatatgcacctccatcaccccaggaggcaatgaggacttcttattatgcatcttatgacaggccaagcttcccacctccatcaccccaggagcaggaatcatcaccatgggactccttctggaacccattctcatcgctggacagctttggatatccccgccctcggagtagctatgacaacgtgaccaatgacgatgaactcgcgaggttacagcgggtacgagaggaggaaggaatcccagaacttgaagaggaagacgatgagtgtcaagagcatgtacaaatgcatagaaaagaagaacaagaagatcatgataatgcggatgatgatgatgaagacgatgaggaagatgacgatgacgaatgtgagcattcagatgagtatatggtttctgacgagggcacttgctctgtcaattttgatgctaatatgaagcaagaaacaaagggatttgaatccaaaggtattcagtgtactgaagcaccagaacctcgcaagacagtagaacttgagttaaaggcacacaagaaagaactgatgagaaacagagtagcaaatgcagaagaaactcctggtttcacagtatatctgaatcgaagaccagcaagcttggttgaggccatgaaggatatcgactgtcagttctcgggaatatgtgacgctgctcgggaaatctcagtaatgttggaggcaagtagagctcagtactcagcctcaaacgatctttctgcgaagatgctgaatccggttgcacttttgcgctctgtgtcgtcgcgttcatcgtcttctcgtttccttcttgctccctctagctcaatagatgatctctttgacaatgagactagcagctgttactctgaagaatcttgtagtaccatgtctggaagtcaccactctaccttagatagactctatacatgggagaagaaactgtacaaggaagtaaaggctggtgagcggttaagaatcgagtacgagaagaggttgacacatttgaggaaccaagatgtcaaaggcgaagaaccttcctctgttgataagacttgtgcagcattaagaagcttgcatactcggctgaaggtgtcaatacagacagttcagtcaatatcaacgaggattgaaattctaagggatgaggagctgcatcatcagcttatggagctgattcaagggctatcacggatgtggcgggccatggctgaacgccacaaagcccagaagcgcaccatcgaggacgccaagcttctcttcctccagcaccacccctcggccgccaccgccatctcccttggcccgctagaggctgcaggtcccccaccggctgccttggaattggagtccgagatccaggcgtggcgaggagcgctggaggcctggctgttcgcgcagcgcgcctacgcgcgcgcgctggccgcgtgggcgcgacggtgcctcggcatcagcaccgcggcgcggccaagtagccacgcgctgccgccggcgttcctggcgtgcatggagtgggggcgcgcggtcgacgcggccactgaggcgcgggtgatggacggtctggacttcttcgtcgccggcgtcgggtcggtgtgctcgggcgcggctgccgggatggagggcatggctgggcgcgtgctgtgtgctggcatggcagcggtcaccggcgccttggcggagttcgcggcggcgtctggcgacagctatgacgccgctgtcgcagctgtcgtcgccgcggcgcgtgcgccggagcgcgggaaagaggacggcgtgggacaagtgccggaacgctaggaaagtgctgcggcggttgctttgttggttgaccggcccccgtgacgtagagtggctctgctcaccttgtgatgacgatgggtagggtaggagatggaattaagcatgcagctacgtatgtagtcttgtgattgataagaatgctattacaaggctatctaattttgctagcgactgcttattatagtgtggtggtcctagaccgacaaatctaagcaatagcaacaattggttgtttgtgatacaagcacaagcgaatgggatggagtttgtttatgagagcaagaaccgctacgcgcggctacggggaaactatccgatacgaggaagacgaaggcttaccggtggcttcaaatgcggcttttcc

SEQ ID NO: 209559 - DNA, 4658 bp, Zea Mays
ttcaagtttggagttcgtcgtcgtccccagcgtgactgcgcgagtgctatccattccaaacctgaaaccactgcggcccaacccggcaaccccgatccccacttccccagtaccatccctatcccagccacgccatcgtcatcgccttgcgcgcaatatccttggctccacgccccagtaagcgaccagtgacagtgagagcggtgaagcaaaccaaagcaaagctatcggaagaacctcagtcgagggggcgagcgagccgacgagacgactgacgagcgcacaagaccggacggggccgcctaatccagagagagccccaggtctcccccaaccccgccatggcgtcgggcagccgcgccacgcccacgcgctccccctcctccgcgcggcccgaggcgccgcgtcacgcgcaccaccaccaccactcccagtcgtcgggcgggagcacgtcccgcgcgggcgggggagccgcggccacggagtcggtctccaaggccgtcgcccagtacaccctagacgcgcgcctacacgcggtgttcgagcaatcgggcgcgtcgggccgcagcttcgactactcccaatcgctgcgcgcgccgcccacgccgtcctccgagcagcagatcgccgcctacctctcccgcatccagcgcggcggccacatccagcccttcggctgcacgctcgccgtcgccgacgactcctccttccgcctcctcgccttctccgagaactcccccgacctgctcgacctgtcgcctcaccactccgttccctcgctggactcctctgcgccgccccacgtttccctgggtgccgacgcgcgcctcctcttctccccctcgtccgcggtcctcctagagcgcgccttcgccgcgcgcgagatctcgctgctcaacccgatatggatccactccagggtctcctccaagccgttctacgccatcctccaccgcatcgacgtcggcgtcgtcatcgacctcgagcccgcccgcaccgaggaccccgctctctccatcgccggtgcagtccagtcccagaaactggcggtccgcgccatctcccgcctccaggcgctacccggcggggacgtcaagcttctctgcgacacagtcgtggagcatgttcgcgagctcacgggttatgaccgtgtcatggtgtacaggttccatgaagacgagcacggggaagttgtcgccgagagccggcgcgacaaccttgagccttacctcggattgcattatcccgccacagatatcccccaggcgtcgcgcttcctgttccggcagaaccgcgtgcgaatgattgccgattgccatgccaccccggtgagagttattcaagatcctgggctgtcgcagcctctgtgtttggtaggctccacgctacgcgctccacacgggtgtcatgcacagtacatggcgaacatggggtcaattgcgtcgcttgttatggcagtcatcattagcagtggcggtgacgatgagcaaacaggtcggggtggcatctcgtcggcaatgaagttgtgggggttagtggtgtgccaccatacatcaccacggtgtatcccttttccattgaggtatgcttgcgagtttctcatgcaggcatttgggttgcagctcaacatggagttgcagcttgcgcaccagctgtcagagaagcacattctgcgaactcagacgctattgtgtgacatgctactacgagattcaccaactggcatcgtcacgcagagccccagcatcatggaccttgtgaagtgcgacggggctgcactgtattatcatgggaaatactatccattgggtgtcactcccactgagtctcagattaaggatatcatcgagtggttgacggtgtttcatggggactcaacagggctcagcacagatagcctggctgatgcaggctaccttggtgctgctgcactaggggaggctgtgtgtggaatggcggtggcttatattacaccgagtgattacttgttttggtttcggtcacacacagctaaagagatcaaatggggtggcgcaaagcatcaccctgaggataaggatgatggtcagaggatgcacccacggtcgtcattcaaggcatttcttgaagtggttaaaagcagaagcctgccatgggagaatgcagaaatggacgcaatacattccttgcagctcatattgcgtgactccttcagggatgctgcagagggcaccaacaactcaaaagccattgtcaatggacaagttcagcttcgggagctagaattgcgggggataaatgagcttagttccgtagcaagagagatggttcggttgatagagacagcaacagtacccatatttgcagtagatactgatgggtgtataaatggttggaatgcaaagattgctgagttgacagggctttcagttgaggaggcaatgggcaaatctctggtaaatgatcttatcttcaaggaatctgaggcgacagttgaaaaactactctcacgagctttaagaggtgaggaagacaaaaatgtggagataaagttgaagacatttgggtcagagcaatataagggaccaatatttgttgttgtcaatgcttgttctagtagagattacacacaaaatattgtaggtgtctgttttgttggacaagatgtcacaggacaaaaggtggtcatggataaatttgttaacatacaaggggactacaaagctattgtacacaatcctaatcctctgataccaccaatttttgcatcagatgagaacacttcttgttcagaatggaatacagccatggaaaaacttacaggatggtcgagaggtgaagttgttggtaagtttcttattggagaggtgtttggaaattgttgtcgactcaagggcccagatgcattgacaaaattcatggttattattcacaacgctataggaggacaggattatgagaagttccctttttcattttttgacaagaatggaaagtatgtgcaggccttattgaccgccaatacaaggagcaaaatggatggtaaatccattggagccttttgtttcctgcagattgcaagcactgaaatacagcaagcctttgagattcagagacaacaagaaaagaagtgttacgcaaggatgaaagaattggcctatatttgccaggagataaagaatcctcttagtggcatccgatttaccaactctctgttgcagatgactgatttaaatgatgaccagaggcagttccttgaaactagctctgcttgtgagaaacagatgtccaagattgttaaggacgccagtctccaaagtatcgaggacgggtctatctgtcttatacactcgttgtatctttgatggagtggctcctagcctttccttcatcctagtgcagattgatgatgaaagaagatcatgggaattagctggagcgaggggtctctcctacttggcagcacctcttcttgaggccccccccctcctttgatctttactctttggtgcttgagcaaagtgagttttctcttggagacgttatgaatgctgttgtcagccaagcaatgttattgttgagagagagggatttacaacttattcgggacatccctgatgaaatcaaggatgcgtcagcgtatggtgatcaatgtagaattcaacaagttttggctgacttcttgctaagcatggtgcggtctgctccatccgagaatggttgggtagaaatacaagtcagaccaaatgtaaaacagaattctgatggaacaaatacagaacttttcatattcaggtttgcctgccctggtgagggcctccctgctgacgtcgtccaggatatgttcagcaattcccaatggtcaacacaagaaggcgtaggactaagcacatgcaggaagatcctcaaattgatgggtggcgaggtccaatacatcagagagtcagagcggagtttcttcctcatcgtcctcgagcagccccaacctcgtccagcagctggtagagaaatcgtctgatatgttaagatccgtgctgaccccacctaactttctcggccgattacataacttagccccctgataagagggtgcctaatttacgagaagcctggaaacaaatcaaagctgccatggcaattcaatgactgaagtgttgttgatgaggctgttttcagtgcaccgctatccatggccatgctgtggtttcaagaccagagttggcggatagttacgtacacaggcggcaaatgtgtctcttagccgctgtttaagtgcaccgctgtaagtttgggtgtccatgtccatgctgtggtttcaagatcagagtccatggcggatagttatgtacacaagcgacaaacgtggttcttagcttaggttcatgaccagttccacgtagtacatatagcttatatgtatatatacaatctattttttactatgcataaggagttgtttcagcttacacggttgtatgttatagtcctttctaggtctactacatcctaatctagatctggttcctctggaatgttggcaccaccgctctgtattttgcggcgaaggtttgagtttggcctacctcggtttatttcattctcagaccttaatgtaaaagctttgacagttgacactgggtgtgtcctttgtagagaaagaaaaccttttcttttaaaaa

SEQ ID NO: 209560 - DNA, 917 bp, Zea Mays
ccaagcggtgccgtgcccgtgcgagtctcaccgcgcttgccccgcctccgcggaccacgcagctccgctctggttcctggtccaggggccttccacgccttccctttccatggcgtccagggatctccggcgcctgctcgacggtgtcgccctcgtcgcgcgcgaggccacgcggggtacctccctgcgtgatgtcctcaggtctgcgctccttgccaccaccgacctcgccggcctcaccagaggcaccccgcgccgtccgccgcaccctccaggcgcaggaccgctgcccgccaccgaatcctcccgcccctcctccgtcgtgtacttctcccacgatgaagccacggcgtcgccgcaagatcatgcactggagcgtccgccgccagcgcaagaggccccgcaccccgcgcggacgcaggagaccgtccgaactggtacaaccgcctccgttgcagccgaacctgctgccgtcgcggcggacaggcccgaacctgcggcacctcctcccgatccctcgcctttgccccaacaggcgccccctttggcctcagcggcgcctggggagaagaggaggcggctgcgggaacggaaggttccatccacgcccttcaccagagcactcgggactgggcgccgggttagcgtggggcactgttcaggagtcggcccgtcgggtaatgatgcggggagcagcgctcaaggtggggcagatgctgagcatccaggacgaatcccttgtacctccgccggtgttagcagctcttgatattgttcgtcaaggtgctgatgttatgccaaggaagcagctaaattcagtccttgatgccgagcttggtcctgactggtcctccaggttgaggagtttcgactatgaaccgctagctgcagctagcattggccaggttggttcagca

SEQ ID NO: 209561 - DNA, 718 bp, Zea Mays
cagcccagcacacagcccataacgatggcccccggcctattcgggctcgcctaccatctctcctccggtccttcctatcataccggcgggcggcgcggggcagctaatcggcaatccggcttcgcctcgtcgcagtccaatccgcactcaccgccgccctcccgcccctcacctgcccgcggcagtgtcggagtaaaccctaccggacctatcgtcacgcgactgcgggagttgcttgcttcttctgccgctctctcgctccgtcccttccgcccatggagacctcgctgcgcttgcgcagtggcggcggcctccgcatccacgccaaggagaagctgcccctcggccacagctcgctgctgcaggctcatgcggagctcgacctccacacaagccccgccggagttactaccccgagttatctcgctctctttgtcaggcacttctactcgcagctatcagccaatctcggagctggcgtccagttgcacaacggcgatgacctcgcctacagttttcgcgccaagaaggccgtcctgttcaaaccagataatgggttcctaggtctgaaccttaaagggcgcctacttaccgataaagagttgaagccgacgaagacaactggatccgttgaactggcatggaccatacttgacttgaaacagggccaagacgtaaggctcaaagttggttacgaattgtgtgacaagagtaaatg

SEQ ID NO: 209562 - DNA, 810 bp, Zea Mays
ccaggaaggcacgcgagcctcgacgagtacgtgtctacctggttcgggttggatcagtccaagtaccagtgggcgcttaacgactactacgagaccataggcaaggtcagcaaggaagtggattgtataaaaggtggtatgcccaaggagcctactactaaagtgcagaaactctaaaaaaacaacttcgttttgtgttgtaagatgagtagctagcagcgtatgtatggagaagtatgttacatttttgtggagccttgaattgaaaggtggtcatctctgctttgtcggcggcccaagtgtaagccctgcaccgagcgccattcatctgggacttctggaggccgggccgcgaacggtcgctgttttgttccgccgttcaggatctactgtaatcctctaaggttatgtcaaagcacagaatcagtctaatctgcatgttgggcgttgtttactatcacgcccttgtgttttcatggctacattagctacgaccataacgtgatgtgcagacgatgttacgaacggcgtaaaaatctcaatcatcaactatccgccggacctggcccagggttgtaaatcggaggcgttccctttgaggtcgtaaaagccgaagcgttcatgaattacgattgtacactgcgttccgaccggccttagcatatgctgaattgcgtggactaaaacagcagaaatccagcgtcggtgttagtgcattgcatgtagccacgtactagtctgcatctaggtctattcatgtttggttgtcccagaactaatgctattttaagatacgagggtgtttgatct

SEQ ID NO: 209563 - DNA, 2310 bp, Zea Mays
gcactagcagagctaaaacccttgcggcggctacctttccctcaccccctttctcgcctcgcggcggctacctttccccccttctcgcctctcgcctcgcggcggctacctttccccccttctcgcctctcgcctcgcggccgccgcaggcgaccccttgtcgcctcgtgctgtccaccgccgaatcttccccaggttggaaggttagggagggtatctgttgtttcagctcagttttaccgggggactggttgtgggcggagatgttggtgctctttgagacccccgcgggcttcgccctattcaaggtgctcgacgagggtaagctcgacaaggtcgaggatctatggaaggagttcacgacgtcggactcagcaagaaaggtggttgagctgaaggctttcaataagtttgagaacacatctgatgctctatctgcggcaacccttattattgatagcaagcctagcaagggtctgcgcaagttcttacagaaacattgtgagggtgaaacattagcggttgctgattctaagctaggaaatgctataaaagaaaagctgaaaattgactgccttcacaatagtgctgtgatggagctgatgagagggctgagaaatcagctcactgagcttataactgggttgggtgctcaagaccttggcccaatgagcttgggattgtcccacagcctgtctaggtataagctgaagttcagtcccgagaaggttgataccatgatcattcaagccattggattattggatgatcttgacaaggagcttaacacttatgccatgagagttcgtgaatggtatggctggcactttccagagctcaccaaaatagttacagataatatacagtatgccaaagttgtgaagatgatgggaaacagaaccaatgcagtcaatcttgacttctctgagatattatcagatgaagagctagaaacacagctaaaggaggcagcagtgatatctatgggaacagaagttagtgacctcgacttgtcaaatataagagagctatgcgatcaagtgctggcactttctgagtacagagcccagctgtatgactatttaaaaagcaggatgaacactattgcaccaaatctgacagccctagtgggtgaattagttggtgctcgccttattgcacatggtggaagtttgctaaatttagccaagcagcctggtagcacaattcagatacttggtgcagagaaggctttattcagagctctaaagacaaagcattctactcctaagtatggcctcatctaccatgcatccttaattggtaaggcttctcaaaagcacaagggaaaaatctctcgttctcttgctgcaaaaactgctcttgccatccgatatgatgcgcttggcgatggtgaggacaactccattggtactgagagccgacttaagcttgagacacggcttcaagttcttgagggtagagaacttgggaaatctgctggttccacaaaggggaagcccaagatagaagtgtatgaaaaggaccggaagcagggtgctggggctttaacaactcctgctaagacatacaaccctgcagctgatctggtacttactgaagaaacaccaaagaagtcagaattggcttcaaagaagaggaaacatcatgaggttcaaactgaaccatcggcagagcttgcagagggagcagtccaggaggataggaagaagaagaaaaagaacaaggaaagcgaggaggctcctgctgctgaaggtgatggtgagaagaaaaagaaaaagaagtccaaggatgtcggggaagagcctgctgtggctgctgctgctgccacagaaggtgagaaaaagaagaagaaaaagaagtctgacgcggacggtgagggtgttacaacgcaaaccgaagagtctggtaagaaagataagaagaaaaagaagaaaaggcatgccgatgatgagtgagacattcttcggaagagaatgtgcgggtaccaaatgctgggactcagctgttctgtaaaatgggtatcacggggttagaaaacatattgagatcagtttttggggttacctggtttttttgggggacctggcttgtattcaacaattacttgctcggtctagatgatgatggaatttttaacttttgctgttgtaaccccataaatttagtatgatgattgtcatggtaactctgcaactgagagaccttccattctcaatgctgacctggacttgctttgccactcttgtaatcggtaattcggtactatatatctcgaggtcaccaaatttctggtatctgatacaccta

SEQ ID NO: 209564 - DNA, 2375 bp, Zea Mays
gcactagcagagctaaaacccttgcggcggctacctttccctcaccccctttctcgcctcgcggcggctacctttccccccttctcgcctctcgcctcgcggcggctacctttccccccttctcgcctctcgcctcgcggccgccgcaggcgaccccttgtcgcctcgtgctgtccaccgccgaatcttccccaggttggaaggtttctgccgcctcaacagctcgatccggttggcgcacgttttcctctgtctgatttggttccctgcgcgttcgttcgattcaggttagggagggtatctgttgtttcagctcagttttaccgggggactggttgtgggcggagatgttggtgctctttgagacccccgcgggcttcgccctattcaaggtgctcgacgagggtaagctcgacaaggtcgaggatctatggaaggagttcacgacgtcggactcagcaagaaaggtggttgagctgaaggctttcaataagtttgagaacacatctgatgctctatctgcggcaacccttattattgatagcaagcctagcaagggtctgcgcaagttcttacagaaacattgtgagggtgaaacattagcggttgctgattctaagctaggaaatgctataaaagaaaagctgaaaattgactgccttcacaatagtgctgtgatggagctgatgagagggctgagaaatcagctcactgagcttataactgggttgggtgctcaagaccttggcccaatgagcttgggattgtcccacagcctgtctaggtataagctgaagttcagtcccgagaaggttgataccatgatcattcaagccattggattattggatgatcttgacaaggagcttaacacttatgccatgagagttcgtgaatggtatggctggcactttccagagctcaccaaaatagttacagataatatacagtatgccaaagttgtgaagatgatgggaaacagaaccaatgcagtcaatcttgacttctctgagatattatcagatgaagagctagaaacacagctaaaggaggcagcagtgatatctatgggaacagaagttagtgacctcgacttgtcaaatataagagagctatgcgatcaagtgctggcactttctgagtacagagcccagctgtatgactatttaaaaagcaggatgaacactattgcaccaaatctgacagccctagtgggtgaattagttggtgctcgccttattgcacatggtggaagtttgctaaatttagccaagcagcctggtagcacaattcagatacttggtgcagagaaggctttattcagagctctaaagacaaagcattctactcctaagtatggcctcatctaccatgcatccttaattggtaaggcttctcaaaagcacaagggaaaaatctctcgttctcttgctgcaaaaactgctcttgccatccgatatgatgcgcttggcgatggtgaggacaactccattggtactgagagccgacttaagttcttgagggtagagaacttgggaaatctgctggttccacaaaggggaagcccaagatagaagtgtatgaaaaggaccggaagcagggtgctggggctttaacaactcctgctaagacatacaaccctgcagctgatctggtacttactgaagaaacaccaaagaagtcagaattggcttcaaagaagaggaaacatcatgaggttcaaactgaaccatcggcagagcttgcagagggagcagtccaggaggataggaagaagaagaaaaagaacaaggaaagcgaggaggctcctgctgctgaaggtgatggtgagaagaaaaagaaaaagaagtccaaggatgtcggggaagagcctgctgtggctgctgctgctgccacagaaggtgagaaaaagaagaagaaaaagaagtctgacgcggacggtgagggtgttacaacgcaaaccgaagagtctggtaagaaagataagaagaaaaagaagaaaaggcatgccgatgatgagtgagacattcttcggaagagaatgtgcgggtaccaaatgctgggactcagctgttctgtaaaatgggtatcacggggttagaaaacatattgagatcagtttttggggttacctggtttttttgggggacctggcttgtattcaacaattacttgctcggtctagatgatgatggaatttttaacttttgctgttgtaaccccataaatttagtatgatgattgtcatggtaactctgcaactgagagaccttccattctcaatgctgacctggacttgctttgccactcttgtaatcggtaattcggtactatatatctcgaggtcaccaaatttctggtatctgatacaccta

SEQ ID NO: 209565 - DNA, 2214 bp, Zea Mays
aaccattacacctttagttcttacgggttttcatgttccaaaagacagctattcataaatgcaatttggagggtaaacctgtgatcatcactagagttgtggacagcatgattgacaatctacgccctacccgtgcagaggcaactgatgttgcaaatgctgtcctagatggtgaacacttttactacatttctatcattttatgaatgtcattcttatttcctgtgctggtctctaggcactgatggcattttgcttggtgcggagacacttcgagggctttatcctgttgatgcagctgagactgtgtataatcagccgcttcaattcaagaaagtaatgtggcatgtaggtgacccaatgccccacgaggaatctgtggcatcagcagcggttggttctgcaatcaaagtaaaagctgctgccattgttgtgttcacattctcagggagagctgcgaggttagttgccaagtataggccaacaatgccaattttagcagttatcttcccacgtgaaggatccgatccatcaaagtggcgttcttatggcacaacacaggcaagacaatgtttcgcagtgagaggcgtgtaccctttgatggggagtactgatgaggccgaaactggtgggctaacaaaggaagagtatgggataaaacttgcgatgagctatggtcggtcggttggcatagtgaagcctttcgacaggttgataatctttgaaaagattggtgattcttctgttgtcaagatcattgagtgtgaaggttaggcattagatgattgatacctacaacccatgctgtagtttcatgtatcgcatgggagattacctccagttccatctcacttatttaaccaagttccaagtagagtacagcaagagcacaagatatcttgttagggaattttgccctcttttcagattgtcttttgatttgacgcaataaattatgatgtcacagatttatactggaattatgatttgattatgcaaatataggattgttggcaacaaaccatgaataatcgtcgttcctaccttattctattggacattacatgatgcagtgcatgataacatcccaaaagacaatcttagggcattatcagttaatttacctataatgttctgtctatggtacactcctgcaaccttgctgctgttgctggtatgctgctgtcagtactgctccttgaagaaaacagcatagatgatgcagcagatggagatgatgatgataacgatatcgatggtgagcgcagtcatggcctgatcgctaagcttcatgttcttgccgccgaggcggtcaaccatgtctggcacgggtttgtagttgatgatgtcctgctcgtatgggtcctcgagcctggacctgagctgctgcaggcggcggctctcggcctcctgcgccagtgtccagtcgtagaaccgccgtgtctcctccttgctcagcacgttgtacacctctcgcaggcggatgaacttctgcgacgccaccttgagcggcagcgtcgtcgtgtccgggtggtactccttggacagccgccggtacgccgtcttgatctcctcgatgtccgcctctggcgctatgccaaggaacctgggtgatagattttgcagttcagtcatgtgtcgccgttagtaacaaagtattgacatgatgatgacagtgtctcgaacagagctctacaaatttatgtacagctggacggcaatccaaaaggacatatgagcatggattggagatgaactcaactggtagtgagactcggccgcgttgttgatgaggtccgcgaacctccctcccaacggctcgttcttgctgctgccgcggccgtcgccttccttcttggccttgcctcctacccacccttcgtcggggttggaccagtgtatcctggtgtccaccgtcttcttcttccccggccctgcaccgtccgccgtcgcaggagtcggttcggcgtcgggcgggctcgcggctgcgaccacgactgccttcgtgcgccgctggtgccggtggaggaagggcgtgaagatgcgcgaggccgtggacgctgccatgggaaacgtgtgtgttagcgtctgcgcaggcagcattccaaggcgtggaggggagtcgggaggtgatgaggctcgcacgttccagttgtcgtggtaggagggcgaggcgatgaggtgtcgctgttcacttagccaatggccacatgt

SEQ ID NO: 209566 - DNA, 2978 bp, Zea Mays
gtacgcgctaatttgggcgatcacttaaagtattcccatcactcaccaagatagttgggacgctcgggcccaattcacactcggttgagattattcaggaatgcctcactgctggaatgtcagttgcacggtttgatttctcatggatggatgctgcgtatcaccaggagacccttgataatttgaggaaagcggcacagaatgtgaagaagttgtgccctgtaatgttggatactcttggtccagaaattcaggttcacaattccactggtgagccaattgagttgaaagctgggaatcatgttatcataactccagatatttgtaaagctctctctgctgagatcctaccaattaagtttggtgatcttgcaaaagctgtgaagaagggtgatactctttttatgggccaatatctcttcacaggaagtgaaacaacatctgtctggctagaagttgtggaaacttctggggaaaatgtaaattgtctagtgaagaatgcagctacacttgacggccccatattcactctgcatgcttcacaagttcacatcaatttgcccactttgagtgaatatgataaacatgtcatttcaacttggggttcatgtaacagtgttgacattatatcactttcccatacccgctctgctgaagatgtcagggagctcagggcctttttacaagcacacgcccttcccgacacacaaatatacgcgaagattgaaaattcagagggtttggatcattttgatgacattctcaacgcggcagatggtatcattatttctcgaggagacctgggtattgaccttcctccagaaaacgttttcatgttccaaaagacagctattcataaatgcaatttggagggtaaacctgtgatcatcactagagttgtggacagcatgattgacaatctacgccctacccgtgcagaggcaactgatgttgcaaatgctgtcctagatggcactgatggcattttgcttggtgcggagacacttcgagggctttatcctgttgatgcagtgagtactgtggggagaatatgtgcagaagctgagactgtgtataatcagccgcttcaattcaagaaagtaatgtggcatgtaggtgacccaatgccccacgaggaatctgtggcatcagcagcggttggttctgcaatcaaagtaaaagctgctgccattgttgtgttcacattctcagggagagctgcgaggttagttgccaagtataggccaacaatgccaattttagcagttatcttcccacgtgaaggatccgatccatcaaagtggcgttcttatggcacaacacaggcaagacaatgtttcgcagtgagaggcgtgtaccctttgatggggagtactgatgaggccgaaactggtgggctaacaaaggaagagtatgggataaaacttgcgatgagctatggtcggtcggttggcatagtgaagcctttcgacaggttgataatctttgaaaagattggtgattcttctgttgtcaagatcattgagtgtgaaggttaggcattagatgattgatacctacaacccatgctgtagtttcatgtatcgcatgggagattacctccagttccatctcacttatttaaccaagttccaagtagagtacagcaagagcacaagatatcttgttagggaattttgccctcttttcagattgtcttttgatttgacgcaataaattatgatgtcacagatttatactggaattatgatttgattatgcaaatataggattgttggcaacaaaccatgaataatcgtcgttcctaccttattctattggacattacatgatgcagtgcatgataacatcccaaaagacaatcttagggcattatcagttaatttacctataatgttctgtctatggtacactcctgcaaccttgctgctgttgctggtatgctgctgtcagtactgctccttgaagaaaacagcatagatgatgcagcagatggagatgatgatgataacgatatcgatggtgagcgcagtcatggcctgatcgctaagcttcatgttcttgccgccgaggcggtcaaccatgtctggcacgggtttgtagttgatgatgtcctgctcgtatgggtcctcgagcctggacctgagctgctgcaggcggcggctctcggcctcctgcgccagtgtccagtcgtagaaccgccgtgtctcctccttgctcagcacgttgtacacctctcgcaggcggatgaacttctgcgacgccaccttgagcggcagcgtcgtcgtgtccgggtggtactccttggacagccgccggtacgccgtcttgatctcctcgatgtccgcctctggcgctatgccaaggaacctgggtgatagattttgcagttcagtcatgtgtcgccgttagtaacaaagtattgacatgatgatgacagtgtctcgaacagagctctacaaatttatgtacagctggacggcaatccaaaaggacatatgagcatggattggagatgaactcaactggtagtgagactcggccgcgttgttgatgaggtccgcgaacctccctcccaacggctcgttcttgctgctgccgcggccgtcgccttccttcttggccttgcctcctacccacccttcgtcggggttggaccagtgtatcctggtgtccaccgtcttcttcttccccggccctgcaccgtccgccgtcgcaggagtcggttcggcgtcgggcgggctcgcggctgcgaccacgactgccttcgtgcgccgctggtgccggtggaggaagggcgtgaagatgcgcgaggccgtggacgctgccatgggaaacgtgtgtgttagcgtctgcgcaggcagcattccaaggcgtggaggggagtcgggaggtgatgaggctcgcacgttccagttgtcgtggtaggagggcgaggcgatgaggtgtcgctgttcacttagccaatggccacatgt

SEQ ID NO: 209567 - DNA, 1635 bp, Zea Mays
gtcaccccaaaccggtctttgtcgcttcaaaccgtccaagggattcaaaacgcaaatcgaaccgccacgtgttcgcttggtttctttctttctccctacgccttgtccgctcctctctccctctctcgttctcgtcctcgtctttctcgagccgcgaggcgatcgcatcggagactcggagccggcaaaaccctaaggggaaggtttctgcaaggaggagggagatgcagggcgccagccacatgctcctggaggagcccttccgcctcgcctccgtcctctcccccgccaagcctaaagtattcccatcactcaccaagatagttgggacgctcgggcccaattcacactcggttgagattattcaggaatgcctcactgctggaatgtcagttgcacggtttgatttctcatggatggatgctgcgtatcaccaggagacccttgataatttgaggaaagcggcacagaatgtgaagaagttgtgccctgtaatgttggatactcttggtccagaaattcaggttcacaattccactggtgagccaattgagttgaaagctgggaatcatgttatcataactccagatatttgtaaagctctctctgctgagatcctaccaattaagtttggtgatcttgcaaaagctgtgaagaagggtgatactctttttatgggccaatatctcttcacaggaagtgaaacaacatctgtctggctagaagttgtggaaacttctggggaaaatgtaaattgtctagtgaagaatgcagctacacttgacggccccatattcactctgcatgcttcacaagttcacatcaatttgcccactttgagtgaatatgataaacatgtcatttcaacttggggttcatgtaacagtgttgacattatatcactttcccatacccgctctgctgaagatgtcagggagctcagggcctttttacaagcacacgcccttcccgacacacaaatatacgcgaagattgaaaattcagagggtttggatcattttgatgacattctcaacgcggcagatggtatcattatttctcgaggagacctgggtattgaccttcctccagaaaacgttttcatgttccaaaagacagctattcataaatgcaatttggagggtaaacctgtgatcatcactagagttgtggacagcatgattgacaatctacgccctacccgtgcagaggcaactgatgttgcaaatgctgtcctagatggcactgatggcattttgcttggtgcggagacacttcgagggctttatcctgttgatgcagtgagtactgtggggagaatatgtgcagaagctgagactgtgtataatcagccgcttcaattcaagaaagtaatgtggcatgtaggtgacccaatgccccacgaggaatctgtggcatcagcagcggttggttctgcaatcaaagtaaaagctgctgccattgttgtgttcacattctcagggagagctgcgaggttagttgccaagtataggccaacaatgccaattttagcagttatcttcccacgtgaaggatccgatccatcaaagtggcgttcttatggcacaacacaggaccagcaaactcgaatgtgtaaccattattaaaccactt

SEQ ID NO: 209568 - DNA, 3676 bp, Zea Mays
ccccatcctctctttctccctcgcgcttgactcccctgccaccccttcccgtctccaccccgacgccgaccgcactccgctccccgtccaccatcccagcgtgatggctgggaggaccgcgcctgccccctcccctccttctctctcacgccctactccctcgccgccccttcatcccagatctcgtcatgggcgctaccatgaccaacagttcggtggagcaggcgccgcacgctacgccatgggacggagcccgtccccacccgacaccgaccatctccaccccgagcccgtccgagaagtgagtgatttccatttcttcgattggatggcgtgcggtcgggcctccgcacctccctgtccccctcccctcctgcggcgatagcttcctcgaggagatgagcgtgccgcccccatgatcggtctacctccgccgcccccgcgcgcaccgcaaccaccacgcccctcgtgcaccttctcgcccgagaaggtggtttcctttggtgtccccacgtgtttttgtcgttgcaagttgaactcgccctttcatgcctgatattttgctcagactgcattggagaatggctacacaaagatcatgctgccaacatgtgcttctggaatagcatgccctatgctatctgcaactataaaggctaagctttaccagccgatgtcctgtatgtcgatgcacgatgggaggtacttgtggttcttcaacttcatggttgtctggcctagccgccatccgcccgcgcaaacgcggtacagctccactacagcagcaggaggcggtgacgtcgccaaaggctggcagatacttgatggctcttgataagaagcctattgcaactaaaggccaccacctttgttgtcctcaccctagccgaggacctcatctcccagggaaccagcttccagtgcctcttgtaccgatcatcagcaagggagtgctagaggaggaggttatggtgagttttgtcgcgactaatggtgagcccacgactacggccacatcaaagctggtctggtggaacctcgtggagcagatgacgatgacgccgacatcctgcacctctgctgcgacgctgccgaccaggacgcgggcccctccgtcgcgcgcgctctacaagtctggatccatcatcgtgctcggcaagactgacttccttaggccagacatggatcccataaccagatggacagccacaaagaaaagtggcctgattagctacaagaagctcttgttccatggactcgatctctggaccgcactatcgttgcctcaacccctaggtcgtgctgccctctggcctcctcatcgtacaattcaccaacatctccaacgtaagtgcagcaggttcagtaatgaactcaaaagtggcatcagaatactctaagagttttttgttctttttgcctggatatataccgagggcaatgcattcaaaactcctatagatgacgaatcccatctctccctcttttcccggacatcgatcccagtctcttcttcaagcaagagatggagctttccttggtcgggctccaaaatgctaggaaaacatcacttgcagcagctcgcagcgacacccccgcctcctcatcatggaagctacaagaacactttgagtaggtgaagaggatttgcgacactaccacattgtctttggccatgcatcatctcagtgataagataacaagccaactagatatttcaaaattgactgacaagctacagtaagggaaggtagactcaactgcattgacaccaaaggagaagtatgaaacttggaaggagattaaaattatgagtttcagaaaaatagtttctccaatgtgggcaatgacattgcttagcttgtatgttagagttcatgtcaccatattaggcagaatctgacgcctttaatgtaaatggacacaagaccttcgttgcaatggatgattatcttgtcactgacaaaatcactgcattcatagtgcaaacgcaacatgcagcaactgaagtccttaaagaaaagcaaccaaaagactgtatgaaatggaccaagtattgcagacaatattacaaatattggacacgttcatggctctttctgaagatactcatggagaaattatcttgtacctgagaatcccccttatttttgcacaattgatggttgtgtcctgtagtggctttgataattcatcactcctaaacgattttagaaagctataccaactaatgtgtggaggacctgggcaaggggtggtagtcgcgctggttcgctatccacggcggcaagccgcctactcgaagatcccacctccgaggacgccgctacggggaggacatgggcactaatcttgaactaaaactaggggggtgtctatgtaagttaatactttctctcacatttgcatcaaaatttgttttccgataatcaacagatcttgacatgtttctatgtactttctctcacattgagagttttttagattcagtgcaagccatctttatttgcttaatgagtcatcgatcttgacacatttttcatattcatcatagtttttactcattctttacatgtttttgtccttttcagattcagtacatgtaagctttctttgcttggacaatctatttctctttacttggatattttcttttagattaagataggccacctttatttgcttaacgtgtggttgatcttgacatgtttttcagattaatcatatttttattcattcttgacatgcttttgtctgtttttatattagtttttattcattcttgatatgctttcgtctgttttctcagattagtttttattcattcttgacatgcttttgacttttttgaaatttagatcagtacatgtaagctttctttgctcgtacacctgaccccacatgtgttagcagtctctaggtcatgttcatattattcatccatctctgttatatagatagtcgacacatccatttatatctttttatagggctaatcattgagatatctcttcctcttggtcctcgtgaattttttgttcgttctatgatgagaaatcacaaattcatatctttttttttattttgggggcttcacttttttaaaaataaaatgtaaatatttggaccccgtacgtcgcgatcgcatccaggacggctggttccgcctacaaccacgtggacaacttcttgcccgacatcatctcccagcttgttccacctacaaccgcgtggacaacttttcacccgacatcatctcctagctcctcgcattcgccaacaagttctgctatgagggcttgaagccaacctacgacaatcgggtcacaaccatggtgttggctcttgacgacgcctgatccctcatcgacatcggcctctaggaggcctcccacctcctcgtcacctcgtgcctctagcattcctatgggagcccccaaagtcactcacccacctagacatcgcccgtgttgttatttggtggtcagtatgtcacaatatagtcagttttttttgcttatgttgttggtactgattttattggatgtgaatttatttatcctttcattgtatattggaattcatgacattatctacatatgtacatgcttacatatctattatatttttgtataaatatttttttgatagtttttaatttgtatggcaaagcaag

SEQ ID NO: 209569 - DNA, 3504 bp, Zea Mays
ccccatcctctctttctccctcgcgcttgactcccctgccaccccttcccgtctccaccccgacgccgaccgcactccgctccccgtccaccatcccagcgtgatggctgggaggaccgcgcctgccccctcccctccttctctctcacgccctactccctcgccgccccttcatcccagatctcgtcatgggcgctaccatgaccaacagttcggtggagcaggcgccgcacgctacgccatgggacggagcccgtccccacccgacaccgaccatctccaccccgagcccgtccgagaagtgagtgatttccatttcttcgattggatggcgtgcggtcgggcctccgcacctccctgtccccctcccctcctgcggcgatagcttcctcgaggagatgagcgtgccgcccccatgatcggtctacctccgccgcccccgcgcgcaccgcaaccaccacgcccctcgtgcaccttctcgcccgagactgcattggagaatggctacacaaagatcatgctgccaacatgtgcttctggaatagcatgccctatgctatctgcaactataaagtaatatttggaatggtcataagtcaaactagacttccctagcgacagcgattcaacgaataagaaccaggccaacatgtagtgagaccgagagcatgaggcttcagtacctgtctactaacatcagatgcattagttgatgtcttgattagttgtagcagggaaccagcttccagtgcctcttgtaccgatcatcagcaagggagtgctagaggaggaggttatggtgagttttgtcgcgactaatggtgagcccacgactacggccacatcaaagctggtctggtggaacctcgtggagcagatgacgatgacgccgacatcctgcacctctgctgcgacgctgccgaccaggacgcgggcccctccgtcgcgcgcgctctacaagtctggatccatcatcgtgctcggcaagactgacttccttaggccagacatggatcccataaccagatggacagccacaaagaaaagtggcctgattagctacaagaagctcttgttccatggactcgatctctggaccgcactatcgttgcctcaacccctaggtcgtgctgccctctggcctcctcatcgtacaattcaccaacatctccaacgtaagtgcagcaggttcagtaatgaactcaaaagtggcatcagaatactctaagagttttttgttctttttgcctggatatataccgagggcaatgcattcaaaactcctatagatgacgaatcccatctctccctcttttcccggacatcgatcccagtctcttcttcaagcaagagatggagctttccttggtcgggctccaaaatgctaggaaaacatcacttgcagcagctcgcagcgacacccccgcctcctcatcatggaagctacaagaacactttgagtaggtgaagaggatttgcgacactaccacattgtctttggccatgcatcatctcagtgataagataacaagccaactagatatttcaaaattgactgacaagctacagtaagggaaggtagactcaactgcattgacaccaaaggagaagtatgaaacttggaaggagattaaaattatgagtttcagaaaaatagtttctccaatgtgggcaatgacattgcttagcttgtatgttagagttcatgtcaccatattaggcagaatctgacgcctttaatgtaaatggacacaagaccttcgttgcaatggatgattatcttgtcactgacaaaatcactgcattcatagtgcaaacgcaacatgcagcaactgaagtccttaaagaaaagcaaccaaaagactgtatgaaatggaccaagtattgcagacaatattacaaatattggacacgttcatggctctttctgaagatactcatggagaaattatcttgtacctgagaatcccccttatttttgcacaattgatggttgtgtcctgtagtggctttgataattcatcactcctaaacgattttagaaagctataccaactaatgtgtggaggacctgggcaaggggtggtagtcgcgctggttcgctatccacggcggcaagccgcctactcgaagatcccacctccgaggacgccgctacggggaggacatgggcactaatcttgaactaaaactaggggggtgtctatgtaagttaatactttctctcacatttgcatcaaaatttgttttccgataatcaacagatcttgacatgtttctatgtactttctctcacattgagagttttttagattcagtgcaagccatctttatttgcttaatgagtcatcgatcttgacacatttttcatattcatcatagtttttactcattctttacatgtttttgtccttttcagattcagtacatgtaagctttctttgcttggacaatctatttctctttacttggatattttcttttagattaagataggccacctttatttgcttaacgtgtggttgatcttgacatgtttttcagattaatcatatttttattcattcttgacatgcttttgtctgtttttatattagtttttattcattcttgatatgctttcgtctgttttctcagattagtttttattcattcttgacatgcttttgacttttttgaaatttagatcagtacatgtaagctttctttgctcgtacacctgaccccacatgtgttagcagtctctaggtcatgttcatattattcatccatctctgttatatagatagtcgacacatccatttatatctttttatagggctaatcattgagatatctcttcctcttggtcctcgtgaattttttgttcgttctatgatgagaaatcacaaattcatatctttttttttattttgggggcttcacttttttaaaaataaaatgtaaatatttggaccccgtacgtcgcgatcgcatccaggacggctggttccgcctacaaccacgtggacaacttcttgcccgacatcatctcccagcttgttccacctacaaccgcgtggacaacttttcacccgacatcatctcctagctcctcgcattcgccaacaagttctgctatgagggcttgaagccaacctacgacaatcgggtcacaaccatggtgttggctcttgacgacgcctgatccctcatcgacatcggcctctaggaggcctcccacctcctcgtcacctcgtgcctctagcattcctatgggagcccccaaagtcactcacccacctagacatcgcccgtgttgttatttggtggtcagtatgtcacaatatagtcagttttttttgcttatgttgttggtactgattttattggatgtgaatttatttatcctttcattgtatattggaattcatgacattatctacatatgtacatgcttacatatctattatatttttgtataaatatttttttgatagtttttaatttgtatggcaaagcaag

SEQ ID NO: 209570 - DNA, 4639 bp, Zea Mays
ccccatcctctctttctccctcgcgcttgactcccctgccaccccttcccgtctccaccccgacgccgaccgcactccgctccccgtccaccatcccagcgtgatggctgggaggaccgcgcctgccccctcccctccttctctctcacgccctactccctcgccgccccttcatcccagatctcgtcatgggcgctaccatgaccaacagttcggtggagcaggcgccgcacgctacgccatgggacggagcccgtccccacccgacaccgaccatctccaccccgagcccgtccgagaagtgagtgatttccatttcttcgattggatggcgtgcggtcgggcctccgcacctccctgtccccctcccctcctgcggcgatagcttcctcgaggagatgagcgtgccgcccccatgatcggtctacctccgccgcccccgcgcgcaccgcaaccaccacgcccctcgtgcaccttctcgcccgagaaggtggtttcctttggtgtccccacgtgtttttgtcgttgcaagttgaactcgccctttcatgcctgatattttgctcagactgcattggagaatggctacacaaagatcatgctgccaacatgtgcttctggaatagcatgccctatgctatctgcaactataaaggctaagctttaccagccgatgtcctgtatgtcgatgcacgatgggaggtacttgtggttcttcaacttcatggttgtctggcctagccgccatccgcccgcgcaaacgcggtacagctccactacagcagcaggaggcggtgacgtcgccaaaggctggcagatacttgatggctcttgataagaagcctattgcaactaaaggccaccacctttgttgtcctcaccctagccgaggacctcatctcccagattcagtggcgacaaaatggtccattagtggaaacaccaagcatcatggagagctgtttcgtcaggagcttcgaacgcgagccatagacggggagttgatgccactgggcttatgggctcttcttttgggcaccaaagcaaagagcagtggataatatttggaatggtcataagtcaaactagacttccctagcgacagcgattcaacgaataagaaccaggccaacatgtagtgagaccgagagcatgaggcttcagtacctgtctactaacatcagatgcattagttgatgtcttgattagttgtagcagggaaccagcttccagtgcctcttgtaccgatcatcagcaagggagtgctagaggaggaggttatggtgagttttgtcgcgactaatggtgagcccacgactacggccacatcaaagctggtctggtggaacctcgtggagcagatgacgatgacgccgacatcctgcacctctgctgcgacgctgccgaccaggacgcgggcccctccgtcgcgcgcgctctacaagtctggatccatcatcgtgctcggcaagactgacttccttaggccagacatggatcccataaccagatggacagccacaaagaaaagtggcctgattagctacaagaagctcttgttccatggactcgatctctggaccgcactatcgttgcctcaacccctaggtcgtgctgccctctggcctcctcatcgtacaattcaccaacatctccaacgtaagtgcagcaggttcagtaatgaactcaaaagtggcatcagaatactctaagagttttttgttctttttgcctggatatataccgagggcaatgcattcaaaactcctatagatgacgaatcccatctctccctcttttcccggacatcgatcccagtctcttcttcaagcaagagatggagctttccttggtcgggctccaaaatgctaggaaaacatcacttgcagcagctcgcagcgacacccccgcctcctcatcatggaagctacaagaacactttgagtaggtgaagaggatttgcgacactaccacattgtctttggccatgcatcatctcagtgataagataacaagccaactagatatttcaaaattgactgacaagctacagtaagggaaggtagactcaactgcattgacaccaaaggagaagtatgaaacttggaaggagattaaaattatgagtttcagaaaaatagtttctccaatgtgggcaatgacattgcttagcttgtatgttagagttcatgtcaccatattaggcagaatctgacgcctttaatgtaaatggacacaagaccttcgttgcaatggatgattatcttgtcactgacaaaatcactgcattcatagtgcaaacgcaacatgcagcaactgaagtccttaaagaaaagcaaccaaaagactgtatgaaatggaccaagtattgcagacaatattacaaatattggacacgttcatggctctttctgaagatactcatggagaaattatcttgtacctgagaatcccccttatttttgcacaattgatggttgtgtcctgtagtggctttgataattcatcactcctaaacgattttagaaagctataccaactaatgtgtggaggacctgggcaaggggtggtagtcgcgctggttcgctatccacggcggcaagccgcctactcgaagatcccacctccgaggacgccgctacggggaggacatgggcactaatcttgaactaaaactaggggggtgtctatggagacagaaaaggcaacagtcgactctcgcccagggcacgtgagtgacggtgtatttgggcggcccaacgcccgcaagctgccacatttcagcccacgcaaaccaagccaggcgaaaacccggcaccggtgcgccagcccagccacaggctcccaaaccgaccgggcggcgatggtgttggtgtcggactcggagctggtggagcggctgcaggaggtgctgcggtcgtcggacctcaacaccacgaccaccgctgccctgcgccgccgcctcgaggaggacttcggcgccgacctctcccacaaaaaggccttcattcgggagcaggtcgacctcttcctcgccgaggtcgccgccaaggccgagccgcaggagcccaaggaggaggagcccgaggaggcgccggtgcctaaggaggaggagccagaggagctcgagggggtggaggaggagggcgagggggaggacgaagaagaagaagaggaggaggaggaggaggaggaatgcgaggatgagaatagcagcggcgcccggaagaagcagcggggtaatgatggcaaaaagaggggtggtggctttacaaaattatgcagtctttcaccggcacttcaagagtttgtcggcgcctctgagttagccaggacagaggttgtcaagaagctttgggcatatattcgagaaaataatcttcaagaccaaaacaataggaggaagattttgccggatgagagattgaagaagatcttcaatgtcaattccattgatatgtttcaaatgaataaagctttgaccaagcatatctggccattgaattctgagggtcctgtctctcctgatagatcaacacccaaagagaagccacaaaagagagacaggagtgaaggaaagaagcaaaagggtggctcttcaggagctggatctggttttctcgtgccccttcaactttcggatgatttagtaaaatttatcggcactggtgagagcatgttatcacgatctgatgtcgtgaagaaaatgtgggattacataaaagggaacaacctgcaggcccttttatttcagtcgccttccagaaataggctgtatgcctatccactatggccaatagccagagttctaaattgcagcagcaaccagccaattactgtcagtaactggaaaaattctagggcacttttgacatgttatgttggacttcttgaaaaccgtcgtgaaagaaaataagagaacataatgcagtgagatgtctcctggctcccagcaaaagaattatttggagtttatagtcattgagactgatcctgtggaaatagtagatccttctgaccggaggaaaataatctgcgatgagaagctgaaggacctatttggagtggaaacattcaccggctttactgtttcgaagctgcttgcccctcattttaccaagacgaagtagcaacctgccatccacatcttctaaaaccaaaaaggcttgggacataaaattatctgtgcggtgtggcttctagtgcgttcttcccgagttcatggtccaccatttttcatgctcagggttgaggatgacattgctcggtctcctcagatgaccctagtggtcatggaaccgtaaagacaaggggggagcactagcgcttgtcgcctagggtttcagggttctccacttgccagtgaatctttcatcctttttagctcctgatatggatgaagtttgtagcactagcgcaaccgccttttgctgttccttcccactcacttggtaccggttgttcagaggacgccagtttatatttgtatggaccacctaaactgaagctgttttgtcatgtgggtggcatggcgaagtgggtcgatatcgcgacggttctgtaacgcgatcttgcgctgtttccaactgctggtgccatttgcctgtcagttcaaagttaaattgtgttcagattctgg

SEQ ID NO: 209571 - DNA, 1053 bp, Zea Mays
catctatgctccagcctcctcattctatgctcaagcattttcgcagaatctgacgcctttaatgtaaatggacacaagaccttcgttgcaatggatgattatcttgtcactgacaaaatcactgcattcatagtgcaaacgcaacatgcagcaactgaagtccttaaagaaaagcaaccaaaagactgtatgaaatggaccaagtattgcagacaatattacaaatattggacacgttcatggctctttctgaagatactcatggagaaattatcttgtacctgagaatcccccttatttttgcacaattgatggttgtgtcctgtagtggctttgataattcatcactcctaaacgattttagaaagctataccaactaatgtgtggaggacctgggcaaggggtggtagtcgcgctggttcgctatccacggcggcaagccgcctactcgaagatcccacctccgaggacgccgctacggggaggacatgggcactaatcttgaactaaaactaggggggtgtctatgacggctggttccgcctacaaccacgtggacaacttcttgcccgacatcatctcccagcttgttccacctacaaccgcgtggacaacttttcacccgacatcatctcctagctcctcgcattcgccaacaagttctgctatgagggcttgaagccaacctacgacaatcgggtcacaaccatggtgttggctcttgacgacgcctgatccctcatcgacatcggcctctaggaggcctcccacctcctcgtcacctcgtgcctctagcattcctatgggagcccccaaagtcactcacccacctagacatcgcccgtgttgttatttggtggtcagtatgtcacaatatagtcagttttttttgcttatgttgttggtactgattttattggatgtgaatttatttatcctttcattgtatattggaattcatgacattatctacatatgtacatgcttacatatctattatatttttgtataaatatttttttgatagtttttaatttgtatggcaaagcaag

SEQ ID NO: 209572 - DNA, 1774 bp, Zea Mays
tctcaaagtaaatagcacaagcgttggggtcaaatgagaatcttttttgttaattgcgaaaacgaaagagcccgtgtgaaccggagaggtgaggaaaagaggaaaagggagacataaattggaggccattatcaagaaaccatgagttctaggttcgcaatccctaatcctgatctcacttaagcgctcgtgagctctctccagtggctaaagattgcagatttgagttatagtccaagaaacgggtggtggtccgccatggaggtgaggtccgagcaagggctgatggcggggagggatctattcggtatgccaaagagcccgccggcgccggtttccgggccgccggcgtccgccgccatgcagagcgtgcgcatggcgtacacctcggacggcaccgctgtgttcgctccgatgagatcctcggccgcgacgccgtcttaccagccgcagggtgcagcccacggcgctagcatgtccgcggcgacaatcattggaggcaatggcgcggcagctgcgccgagcatgggggagccggtgcccaagaagaagcgcgggcgaccaaggaagtatgggcccgacgggtccatggcgctggcattggtgcctgtgtcggcggctacggggtcgccgacgacagggcagggttcttctgggccgttctcaccggctgggtcaaatctgacgaactctctgttggtagcctcgccggacgggttcaagaagcggggccggcctaagggttctaccaacaagccgcgcatggatgctgctggatcgtcaggagctggatttacacctcatgttatcacagttcaagctggggaggacgtgtcatcaaagatcatgtcgttttctcagcacggaccgcgtgcagtctgtgttctctcagcaaacggtgccatatcaaatgtgacgcttcgtcagactgctacatcaggcggaactgtaacatatgagggtcggttcgagatactgtcactgtcggggtcattcctcttggtggaggatggtggtcaacgcagtcgaactggagggctcagtgtgtcgttggctggtcccgacggtcgtgtgctgggcggtggagttgcagggctcctcgtagcagcttcgccagttcagatagtactgggaagtttcaattctggaggcaaaaaagaggcaaaaaagcatgctccttcaggacccacaccagcgccactgaaggtcgctcctccgacaacaaccaggatgggacccaacagcagcagccctccttcaagaggaggtacattgagcgagtcatccggtggcgccggaagcccaccaccgccgctgcatcaaggcatggctgctagcagtagcaacgaccagccgccgttcctgtccagcatcatgccatggaaatgatcctcttatgtagtagtataagtcagaagctttgagtagggaggtaaatttgtagctctactgtaggtttaaacctgaattcctgtgctacttaggtgtattgagctgtaacggatgtgatcatttgagagctaccaagtgttgtttagttaaatgttttaccaaggcatgtcgatctgagccagaagattcttgctatgaatttgttgtttgcgcttgacctttttttctgctgtagagaaggttgtggagccaaaggttctgcacaagaatacgttgaaagcatttggcatccttgatggcatgccgaaccattgaaggttccgtgacagacagatggcgtggctaagtttgtttatcatttgtaaaaaaagcaaacaaaaaa

SEQ ID NO: 209573 - DNA, 1140 bp, Zea Mays
aagacagagtgcaagtcatttcccaggcacaagatgaagccaacccacctaattttgaacaaatacctaataaccagccccctaaaaatgtggtccctaaaaggtgcaagaatttcacagttagcgaagatgaatgcctagtctcagcatacctaaacataagcaaggaccccatcatagggaccaaccagccaataaaaggttactggcaaaggataactgagtactttcacgagcataagagcactccttatgatagatcacagtcttctttgcaacaaagatggggagacattcagaaagaaacttctaggttctgtggattctatgtggaagtagagaggagaaagcaaagtggactcaacgttgatgacaagataaaagaggccatggcgatgcacgagcgtatagttggcacaccgttcaagtttatgcactgctggttaattttacgtcacgagatgaaatggaatgcattgcttgattcaatgaatccaacagatgctaaagaaacagaacaaaaggggacaaatatcatggaagagttgcttccccccaaaattgcacgcccaacgggaagagatcatgataagaatatgaagagcaacatcagctcaagctctttcactgcttgcattaatgtgctccaaaagttgtcaatggagcatggagcatttgaagagaggcaagatgctacaagtagggaggaagcaacacacatggtagtaaggtcggatcgcaaactggccctacaagaggaagttataataattcaaaaagcaagcctcgaaatccagcagcaaatgcttaagctacaagaagaagaacgtgaggagagggtgatgacaatggatgtaaacaagatggagccatgggttcgggagtactacatcaacaagcaaaagaagattgcagcctctagtatgaatgtagaaacatcgagtgcacgtgagccaagttaaatattagttcttctttaagttgttgctactagtatgtagactttaaatcatttagagaatttcttttcctagtatttgtgcaaatattgatatttctattatgttgtacaacaaaaaaactcaatggtatcactgtgtcatggattcattaagaccaatttggatgttccacttcatt

SEQ ID NO: 209574 - DNA, 1340 bp, Zea Mays
ctttgttgttgttgttcttctgtgctctgttctgatattgtgttgttaatatatgttctgatattgtgctgttaatatgtgttctgatattgtgttgttattatgttcaaattttagaaagtatgaagaaatatgcccacctctggtagaagaactctgttatattactgactattcatacaccaaggaagaggttttgcaaatggaagcttctgttctgaataacttgaaatttgagatgacagtacctacagcaaaatgtttcttaaggagatttgtacgtgttgctcaagttcctgacaagggctcatctctgcatcttgagttcttagtcaactacatttgtgagctgtcacttctggagtacagcttactttgctatttaccttcaatggtagctgcctcttctgttttcttggcgaagtttatccttatgccaataaaaaacccatggaattcctcactttcttactacacgcggtatacaccatctgagttgcgtggttgtgtaagggtactgcaccggctcttccgtttgggccctggaagcaatcttcctgcaattagagaaaaatacagtcagcataagtacaaatttgtagcaaagaagtactgcccacagtcaatccctactaagttcttccaggatctgacaagttagaagccaagattacttctagttactcaatgaaaccttcctgaggtacttagtgtgatactatgatattgatttgacagatagttttgaatgcaaggcatgcgcgcggccttgcgtttagcagataaacaggttcaagtaaactgtatgtcacttgtggcaatgttgtttcagtgttgtgctttgattgcttccagcatcgtcttatacgttgctgttgtggtcttctcacgctgtctagaacttttattgtatagttctggaccttgctcataacaagggtagatagtttggctaaagataaagtgtactcattctctcattgttatctacgtgttgcttctgtattctgaagattctgctctgaaacccagcaaatgtattatcaggcatcagaatagtagagtctgagtcaatttttgctattgggaataagtgggagggtaactttggaaagcaaccgatcaggttatctttgctaatccaaaagttatttcagggttatgctttaatatgtctttttactgataattatgctaatgagatcttcagggtcttggacgcatggattgcaaacttgtatattagcagtacatgtcatttgggtatttaaagtcttaagtttgtgttgtctaaatttctctattctacacatccacctaaatttgcatggtacagttaa

SEQ ID NO: 209575 - DNA, 2591 bp, Zea Mays
gttaatatatgttctgatattgtgctgttaatatgtgttctgatattgtgttgttattatgttcaaattttagaaagtatgaagaaatatgcccacctctggtagaagaactctgttatattactgactattcatacaccaaggaagaggttttgcaaatggaagcttctgttctgaataacttgaaatttgagatgacagtacctacagcaaaatgtttcttaaggagatttgtacgtgttgctcaagttcctgacaagggctcatctctgcatcttgagttcttagtcaactacatttgtgagctgtcacttctggagtacagcttactttgctatttaccttcaatggtagctgcctcttctgttttcttggcgaagtttatccttatgccaataaaaaacccatggaattcctcactttcttactacacgcggtatacaccatctgagttgcgtggttgtgtaagggtactgcaccggctcttccgtttgggccctggaagcaatcttcctgcaattagagaaaaatacagtcagcataaggttttgctcagagcaatgtcagagcacataagaccctgccgattcctctgatcatttgctgctgctcaaagcattcatcaagattttactcgtcagggttagctaaggggaggaggaagatttgtgtcacaatgcaaggccgctgatgctttgccatgtggtgaagtttcagacagatcgattcagctagcttctttccatgattccatccacggagctcagctagctcggcatggacttcagccctcaaagaaagagcgccgaacgcaaccgcggcagcttcgaacacgatgacagtgatgatgacatcagagctgaatccaccgcctctaataagccatctgcgcattcgcacgacagcaccaaatccaagcccaagacgagccatggcggttcaacccgaagtagctccgaaccgacggcgggcaacaataatgctgacgccaccagcttggacagcggcggggcgaggaggagcaacagcatggagagcagcagcaccgcctcgggcaccacgccggccaacgtccggcggcacaccggcggcgacagccggtgggacgccatccagctggccaccacgtcccaggacgcgccgctgaacctggcccacttccggctgctcaagcgcctgggctacggcgacatcggcagcgtgtacctggcggagctccgcgcctcgcgggccttcttcgccatgaaggtgatggacaaggcgtccatcgtcagccggaacaaggtggcccgcgcgcagacggagcgcgagatcctcggcctcctcgaccaccccttcctccccacgctctacacgcacttcgagacggacaagttctactgcctcgtcatggagtactgcagcggcggcaacctccactcgctccgccagaagcagcccggcaagcacttctccgagcccgccgccaggttctacgtcgccgaggtgctgctggccatggagtacctgcacatgctggggatcgtgtacagggacctcaagccggagaacgtgctggtccgggaggacggccacatcatgctctcggacttcgacctgtcgctgcgctgctccgtgtgcccgacgctggtcaagtcgtcgtcgtcggtgcactccaccgggaccggcagaggggtggacgtcgcggacggcgacgtcatcaccgccaaccaggggtgcatccagccgtcgtcattcttcccgcgcatcctgccccggcgcacccggaagccgtccaagagcgatctggggctcagcggcccgatcgcggtggagttcaacgcggagccgacggacgtgcggtccatgtcgttcgtcggcacgcacgagtacctggcgccggagatcatccgcggcgagggccacggcagcgcggtggactggtggacgctgggcatcttcctctacgagctcctgcacggctccacgcccttcaagggcgccggcaaccgcgccacgctgtgcaacgtcatcgagcagccgctgcgcttcccctcgtccgacggcgcgcccggggccccggcggtcagctccgtcgccagggacctcatccgcggcctgctcgtcaaggacccacagaagaggatcgccttcaccaggggcgccacggagatcaagcagcacccgttcttcgagggtgtcaactgggcgctggtcaggagcatgaccccgccgttggtgccggaccccgtggacttcctgcagtacggagctgccaaggagaagaaggcctccgacagcagtacaacggcggccgtcgaggcggcgccggctggtcccgtcggaagccaaaactccggcgagtcttacacggatttcgagtatttctagctaggacgtactgtcgacatactacatattcttactaatgtaaaaccatatatacaagattagattaccttgaacgcgatcagcctgcctcccacacgccctcaagtcaccagatttttttttttgccgcttgtgtgatgatccgacgagatcgccgaaacccacatgccgaggataggatgacccgtggaccgcgcgatgcgccaccaccgcgacatgag

SEQ ID NO: 209576 - DNA, 2425 bp, Zea Mays
tagaaagtatgaagaaatatgcccacctctggtagaagaactctgttatattactgactattcatacaccaaggaagaggttttgcaaatggaagcttctgttctgaataacttgaaatttgagatgacagtacctacagcaaaatgtttcttaaggagatttgtacgtgttgctcaagttcctgacaagggctcatctctgcatcttgagttcttagtcaactacatttgtgagctgtcacttctggagtacagcttactttgctatttaccttcaatggtagctgcctcttctgttttcttggcgaagtttatccttatgccaataaaaaacccatggaattcctcactttcttactacacgcggtatacaccatctgagttgcgtggttgtgtaagggtactgcaccggctcttccgtttgggccctggaagcaatcttcctgcaattagagaaaaatacagtcagcataagggttagctaaggggaggaggaagatttgtgtcacaatgcaaggccgctgatgctttgccatgtggtgaagtttcagacagatcgattcagctagcttctttccatgattccatccacggagctcagctagctcggcatggacttcagccctcaaagaaagagcgccgaacgcaaccgcggcagcttcgaacacgatgacagtgatgatgacatcagagctgaatccaccgcctctaataagccatctgcgcattcgcacgacagcaccaaatccaagcccaagacgagccatggcggttcaacccgaagtagctccgaaccgacggcgggcaacaataatgctgacgccaccagcttggacagcggcggggcgaggaggagcaacagcatggagagcagcagcaccgcctcgggcaccacgccggccaacgtccggcggcacaccggcggcgacagccggtgggacgccatccagctggccaccacgtcccaggacgcgccgctgaacctggcccacttccggctgctcaagcgcctgggctacggcgacatcggcagcgtgtacctggcggagctccgcgcctcgcgggccttcttcgccatgaaggtgatggacaaggcgtccatcgtcagccggaacaaggtggcccgcgcgcagacggagcgcgagatcctcggcctcctcgaccaccccttcctccccacgctctacacgcacttcgagacggacaagttctactgcctcgtcatggagtactgcagcggcggcaacctccactcgctccgccagaagcagcccggcaagcacttctccgagcccgccgccaggttctacgtcgccgaggtgctgctggccatggagtacctgcacatgctggggatcgtgtacagggacctcaagccggagaacgtgctggtccgggaggacggccacatcatgctctcggacttcgacctgtcgctgcgctgctccgtgtgcccgacgctggtcaagtcgtcgtcgtcggtgcactccaccgggaccggcagaggggtggacgtcgcggacggcgacgtcatcaccgccaaccaggggtgcatccagccgtcgtcattcttcccgcgcatcctgccccggcgcacccggaagccgtccaagagcgatctggggctcagcggcccgatcgcggtggagttcaacgcggagccgacggacgtgcggtccatgtcgttcgtcggcacgcacgagtacctggcgccggagatcatccgcggcgagggccacggcagcgcggtggactggtggacgctgggcatcttcctctacgagctcctgcacggctccacgcccttcaagggcgccggcaaccgcgccacgctgtgcaacgtcatcgagcagccgctgcgcttcccctcgtccgacggcgcgcccggggccccggcggtcagctccgtcgccagggacctcatccgcggcctgctcgtcaaggacccacagaagaggatcgccttcaccaggggcgccacggagatcaagcagcacccgttcttcgagggtgtcaactgggcgctggtcaggagcatgaccccgccgttggtgccggaccccgtggacttcctgcagtacggagctgccaaggagaagaaggcctccgacagcagtacaacggcggccgtcgaggcggcgccggctggtcccgtcggaagccaaaactccggcgagtcttacacggatttcgagtatttctagctaggacgtactgtcgacatactacatattcttactaatgtaaaaccatatatacaagattagattaccttgaacgcgatcagcctgcctcccacacgccctcaagtcaccagatttttttttttgccgcttgtgtgatgatccgacgagatcgccgaaacccacatgccgaggataggatgacccgtggaccgcgcgatgcgccaccaccgcgacatgag

SEQ ID NO: 209577 - DNA, 2218 bp, Zea Mays
accctgtccgtccccgaaaagctcatcgtgcttataaatacaggacccacccgtatcgtcgtccgcttccgaatttccgatcgagctccagcccccaccggataccaccgcctccaccaaccgattccgttccgtccccccggccccgacctcgtcaccaccggtcacgctcgagcgggaggcttctctcgccacccaccagcggattcctacagctcccgcgccgatcgcgtcgcggacccgtccggagggagaggtgatgataaaggatatttgctgaccaaacttgcagtatttctccttaaggaaatagaaattggcgtcatgtcatatagaaatatgctctggacacatcagtccgttaatcctgaatgggagcaaggacatgtccaagtccaaccaagaagttcctattatgcaggcactgtaagtgattcatccaacctgggcatgcaagttgctgttggtgttccagtaaatactgttaatgttggtatatgtgatctgtggaatcatgagcgcctgcctgttcataattcatacccacatgccagtgttacatcgagatttgtcctcccaactagtatgtacaacccttgcatgccagcagcagctgtcaacatatatattcctcagactcaaagctttggactgggcaatgtgctaccaccatctttacatagtcaagtttccacaggaactattgatgagaataacagcagtttcaattttggtgatagtgccattggatccatgaaaaggaaaaccgcagtagttgccggaaaccatcacattcttcatggatttgctggctcaagttcatctgttcatgtccctcagaatcctgtgtatgggccatggaatgcttcatctcaatcaaattgtttacccagttctgcagcttcaaacctaccagaataccacaatagtaatgggtggccgttcttagaagaatcttctgcaaatgcttcaaacagtttcacttcagtggatgcttgtccagagttggtacctcatggtaacaatttatatccagcttgtcacataatacagtgcaatacatgggttccacagactgcaagtcatggagtaccacagtggggatatggtaatgtcatggtcaatcctccaggaaccgtagacatgccgaatggaaatattcaggattatcaagctgggcattcttctattcatgggccactacctcatttctgccagattcctttgcgtagtatgcaagtacctcaaatacaagtaccccatcaacagttcatcggtaacaatgtggtgcatggtttaaatccttcagccgcaggccttccgttagatccaagaatgctggctttcccattcaatgatgagcacacttttgggcatcaagtgcatccacctctgataaaccaagccaacaatggggctttaagaattctgccatatcagatgctacagtgatggatcattcaaggatttatgaagcaggacatgttattgatgaacatagagatatgcgtttagatgtggataacatgacttatgaggagcttgtagcattgcaagagcagataggtgatgtcaatactggtttgacagaaagctatatccaagaaaacttgaggtccacttttcatgttccaggagcagctagcatttctgatcagttctgtgagctttcgttagagaacgatgcttgcataatatgccaggaggagtatgaagctagagaacttataggagcccttgaatgtggtcacaagtaccatgaggattgcataaagcaatggttgatggtgaaaaacgtgtgccccatctgcaagacaacagctttgtcatcagatagaaggaatggatgatcttcgccagtaacattattggttatttaccgcgtggcaagttagcgcgattttgtatatagacagggttgcctttatttgccgtcccccttcgctgtggacataaactgtacagatattattttgtaggatattttagacgttaaatggcaccatggtgtgtaaggctcccatggttgccttggtagatcctcccttcctttacattgtatttatctttactcttcaaaaaagaagcccgaaaacatgtatattttggaagtgaaagaaccgattttttttcttcaattctggagcttttttgctagagctgcatgagatttgccgctgaaatagggacttggttatgtttttttttcgctttctac

SEQ ID NO: 209578 - DNA, 820 bp, Zea Mays
tggcactccataccagcgcgcagcatcattcagatatcccaccactactccttgtttctagtataaataaatgtgcatccaagtcactgatgaggagcaacaagctggagtagctagcaactcgagggatgaagactagatgatgataggctttctccttctgtgccactcataaaactgctagctagctagcaccttgttgccaagcaatgcaagatctctctgctgagatcgatctgaatacctaaaatatctatccgaccggtcatcatctcgatctaaagcaggataacaagatggcaaaaacattcgacgtggtttcagcgcacggccatcagctcaaaatggcgaccttcctcttctacgcaaacaaaactatcatcaaagcttcgcacacaagcttgcaggggtcacagtatcatcctagcctatgaaccggtgttatcctaattgagcttttcttttcgtcaaaacatccttgacccctcttccctagaggttggctcttacctccgtttttctggtttctcgtgccagaattaacgttcttgaccttgtaaggccctccttctatgtctacatcctcctcgcacctgatgtttctttctttcttgttacatgcgggatcagtctcatcattgccatgtttgccagactcccgcgtctacctactttctgctccattctatccctcctgagctagttgttgatcccatgtaataataaccatgtttggttgatataaaaaaatgttagttttgtttggtggcgttgaaattatttctaatttatagtaagagtagttcagtttgtgttatct

SEQ ID NO: 209579 - DNA, 719 bp, Zea Mays
gggagaaggaaccaaagctagagacaaccgctgcgtaaacgaatccatcgccatggcgtctcgtctcgttgcggcggcggcctcctcctcctccctctcctcagcgtcccccctcgctcgcctaatctctcgccgcggccttgccggtgccgcagacggccatgggtctgcgaaggtgcccttgtggaaagatccgttgagcccgagcaagtggaaggaagagcactttgttctagcaagcctctcaatgtggggggttattttttatggtggttacaagctttttagtggaaagaaggaagccaagactgaggcggcatcaccacaggcataggtggcggagatggagttatacccgtatctgtggcctggcaacaatgttaaataaaaggaatgctttatgttgtgctttcaagttgataaattgtggcaacaggagattttgctttacgtaggcaatatattgagaagctactcttactcatccaccatgaataatctttgctgcagtggagcttcatgtcggcgaacaatgcaaacgttgtacttctttcatgcgattgagtagttgatgttttacttctgttgccaccaacagttgaacgctgtacttgcagattgataagatctccgtgctttctagtttgcgttgttactgatgaatttagcaaacgttttattggtggtattatttgaaaattggagtattggtagggatg

SEQ ID NO: 209580 - DNA, 1759 bp, Zea Mays
ctcgtctcggctttgtatatagcccggaagcctgcttgcgcacaacaacaactctgcatgactccactagtccaccatccgccgcctccccttgcgggctgcaatggacggggtatttgtgctagagctttagaggcgcgcggcgggggtgcgagtgcgagtgcggccgccgacgcgcgggcgaaggaggcagcgggatggggctgctgtcgaaccgggtggagcggtcggagatcaggcccggcgaccacatctacacctggcgggccgtttacgcctactcccaccacgataacagaggtttttgaccctcatttaggaagcttagacgacccttctacagtgtcacaactgtgctatagggacagtgtgtctccacagtgagtgcctactgttggctgatgccatgttctactactccaactccataaattaaagtggtcctttatggtaatttagtgaggcccatatcttgggaggacaagatctgggttctgctgcgctacctgcacctgcacgaaaagctgctcgatttgttggaacaaccctgtttggcttcttctcttgcatcatacaccctctctgggctctgaattactttgccaactaatagcatttttacatgttccagcaaagcaaattatccattactaagagaacatcagcatgttgtccacaccagggcaatatgtaaagcaatgatatatcgctaactgccgtttcgaaattccttttccgttgcttctcaagcaattttctcgtgtatgttcaggcatctatgttggaggaagcaaggtggtccattttacgcgaaagaaagaaaccgaaagttcagattcatcagacttcacctccagcttaatctcaggggttccgtcagagtgcccaacattccctgactgtggatttcagctgcccagcagtggcgtcgtcctcacttgcttggactgtttcgtccgcagtggctccctctactgcttcgagtatggggtgccatctgcggttttccttgcaaagcttcgtggggggacctgcaccactgccgaatcagacccaccagaggttgtcgtccatcgagccatgtgcttgctccagaagggctttggaaattacgatatcttcgagaagaactgtgaagactttgcactctactgcaagactgggcttctaccggtcgaggatcctggcattgggactagtgggcaagcttcttctgccatcggtgtgccgttggcagctcttctgtccaccccgttcaagcttctggctgctggcccgcttggaatggccaccgtcacagctgggatgtactgtgctggcagatacattaccgacataggagtaaggaaggacgtagcaaaagttgaggtggagaaattgtcatcacaccccggtttccaccttgtcgaagacgaaggatcagttaacaagcggtcagaaaagccgaagtccttgctccctatgaagaggaaacgaggaaggtgagtgtgaaacacagctttggggtgggtggttgggtggggcgaactacactgcccttcaattggtgccgaattgtggataatttgggatatagtatatgctccactgtaataagactggatggtatagatatctgtcttcagaatgtgctctaattgggttaggcgcacgcgcacccctcacatggtcaattgtaactcataaatttaatcatcaaatcactatataatgtagattttgttctatgttgtttccagtcttgtgctgcaattaataa

SEQ ID NO: 209581 - DNA, 2481 bp, Zea Mays
cccggcggccaagctgtccatgaatgaactagtcacaactcacaagtacgggagagaaaaagaagaagaagaaaaatacacaaggaataattcaacagctaggtactagtgtagtagtagtactacgtaccaaaacgaggtcgttgccgtgttgcgtggcctgaggttgtcctcaacgcaaaggcaaagccaaccagagccagccagccagccagcggctccatcccctcctgccgtgctgccaggagcttggcatctgcggctatgcaatctcggccgtcctgatcgagcagcgcggggccgagagatggagggtgtttcgtcgtctgccgccggaggttcttcttcggcagcagcggtgcagggcggccggggccgggagcccgggcccgggagggtgggcgcgaccaacatcggcaggctgcggcaggggaagcagcagcacgccacgaggcccggcgtcggggccattagcgtcacgtcctggcacctccgggtgttcgcggccgtcgtcgccctcatgggctgcctcctgctcgccgcctccctcgccatgtccgcgctccaccaggtacagttcaggaacgccgccatctccaggaacttcaggggcctccaggagcttaagcaaagcatcgtgaggagggaaccagtggagcagatcatgcatgcaaggcttctgcaaatggccacttcagctctcacaaagaacggctctgaatccgaggatttcgcgctatgggaagagccctacaagcaagcgcggaaatggaagccctgcgctgcgaagcatagcttggctgacgaagaccctgatgatgagaccaacaacggtttcgtgctggtcagcgcaaacggtggcctgaaccagcagcgtgtcgctgtgtgcaatgctgttgtcgtcgccgctctgctcaatgccacgctagtagtcccacggttcctctacagcagcgtgtggaaggacacaagtcagtttggcgacatctaccaggaagactacttcgtgaagtacatgaagaacgatgtccgaatcgtgaaagaactgccagcccgccttcggtcgctggacctcgaagcaatcggcagccagatcactgacatggagatctcgaaagaggccgatccatctgagttcgtcaaatcgatcctcccaatccttgagcaaaacggcgtcgttcacttcctcgggttcggaaaccggctgggcttcgactcggtacctgttcatctgcagaggctgaggtgcagatgcaacttccacgctctcaagttcgtcccagagctccagcgagcaggctccgtgctggtccagcggctgcgccaggtgggtgggatgcagaccgagatggacaagcagctgttcggcaacaacatgctcgaccaggccttcgccgagaaggacgacggcgccgacaccggcaccggcaccgccacgcccaacaggtacctcgccctccatatgaggttcgaggaggacatggtggcctactcgctgtgcgaattcggcggcggcgaggaggagaggagggaactgcaggcctacagggagacccacttccccacactcgcgctgcgctcccggaacaccacggtttcgccggaggagcagcgtagcctggggaggtgcccgctgacgccggaggaagcgggtctcgtcctctccgcgctcggctacgaccgccggacgtttatctacgtggccgggtcgcagatatacggcggcacgccacggctgcggcccctgacgcggctgtacccgaatctggtcaccaaggaggataccctcaccgccgacgagctggccccgttcaagaatttctcttcacggcttgcggccttggacttcatcgcgtgcgcctcggcggacgtgttcgcggtgacggactccggcagccagctgtcgtcgctggtgtccgggtaccgcatctaccacggcaggggccgcgcgccgacgctgcacccgaaccggaagcgctacgcgcaggtgctttccgaggaagggagcattgcgtggggcgggttccagaagagggtgaggcagatggtggacgagtacaagcgggtgagcccgcgcccgaggggccggagcgtctacaggcagccgaggacgccggggtgcatgtgcagggccggcggcgacggcagcgtccacttctgacgcacgcgtttgcagcagcgtcggtttcttggggatcaagcggccggctgctctgttccattaattctttcctacacgtttttttttttgcatagattttatgctccttaactttggtgggtccttttagcagctcaggatacgtggcgggataggtgacaaattttgagtcctacggcatggttcttacttcttagaggttctaaacacagctatacgcctttaccgacaggtttggtgtacatagggaaataagtacaaaatgttgagccgcaaaacaggcggccggacggtccgcggtccagacggtacgcgcctgt

SEQ ID NO: 209582 - DNA, 1006 bp, Zea Mays
gtcgcccctaaaaaaatggcagcagcctttccaccaaaaatggtaacggcagcaacccccctccatgtttatgagatccgataaatcctccaccaatcaccagtgccaaatcagttccttgccgtgcctaattcaccttcccatccttggcactagcggattcgtagcctccagtccttcagcctctccatccgatttggcgcaaatgcctccagggaggaaggggcaacgatgcacaagggaaaccccagggaacaaaaggccagagccacgtattcaagctgctaagtttgcatgagagggtggtattcacgtttttttgtctttctcttcaaagctttctcctgtcggaagcagttatcaagcttgatttcaaggaaagttgtgtgaagaacaaacttaatcgtaaaaatgtacaatatcaacaatgcacatgctctcagtcctacattgcaaaggctattatattgcacaatttaacatggaagaaatggtagcagcaccatttcaggatggacaacaaccaaaatctcctacagaagttgtttctaatgtgctactgggctccagtgtgttcctacacaatgttggtcttcagtctgcctccaagaaaagctccacaacaactgtttcggcaatggctcaacaacttcaggatgaactagagatcgagaagcaagaaaaagatggccttcaggaagaagtggaaaccttgaaggcttaagcacaagcatctcaggagaccactgatagtatgaagaggtcgatggaagaaaataacaacctccttcgtctactattaagcttcaatcgaggccaagtgcctccatcttaagtctggttgaccactataggacctgcagccttatggctgctatagtggctagcaatagtagctctagatttgaagttatcggatcattttaaattatgcttaatgtttaatactttgagttgaagttattggatttgttttggattttaagttaaaggatttgcagatata

SEQ ID NO: 209583 - DNA, 797 bp, Zea Mays
agctgttcagcatattgatactaaatttcacaagaagtttcatctctgaaagacacaatatcacggaaagatatggaaatcgatcaactcctgaagaacaaagccaaatctccaggttcatcaatagatagaaatgacagtcgccaacagatccggcgactatcagggactggatcaagtgaagccgaatgtgaagataacatgtctgatgatggctgctcagtagcaggaaccgagtattcagtaggtggtgcttcagaggcgacagcagaacggatgcagaaggccccatcaaggatagccaggctattccacacaaagaatggacagcctgcaaactccaaaccaaaaccaagggagtctgctctgaaaccaccaggtcgcacgacatctacaggaggaagccaggcgacaggaggatctttagtgaaaccccctaagaggcggtagagaaataaagattccatcatctaggatttgccatgttgatgggggtatgtgacgatgtcactgtaacgggttcacttgtcatcaccatgatgagcagccgactgtaggctggatgttgtatgagctggacgccatgaggttggtttctcagccctgctgaccatcacgttagttatcgactatgttactgaccatcatcaactttttatctatactatacttaaagcaccagtttcaacggtcgtcccacgtcatctttttacagataacctctcacagctatctcaaattaatctgttgcacgcctataaatggccaaacggcggcccggcacgggccagacgccc

SEQ ID NO: 209584 - DNA, 3500 bp, Zea Mays
gaaaagctacttgagcctgagcgctgcgcagaattccgtccggcacgaggtggacgagaggagggataaggaacagaagccttcgagctcacgctgatccgcctcccgcattgccttgaagcctctcgattcgggcggacccgagctgccccgcgcggagggctcgatctgggcccagatcggccagcatttcactcccgtgcttgcaagtgcgcgtgcgcggtgaggcactgaggcatggggaaggtggaagacgagtacgagtcccatgcagccaaccggcggggtgaggtgatagattggctcgctgagttgctgccggagttcgacttgccgctggattcctcagacgaggagctgcgggagtacctcattgatggcacggcactatgttacattgcagagaaactaatgcccggcattcaggaggaaatgtggggtggtaatgcatgggatcagaggtcgaacgtgaagaagttcctctattttgttgcggagatggggctgccaggcttcagtgtcaaggatctggaggaggggtctgtgtcttctgtggtggagtgtctcttggctctaaaggataatgtgactacaggattgggtcaaaacgttacaaacaatgctgctaaaacaccccttagaaggaaacttgaacttgaatctgatgggcctataatttcagttatgacaccagggagaagacctggggaggaaagatggaaaggccactgggatcctaagtctcaacaaagaagtattcttcattctgcatgctcaccttactttgcaggacaaaaggtccatgatgctttccaacttaagcgaggttcctacactgatcttcctgctgccaaagtttcagagatgatgcatccaagaagtctagataatgcccctactcaatcacttcttagagttgttaatggcattctagatgagagcattgagaggaaaagaggagaaataccacatcgtgctgtttacttgctaaggaatgttgttcaagagattgagcaccgcattgctattcaagcggatcacataagaaatcaaaatagcatcatcaagactcgggaagacaagtatcgttcaaaaattaaagcactcgagacattagtaaatggcacaaatgaagaaaatgagatgacagtagatcgacttgagctagttgaggtagaaaaatcaaaacttgatgagaaaagaaaactaggtgaacaagacatggttcggctgatgcaagaaaaggagaatgcagaaaatactattgcttcccttcagcaagaaatacaggtcttgagtaggatgcatgaacagtaccacgagagaaaggaaacagaagccaggcagatggaggaacacttggctatgagacttaaggaggctgagtttcttttaatgcaatcagaaaagaaagttgaagaaattgaatctgtttcccaactgaaatctcaactttggaccaggaaggcaaacattttccagagttttatggataatcaaaaattgtccattaaggacataaggatatcatctcagtccattaagcaggaaatgtttgcccttcaaatgaaatggatagatgaaatatctagcattggacgtgagttgaaaggcttggtagatgctgctgacaattaccataaggttcttgctgaaaatcagaagctatttaatgaggtacaggaactaaaaggcaatatcagggtttattgtcgtgtcagaccatttcttcctggtcaagatggaaaaacaaccattattgattatattggtgaaaatggtgagattctcatcacaaatcccttcaagcaagggaaggatgtgtgtcgaatgttcaagtttaataaagtgtttaatacacatgcttctcaagctgaggtattctctgatatccaacctctgatcagatcagttcttgatgggtttaatgtgtgcatttttgcctatggtcaaactggatccggaaagacttacacaatgagtgggccaggcacatcaaaagaagattggggtgttaactatcgagctttaaatgacttgttcgacatctctctaagtagaaggaatgctttctcatatgaggtgggagtgcagatggttgagatttataacgagcaagtgcgggatcttctctcaaatgatattgcacaaaaaagacttggaatttggagtacatctcagcctaatggacttgttgtccctgatgcaagtttacatccagtcaaatcaacactagatgtgctacagttgatggaaattggacaaacaaatagagcagttggatcaacagctctgaatgaaaggagcagtcgatctcacagcattctgactgtgcatgttagaggggtggatctgaagaatggatctacttccagaggatgtctacatctaattgatcttgctgggagtgaaagagttgagcgatctgaagcaattggagatagattaaaagaagcacagtatattaacaaatccctctctgctcttggtgatgtgattttttctttggcacagaaaaatgcccatgttccttatcgaaacagcaagctgactcaagttctacagagctctttaggtgggcaagcaaagacactgatgtttgttcaaattaatccggatactggatcatattcagaaacaataagcactttgaagtttgctgaaagggtttctggagttgagttaggtgctgcaagaagtaacaaagagggtaaagatataaaagagctgctagaacaggtttcatctctgaaagacacaatatcacggaaagatatggaaatcgatcaactcctgaagaacaaagccaaatctccaggttcatcaatagatagaaatgacagtcgccaacagatccggcgactatcagggactggatcaagtgaagccgaatgtgaagataacatgtctgatgatggctgctcagtagcaggaaccgagtattcagtaggtggtgcttcagaggcgacagcagaacggatgcagaaggccccatcaaggatagccaggctattccacacaaagaatggacagcctgcaaactccaaaccaaaaccaagggagtctgctctgaaaccaccaggtcgcacgacatctacaggaggaagccaggcgacaggaggatctttagtgaaaccccctaagaggcggtagagaaataaagattccatcatctaggatttgccatgttgatgggggtatgtgacgatgtcactgtaacgggttcacttgtcatcaccatgatgagcagccgactgtaggctggatgttgtatgagctggacgccatgaggttggtttctcagccctgctgaccatcacgttagttatcgactatgttactgaccatcatcaactttttatctatactatacttaaagcaccagtttcaacggtcgtcccacgtcatctttttacagataacctctcacagctatctcaaattaatctgttgcacgcctataaatggccaaacggcggcccggcacgggccagacgccc

SEQ ID NO: 209585 - DNA, 3471 bp, Zea Mays
gaaaagctacttgagcctgagcgctgcgcagaattccgtccggcacgaggtggacgagaggagggataaggaacagaagccttcgagctcacgctgatccgcctcccgcattgccttgaagcctctcgattcgggcggacccgagctgccccgcgcggagggctcgatctgggcccagatcggccagcatttcactcccgtgcttgcaagtgcgcgtgcgcggtgaggcactgaggcatggggaaggtggaagacgagtacgagtcccatgcagccaaccggcggggtgaggtgatagattggctcgctgagttgctgccggagttcgacttgccgctggattcctcagacgaggagctgcgggagtacctcattgatggcacggcactatgttacattgcagagaaactaatgcccggcattcaggaggaaatgtggggtggtaatgcatgggatcagaggtcgaacgtgaagaagttcctctattttgttgcggagatggggctgccaggcttcagtgtcaaggatctggaggaggggtctgtgtcttctgtggtggagtgtctcttggctctaaaggataatgtgactacaggattgggtcaaaacgttacaaacaatgctgctaaaacaccccttagaaggaaacttgaacttgaatctgatgggcctataatttcagttatgacaccagggagaagacctggggaggaaagatggaaaggccactgggatcctaagtctcaacaaagaagtattcttcattctggacaaaaggtccatgatgctttccaacttaagcgaggttcctacactgatcttcctgctgccaaagtttcagagatgatgcatccaagaagtctagataatgcccctactcaatcacttcttagagttgttaatggcattctagatgagagcattgagaggaaaagaggagaaataccacatcgtgctgtttacttgctaaggaatgttgttcaagagattgagcaccgcattgctattcaagcggatcacataagaaatcatcatcaagactcgggaagacaagtatcgttcaaaaattaaagcactcgagacattagtaaatggcacaaatgaagaaaatgagatgacagtagatcgacttgagctagttgaggtagaaaaatcaaaacttgatgagaaaagaaaactaggtgaacaagacatggttcggctgatgcaagaaaaggagaatgcagaaaatactattgcttcccttcagcaagaaatacaggtcttgagtaggatgcatgaacagtaccacgagagaaaggaaacagaagccaggcagatggaggaacacttggctatgagacttaaggaggctgagtttcttttaatgcaatcagaaaagaaagttgaagaaattgaatctgtttcccaactgaaatctcaactttggaccaggaaggcaaacattttccagagttttatggataatcaaaaattgtccattaaggacataaggatatcatctcagtccattaagcaggaaatgtttgcccttcaaatgaaatggatagatgaaatatctagcattggacgtgagttgaaaggcttggtagatgctgctgacaattaccataaggttcttgctgaaaatcagaagctatttaatgaggtacaggaactaaaaggcaatatcagggtttattgtcgtgtcagaccatttcttcctggtcaagatggaaaaacaaccattattgattatattggtgaaaatggtgagattctcatcacaaatcccttcaagcaagggaaggatgtgtgtcgaatgttcaagtttaataaagtgtttaatacacatgcttctcaagctgaggtattctctgatatccaacctctgatcagatcagttcttgatgggtttaatgtgtgcatttttgcctatggtcaaactggatccggaaagacttacacaatgagtgggccaggcacatcaaaagaagattggggtgttaactatcgagctttaaatgacttgttcgacatctctctaagtagaaggaatgctttctcatatgaggtgggagtgcagatggttgagatttataacgagcaagtgcgggatcttctctcaaatgatattgcacaaaaaagacttggaatttggagtacatctcagcctaatggacttgttgtccctgatgcaagtttacatccagtcaaatcaacactagatgtgctacagttgatggaaattggacaaacaaatagagcagttggatcaacagctctgaatgaaaggagcagtcgatctcacagcattctgactgtgcatgttagaggggtggatctgaagaatggatctacttccagaggatgtctacatctaattgatcttgctgggagtgaaagagttgagcgatctgaagcaattggagatagattaaaagaagcacagtatattaacaaatccctctctgctcttggtgatgtgattttttctttggcacagaaaaatgcccatgttccttatcgaaacagcaagctgactcaagttctacagagctctttaggtgggcaagcaaagacactgatgtttgttcaaattaatccggatactggatcatattcagaaacaataagcactttgaagtttgctgaaagggtttctggagttgagttaggtgctgcaagaagtaacaaagagggtaaagatataaaagagctgctagaacaggtttcatctctgaaagacacaatatcacggaaagatatggaaatcgatcaactcctgaagaacaaagccaaatctccaggttcatcaatagatagaaatgacagtcgccaacagatccggcgactatcagggactggatcaagtgaagccgaatgtgaagataacatgtctgatgatggctgctcagtagcaggaaccgagtattcagtaggtggtgcttcagaggcgacagcagaacggatgcagaaggccccatcaaggatagccaggctattccacacaaagaatggacagcctgcaaactccaaaccaaaaccaagggagtctgctctgaaaccaccaggtcgcacgacatctacaggaggaagccaggcgacaggaggatctttagtgaaaccccctaagaggcggtagagaaataaagattccatcatctaggatttgccatgttgatgggggtatgtgacgatgtcactgtaacgggttcacttgtcatcaccatgatgagcagccgactgtaggctggatgttgtatgagctggacgccatgaggttggtttctcagccctgctgaccatcacgttagttatcgactatgttactgaccatcatcaactttttatctatactatacttaaagcaccagtttcaacggtcgtcccacgtcatctttttacagataacctctcacagctatctcaaattaatctgttgcacgcctataaatggccaaacggcggcccggcacgggccagacgccc

SEQ ID NO: 209586 - DNA, 3509 bp, Zea Mays
caaaacccaactaaccagcagacccagtgaagcggagaagccacaggacaggacggcagggaaaagctacttgagcctgagcgctgcgcagaattccgtccggcacgaggtggacgagaggagggataaggaacagaagccttcgagctcacgctgatccgcctcccgcattgccttgaagcctctcgattcgggcggacccgagctgccccgcgcggagggctcgatctgggcccagatcggccagcatttcactcccgtgcttgcaagtgcgcgtgcgcggtgaggcactgaggcatggggaaggtggaagacgagtacgagtcccatgcagccaaccggcggggtgaggtgatagattggctcgctgagttgctgccggagttcgacttgccgctggattcctcagacgaggagctgcgggagtacctcattgatggcacggcactatgttacattgcagagaaactaatgcccggcattcaggaggaaatgtggggtggtaatgcatgggatcagaggtcgaacgtgaagaagttcctctattttgttgcggagatggggctgccaggcttcagtgtcaaggatctggaggaggggtctgtgtcttctgtggtggagtgtctcttggctctaaaggataatgtgactacaggattgggtcaaaacgttacaaacaatgctgctaaaacaccccttagaaggaaacttgaacttgaatctgatgggcctataatttcagttatgacaccagggagaagacctggggaggaaagatggaaaggccactgggatcctaagtctcaacaaagaagtattcttcattctggacaaaaggtccatgatgctttccaacttaagcgaggttcctacactgatcttcctgctgccaaagtttcagagatgatgcatccaagaagtctagataatgcccctactcaatcacttcttagagttgttaatggcattctagatgagagcattgagaggaaaagaggagaaataccacatcgtgctgtttacttgctaaggaatgttgttcaagagattgagcaccgcattgctattcaagcggatcacataagaaatcaaaatagcatcatcaagactcgggaagacaagtatcgttcaaaaattaaagcactcgagacattagtaaatggcacaaatgaagaaaatgaggtagaaaaatcaaaacttgatgagaaaagaaaactaggtgaacaagacatggttcggctgatgcaagaaaaggagaatgcagaaaatactattgcttcccttcagcaagaaatacaggtcttgagtaggatgcatgaacagtaccacgagagaaaggaaacagaagccaggcagatggaggaacacttggctatgagacttaaggaggctgagtttcttttaatgcaatcagaaaagaaagttgaagaaattgaatctgtttcccaactgaaatctcaactttggaccaggaaggcaaacattttccagagttttatggataatcaaaaattgtccattaaggacataaggatatcatctcagtccattaagcaggaaatgtttgcccttcaaatgaaatggatagatgaaatatctagcattggacgtgagttgaaaggcttggtagatgctgctgacaattaccataaggttcttgctgaaaatcagaagctatttaatgaggtacaggaactaaaaggcaatatcagggtttattgtcgtgtcagaccatttcttcctggtcaagatggaaaaacaaccattattgattatattggtgaaaatggtgagattctcatcacaaatcccttcaagcaagggaaggatgtgtgtcgaatgttcaagtttaataaagtgtttaatacacatgcttctcaagctgaggtattctctgatatccaacctctgatcagatcagttcttgatgggtttaatgtgtgcatttttgcctatggtcaaactggatccggaaagacttacacaatgagtgggccaggcacatcaaaagaagattggggtgttaactatcgagctttaaatgacttgttcgacatctctctaagtagaaggaatgctttctcatatgaggtgggagtgcagatggttgagatttataacgagcaagtgcgggatcttctctcaaatgatattgcacaaaaaagacttggaatttggagtacatctcagcctaatggacttgttgtccctgatgcaagtttacatccagtcaaatcaacactagatgtgctacagttgatggaaattggacaaacaaatagagcagttggatcaacagctctgaatgaaaggagcagtcgatctcacagcattctgactgtgcatgttagaggggtggatctgaagaatggatctacttccagaggatgtctacatctaattgatcttgctgggagtgaaagagttgagcgatctgaagcaattggagatagattaaaagaagcacagtatattaacaaatccctctctgctcttggtgatgtgattttttctttggcacagaaaaatgcccatgttccttatcgaaacagcaagctgactcaagttctacagagctctttaggtgggcaagcaaagacactgatgtttgttcaaattaatccggatactggatcatattcagaaacaataagcactttgaagtttgctgaaagggtttctggagttgagttaggtgctgcaagaagtaacaaagagggtaaagatataaaagagctgctagaacaggtttcatctctgaaagacacaatatcacggaaagatatggaaatcgatcaactcctgaagaacaaagccaaatctccaggttcatcaatagatagaaatgacagtcgccaacagatccggcgactatcagggactggatcaagtgaagccgaatgtgaagataacatgtctgatgatggctgctcagtagcaggaaccgagtattcagtaggtggtgcttcagaggcgacagcagaacggatgcagaaggccccatcaaggatagccaggctattccacacaaagaatggacagcctgcaaactccaaaccaaaaccaagggagtctgctctgaaaccaccaggtcgcacgacatctacaggaggaagccaggcgacaggaggatctttagtgaaaccccctaagaggcggtagagaaataaagattccatcatctaggatttgccatgttgatgggggtatgtgacgatgtcactgtaacgggttcacttgtcatcaccatgatgagcagccgactgtaggctggatgttgtatgagctggacgccatgaggttggtttctcagccctgctgaccatcacgttagttatcgactatgttactgaccatcatcaactttttatctatactatacttaaagcaccagtttcaacggtcgtcccacgtcatctttttacagataacctctcacagctatctcaaattaatctgttgcacgcctataaatggccaaacggcggcccggcacgggccagacgccc

SEQ ID NO: 209587 - DNA, 3573 bp, Zea Mays
aaaaaactggtttagggccttttaatcgcgggatttaggtgggatactggatgggggagggaccgcatggtactgcactggccaccggccttaacttgcaagcaaaaacaaaaatcaaaacccaactaaccagcagacccagtgaagcggagaagccacaggacaggacggcagggaaaagctacttgagcctgagcgctgcgcagaattccgtccggcacgaggtggacgagaggagggataaggaacagaagccttcgagctcacgctgatccgcctcccgcattgccttgaagcctctcgattcgggcggacccgagctgccccgcgcggagggctcgatctgggcccagatcggccagcatttcactcccgtgcttgcaagtgcgcgtgcgcggtgaggcactgaggcatggggaaggtggaagacgagtacgagtcccatgcagccaaccggcggggtgaggtgatagattggctcgctgagttgctgccggagttcgacttgccgctggattcctcagacgaggagctgcgggagtacctcattgatggcacggcactatgttacattgcagagaaactaatgcccggcattcaggaggaaatgtggggtggtaatgcatgggatcagaggtcgaacgtgaagaagttcctctattttgttgcggagatggggctgccaggcttcagtgtcaaggatctggaggaggggtctgtgtcttctgtggtggagtgtctcttggctctaaaggataatgtgactacaggattggttatgacaccagggagaagacctggggaggaaagatggaaaggccactgggatcctaagtctcaacaaagaagtattcttcattctggacaaaaggtccatgatgctttccaacttaagcgaggttcctacactgatcttcctgctgccaaagtttcagagatgatgcatccaagaagtctagataatgcccctactcaatcacttcttagagttgttaatggcattctagatgagagcattgagaggaaaagaggagaaataccacatcgtgctgtttacttgctaaggaatgttgttcaagagattgagcaccgcattgctattcaagcggatcacataagaaatcaaaatagcatcatcaagactcgggaagacaagtatcgttcaaaaattaaagcactcgagacattagtaaatggcacaaatgaagaaaatgagatgacagtagatcgacttgagctagttgaggtagaaaaatcaaaacttgatgagaaaagaaaactaggtgaacaagacatggttcggctgatgcaagaaaaggagaatgcagaaaatactattgcttcccttcagcaagaaatacaggtcttgagtaggatgcatgaacagtaccacgagagaaaggaaacagaagccaggcagatggaggaacacttggctatgagacttaaggaggctgagtttcttttaatgcaatcagaaaagaaagttgaagaaattgaatctgtttcccaactgaaatctcaactttggaccaggaaggcaaacattttccagagttttatggataatcaaaaattgtccattaaggacataaggatatcatctcagtccattaagcaggaaatgtttgcccttcaaatgaaatggatagatgaaatatctagcattggacgtgagttgaaaggcttggtagatgctgctgacaattaccataaggttcttgctgaaaatcagaagctatttaatgaggtacaggaactaaaaggcaatatcagggtttattgtcgtgtcagaccatttcttcctggtcaagatggaaaaacaaccattattgattatattggtgaaaatggtgagattctcatcacaaatcccttcaagcaagggaaggatgtgtgtcgaatgttcaagtttaataaagtgtttaatacacatgcttctcaagctgaggtattctctgatatccaacctctgatcagatcagttcttgatgggtttaatgtgtgcatttttgcctatggtcaaactggatccggaaagacttacacaatgagtgggccaggcacatcaaaagaagattggggtgttaactatcgagctttaaatgacttgttcgacatctctctaagtagaaggaatgctttctcatatgaggtgggagtgcagatggttgagatttataacgagcaagtgcgggatcttctctcaaatgatattgcacaaaaaagacttggaatttggagtacatctcagcctaatggacttgttgtccctgatgcaagtttacatccagtcaaatcaacactagatgtgctacagttgatggaaattggacaaacaaatagagcagttggatcaacagctctgaatgaaaggagcagtcgatctcacagcattctgactgtgcatgttagaggggtggatctgaagaatggatctacttccagaggatgtctacatctaattgatcttgctgggagtgaaagagttgagcgatctgaagcaattggagatagattaaaagaagcacagtatattaacaaatccctctctgctcttggtgatgtgattttttctttggcacagaaaaatgcccatgttccttatcgaaacagcaagctgactcaagttctacagagctctttaggtgggcaagcaaagacactgatgtttgttcaaattaatccggatactggatcatattcagaaacaataagcactttgaagtttgctgaaagggtttctggagttgagttaggtgctgcaagaagtaacaaagagggtaaagatataaaagagctgctagaacaggtttcatctctgaaagacacaatatcacggaaagatatggaaatcgatcaactcctgaagaacaaagccaaatctccaggttcatcaatagatagaaatgacagtcgccaacagatccggcgactatcagggactggatcaagtgaagccgaatgtgaagataacatgtctgatgatggctgctcagtagcaggaaccgagtattcagtaggtggtgcttcagaggcgacagcagaacggatgcagaaggccccatcaaggatagccaggctattccacacaaagaatggacagcctgcaaactccaaaccaaaaccaagggagtctgctctgaaaccaccaggtcgcacgacatctacaggaggaagccaggcgacaggaggatctttagtgaaaccccctaagaggcggtagagaaataaagattccatcatctaggatttgccatgttgatgggggtatgtgacgatgtcactgtaacgggttcacttgtcatcaccatgatgagcagccgactgtaggctggatgttgtatgagctggacgccatgaggttggtttctcagccctgctgaccatcacgttagttatcgactatgttactgaccatcatcaactttttatctatactatacttaaagcaccagtttcaacggtcgtcccacgtcatctttttacagataacctctcacagctatctcaaattaatctgttgcacgcctataaatggccaaacggcggcccggcacgggccagacgccc

SEQ ID NO: 209588 - DNA, 3498 bp, Zea Mays
cacgttcaaaaaggaaccaaagcacacacggccagacggcctccagtccagatcaaatccacgctacctcggagacccgttagcccgtttgctgtatcactcccctctccaccgcgtctctcctgcatgctcgtattcgcaaatctcctcccctctccccgcgcggcgcgcctgcacctcccggtccggcgagaggccaccgcccgcgcggccgcgctcctcgcactccccccactccggaagccctaggagcgccgtctccaccgctgcacctccgccagtcgcgctcctcgcctcgcctcgccgctgcctccgtagccgtcgcgggcgccgccatgccgctccggttggatatcaagaggaagctcgcacagaggtcggagagggtgaagtccgtggatctgcatccgacggagccatggattttgtcgagtctgtactcgggaagcgtatgtgtatggaactaccagactcagacaatggtgaaatcatttgaagtcacggatttaccagttcgttcggctaaatttattgcacgtaagcaatgggttgttgctggtgccgatgatatgttcatccgtgtgtacaactataacacaatggacaaggtcaaggtttttgaagctcacactgactacattaggtgtgtggctgttcatccaacccagccctttgtgttatcatcgtccgatgacatgctgattaagctgtgggattgggataaaggctgggtgtgtactcaaatatttgaagggcattctcactatgtgatgcaagttacatttaacccaaaagatacaaacacctttgctagtgcttccctggatcgcacaataaagatatggagtcttggttctcctgacccaaatttcacactagatggccattccaaaggtgtgaactgtgttgattacttcactggtggtgatcgaccatacctaattactggctctgatgatcagactgcaaaggtttgggactaccagacaaagagctgtgttcaaacacttgaaggacatgcacataatgtgtccgctgtatgtttccatccagagctacctataattattactggttcagaggatgggacagttcgaatgtggcattctactacctacaggcttgagaacactcttaactatggccttgagcgagtttgggctttaggatatatgaaagggtcaagaagggttgtgattggatatgatgaagggacaataatgataaaaattggtcgtgaagttcctgttgctagcatggatagcagtggaaaaattatatgggcaaagcataatgaaatccaaactgttaacatcaagagtgttggtgcagacaatgagatcgcagatggtgatcggttaccattggccgtgaaggagttgggaagctgtgatctttatccacaaagcttaagacacaatccgaatgggagatttgttgttgtatgtggagatggagaatacataatatacacagcattagcatggagaaatagatcatttgggtctgcacttgaatttgtttggtcaactgatggagaatatgccatcagagaaagcacctcaaggataaagatttacagtaaaaatttccaggagaggaaaagtataagaccatcattttcggttgaacggatatttggtggtgtgttacttgctatgtgtacaaatgacttcatttgcttttatgattgggtggaatgcagattgatacgtcgaattgatgtcaatgtgaagaatctttactgggctgacagtggtgatttagtaacaattgcaagtgatacgtcattctacattttgaaatataatagggatgtagtttcatctcatttagacggagggggttcagctgctgaggaaggtgtggaagatgcctttgaactgcttcatgagatcaatgaacgtgtccggactgggctatgggttggcgattgttttatctacaacaattcttcgtggcggcttaattactgcgtaggaggagaggttacaaccttatttcacttggatcggccaatgtatttactaggatatcttgcaaaccaaagccgtgtctatcttattgataagcaatttaatgttgtggggtatactttactccttagtttgatcgagtataaaacacttgtaatgcgtggggattttgatcgtgcaaatgatgttttatcatctataccaaaggaacaatatgacagtgtggcacgtttcttggaatcacgtggaatgttggaggaagccctcgagatagcaactgacactaattacagatttgacctggctgtgcagcttggtcgacttgaaatagcgaaggtgattgctactgaggtgcaaagtgaatccaagtggaagcaattaggggagttagctatgtcaaatggaaagcttgaaatggcagaggagtgtcttctacatgcaatggacctcagtggtttgttgcttttgtattcttcccttggggatgccgaaggcattaacaaattggcatctgtagccaaagaacaaggaaagaacaatgtttctttcctttgtttcttcatgctaggaaagctggaagagtgtcttcaattgctaatagaaagcaatcgtattccggaagcagcattgatggccagatcttatcttcctagcaaagtccctgagattgtagcgttgtggaaaaaggatctccagaaggtaaacccaaaagcagcggagtccctggctgatcctaatgagtacccaaacttatttgaagactggcagattgctctgaatgtagaagctgctgttgctccgaaaagggttatctatccaccggctgaggagtacatgattcatgctgaaaggtcaaatgagaatttagtggaagcttttaaaaacatgcatgtacaggaagagatggtgccagatgataatgaagagtatgttcacgaggttattgaagatggtggagtagaagagagtcaagaagatgctgttgaggttgatgcagaggatgatggagtagaagaaagtcaggatgaagctgttgagtgctgactcctgagcaatagtggatcaacgggacagcaactttgcaagtggttaagtttgtaaaggttgctgactgctttctagagtacgaagtccattttctccagcagtattaagcatgagacgtgctctaggattggcttatccacatacgaagttggaccacaattaatcaaaacttcatcattgtgctcgataggaaattttgtgcttccttttttacatatagatcaggtctttaggtctcagaaaacttcatcaaaagtactcttgtttcaccgagatggaaatatgggatgtgattggtgatcggagtggtatttttacaaggtacatagagtagtagcttgtggaattgaggatgttttacatgtgatgtacatcggacttgggagctttgtatcaacagcatacgttttcaacagtctgtgtttagtttagtgaataatttgtgttgagctatgtttttgatgttgtgattgct

SEQ ID NO: 209589 - DNA, 924 bp, Zea Mays
gtcttctgtgctatgagactcctttgattccattgtaaacccaaaagcagcggagtccctggctgatcctaatgagtacccaaacttatttgaagactggcagattgctctgaatgtagaagctgctgttgctccgaaaagggttatctatccaccggctgaggagtacatgattcatgctgaaaggtcaaatgagaatttagtggaagcttttaaaaacatgcatgtacaggaagagatggtgccagatgataatgaagagtatgttcacgaggttattgaagatggtggagtagaagagagtcaagaagatgctgttgaggttgatgcagaggatgatggagtagaagaaagtcaggatgaagctgttgaggttgaggctgaggattcaactgatggtgctgtccttgtgaatggaaacaatagtgaggaacagtgggtgctgactcctgagcaatagtggatcaacgggacagcaactttgcaagtggttaagtttgtaaaggttgctgactgctttctagagtacgaagtccattttctccagcagtattaagcatgagacgtgctctaggattggcttatccacatacgaagttggaccacaattaatcaaaacttcatcattgtgctcgataggaaattttgtgcttccttttttacatatagatcaggtctttaggtctcagaaaacttcatcaaaagtactcttgtttcaccgagatggaaatatgggatgtgattggtgatcggagtggtatttttacaaggtacatagagtagtagcttgtggaattgaggatgttttacatgtgatgtacatcggacttgggagctttgtatcaacagcatacgttttcaacagtctgtgtttagtttagtgaataatttgtgttgagctatgtttttgatgttgtgattgct

SEQ ID NO: 209590 - DNA, 855 bp, Zea Mays
cttctgtgctatgagactcctttgattccattgtaaacccaaaagcagcggagtccctggctgatcctaatgagtacccaaacttatttgaagactggcagattgctctgaatgtagaagctgctgttgctccgaaaagggttatctatccaccggctgaggagtacatgattcatgctgaaaggtcaaatgagaatttagtggaagcttttaaaaacatgcatgtacaggaagagatggtgccagatgataatgaagagtatgttcacgaggttattgaagatggtggagtagaagagagtcaagaagatgctgttgaggttgatgcagaggatgatggagtagaagaaagtcaggatgaagctgttgagtgctgactcctgagcaatagtggatcaacgggacagcaactttgcaagtggttaagtttgtaaaggttgctgactgctttctagagtacgaagtccattttctccagcagtattaagcatgagacgtgctctaggattggcttatccacatacgaagttggaccacaattaatcaaaacttcatcattgtgctcgataggaaattttgtgcttccttttttacatatagatcaggtctttaggtctcagaaaacttcatcaaaagtactcttgtttcaccgagatggaaatatgggatgtgattggtgatcggagtggtatttttacaaggtacatagagtagtagcttgtggaattgaggatgttttacatgtgatgtacatcggacttgggagctttgtatcaacagcatacgttttcaacagtctgtgtttagtttagtgaataatttgtgttgagctatgtttttgatgttgtgattgct

SEQ ID NO: 209591 - DNA, 1062 bp, Zea Mays
gtgctatgagactcctttgattccattgtaaacccaaaagcagcggagtccctggctgatcctaatgagtacccaaacttatttgaagactggcagattgctctgaatgtagaagctgctgttgctccgaaaagggttatctatccaccggctgaggagtacatgattcatgctgaaaggtcaaatgagaatttagtggaagcttttaaaaacatgcatgtacaggaagagatggtgccagatgataatgaagagtatgttcacgaggttattgaagatggtggagtagaagagagtcaagaagatgctgttgaggttgatgcagaggatgatggagtagaagaaagtcaggatgaagctgttgaggttgaggctgaggattcaactgatggtgctgtccttgtgaatggaaacaatagtgaggaacagtggggtatgaaaaatgaagaaccatcagcataaaagctgtagttgagcaagtgtacagtcctaaataccttatttttcctggtcttacctcccagtgcacgatattaggaaagctgggtgatatccttaagttgcccttgtctttagcgtgctgactcctgagcaatagtggatcaacgggacagcaactttgcaagtggttaagtttgtaaaggttgctgactgctttctagagtacgaagtccattttctccagcagtattaagcatgagacgtgctctaggattggcttatccacatacgaagttggaccacaattaatcaaaacttcatcattgtgctcgataggaaattttgtgcttccttttttacatatagatcaggtctttaggtctcagaaaacttcatcaaaagtactcttgtttcaccgagatggaaatatgggatgtgattggtgatcggagtggtatttttacaaggtacatagagtagtagcttgtggaattgaggatgttttacatgtgatgtacatcggacttgggagctttgtatcaacagcatacgttttcaacagtctgtgtttagtttagtgaataatttgtgttgagctatgtttttgatgttgtgattgct

SEQ ID NO: 209592 - DNA, 671 bp, Zea Mays
atgaaactaatttgatattgtgttattgaagatggtggagtagaagagagtcaagaagatgctgttgaggttgatgcagaggatgatggagtagaagaaagtcaggatgaagctgttgaggttgaggctgaggattcaactgatggtgctgtccttgtgaatggaaacaatagtgaggaacagtgggtgctgactcctgagcaatagtggatcaacgggacagcaactttgcaagtggttaagtttgtaaaggttgctgactgctttctagagtacgaagtccattttctccagcagtattaagcatgagacgtgctctaggattggcttatccacatacgaagttggaccacaattaatcaaaacttcatcattgtgctcgataggaaattttgtgcttccttttttacatatagatcaggtctttaggtctcagaaaacttcatcaaaagtactcttgtttcaccgagatggaaatatgggatgtgattggtgatcggagtggtatttttacaaggtacatagagtagtagcttgtggaattgaggatgttttacatgtgatgtacatcggacttgggagctttgtatcaacagcatacgttttcaacagtctgtgtttagtttagtgaataatttgtgttgagctatgtttttgatgttgtgattgct

SEQ ID NO: 209593 - DNA, 1277 bp, Zea Mays
aaactaaacggcgtcttcttgctggggattctggagaggaaatgtaccggctttgttgatgtatatgccatatacagctatacaattcactgtcctacacaaactaaaaacatttgcttctggttcatctaaaacagaggatcatttgcatttgagcccttacttatcctatgtaagtggagctctagcaggatgtgcagcaactatagggtcatatccatttgaccttctgaggactattcttgcatcacagggtgaaccaaaaatttaccccaacatgaggtctgcatttgttgatataattaaaacccgtggtgttcaagggctttattctggtctatctccaactcttgttgaaatcataccatatgctggtttgcagtttggttcatatgacactttcaaacgttctatgatgacatggaacagatataaatattcgcatcttaactttggaagcgaggatgattctgtatcaagtttccagctatttctttgtgggtttgctgctgggacattttcaaaggctgcatgccacccacttgatgttgtaaagaaaaggttccagattgaagggctaaaacgccatccaaggtatggagctcgaattgagagcagcacatacaagggcatgtaccatgccctaaaggagattgtcgcaaaggagggatttggaggcctttataagggccttttcccctctttggtgaaatcggcccctgctggtgctgtgacatttgtggcatatgaatacatctcagactgggagcaaggctggagttgagtgaggtcttgatggatcatggagctatcaagataccatgacgagaactttttgcacaccgtggacatggaggatggagaccggaaggtcaatcgtcaagtgcatacaattcctagagatccgatacatgtaaagccttacatagaaaagagctgttttgtcgtttcttattctttccccaattgcctaatgtggtggtagggcattcgttggcttgtaaaacaaggctgactacaactaacttagtgatcgcgacgcgtcatacatgactaagtcaaaagcagccggcagttttgctgggatcgtgttacgaatcttttctcggctgcagtcatgttttccttgcggcttgttggggctgcgtcttctacagtcttttttatttatatggattgcacctgcaacagactgcagcagctacggttgtagggcagccgaacaaatttcatggttgatggcagtcgtaatttattcaaccattttgttgagcacc

SEQ ID NO: 209594 - DNA, 1640 bp, Zea Mays
cctctggcctcttcgcgcagagccgcacaccgacccacgccggccgcgcccaccaggcagccaggcaccacgacgcggcagcccccggcctcggaagccaagagccataccgcctctttttcctccaaaagccaaaccaccacaccccctaatctctcgctctcttcctttctcacccccgtgaccctgtctcgccccttctcgcctcgccgccgcagccgatgggctccggggaggagccgtcgcagatgcggagggcgctggtggactcgctcgcgggtgccatctccggcggcatctcccgcaccgtcacctcccccctcgacgtcatcaaaatccgcttccagggattctggagaggaaatgtaccggctttgttgatgtatatgccatatacagctatacaattcactgtcctacacaaactaaaaacatttgcttctggttcatctaaaacagaggatcatttgcatttgagcccttacttatcctatgtaagtggagctctagcaggatgtgcagcaactatagggtcatatccatttgaccttctgaggactattcttgcatcacagggtgaaccaaaaatttaccccaacatgaggtctgcatttgttgatataattaaaacccgtggtgttcaagggctttattctggtctatctccaactcttgttgaaatcataccatatgctggtttgcagtttggttcatatgacactttcaaacgttctatgatgacatggaacagatataaatattcgcatcttaactttggaagcgaggatgattctgtatcaagtttccagctatttctttgtgggtttgctgctgggacattttcaaaggctgcatgccacccacttgatgttgtaaagaaaaggttccagattgaagggctaaaacgccatccaaggtatggagctcgaattgagagcagcacatacaagggcatgtaccatgccctaaaggagattgtcgcaaaggagggatttggaggcctttataagggccttttcccctctttggtgaaatcggcccctgctggtgctgtgacatttgtggcatatgaatacatctcagactggttagagtcgatactgatgtgaaaatcttcaatgcagatagggagcaaggctggagttgagtgaggtcttgatggatcatggagctatcaagataccatgacgagaactttttgcacaccgtggacatggaggatggagaccggaaggtcaatcgtcaagtgcatacaattcctagagatccgatacatgtaaagccttacatagaaaagagctgttttgtcgtttcttattctttccccaattgcctaatgtggtggtagggcattcgttggcttgtaaaacaaggctgactacaactaacttagtgatcgcgacgcgtcatacatgactaagtcaaaagcagccggcagttttgctgggatcgtgttacgaatcttttctcggctgcagtcatgttttccttgcggcttgttggggctgcgtcttctacagtcttttttatttatatggattgcacctgcaacagactgcagcagctacggttgtagggcagccgaacaaatttcatggttgatggcagtcgtaatttattcaaccattttgttgagcacc

SEQ ID NO: 209595 - DNA, 2122 bp, Zea Mays
cctctggcctcttcgcgcagagccgcacaccgacccacgccggccgcgcccaccaggcagccaggcaccacgacgcggcagcccccggcctcggaagccaagagccataccgcctctttttcctccaaaagccaaaccaccacaccccctaatctctcgctctcttcctttctcacccccgtgaccctgtctcgccccttctcgcctcgccgccgcagccgatgggctccggggaggagccgtcgcagatgcggagggcgctggtggactcgctcgcgggtgccatctccggcggcatctcccgcaccgtcacctcccccctcgacgtcatcaaaatccgcttccaggttcagttagaacccacaacctcgtggggtattcttcgaagggatatatatggaccttccaaatacactgggcttctgcaagcaaccaaagatattctcagagaggaaggtttaccgggattctggagaggaaatgtaccggctttgttgatgtatatgccatatacagctatacaattcactgtcctacacaaactaaaaacatttgcttctggttcatctaaaacagaggatcatttgcatttgagcccttacttatcctatgtaagtggagctctagcaggatgtgcagcaactatagggtcatatccatttgaccttctgaggactattcttgcatcacagggtgaaccaaaaatttaccccaacatgaggtctgcatttgttgatataattaaaacccgtggtgttcaagggctttattctggtctatctccaactcttgttgaaatcataccatatgctggtttgcagtttggttcatatgacactttcaaacgttctatgatgacatggaacagatataaatattcgcatcttaactttggaagcgaggatgattctgtatcaagtttccagctatttctttgtgggtttgctgctgggacattttcaaaggctgcatgccacccacttgatgttgtaaagaaaaggttccagattgaagggctaaaacgccatccaaggtatggagctcgaattgagagcagcacatacaagggcatgtaccatgccctaaaggagattgtcgcaaaggagggatttggaggcctttataagggccttttcccctctttggtgaaatcggcccctgctggtgctgtgacatttgtggcatatgaatacatctcagactggttagagtcgatactgatgtgaaaatcttcaatgcagtaatactttatccccctgttttttctgttgctgtttatattatttctccatgctgttatacacttgtgtctggaagaggctgcagttccattggatcttgcagtccatacgaggtttgggacttgggagcctgctaaaatcaactggataattcatgcttgtaaggtcctctcatgggtttttggcaaactattaggcgttacacaaatcggcaatcgagttggtcaccgaaaatttgcatttctagatgtctatgcactgagccctaccttttcttcaaacctgaagttttacgttttctttgttgatgtctgcatgctcgttcatgtccggagcagtgatagaacctgaaactgatttgcaggatagggagcaaggctggagttgagtgaggtcttgatggatcatggagctatcaagataccatgacgagaactttttgcacaccgtggacatggaggatggagaccggaaggtcaatcgtcaagtgcatacaattcctagagatccgatacatgtaaagccttacatagaaaagagctgttttgtcgtttcttattctttccccaattgcctaatgtggtggtagggcattcgttggcttgtaaaacaaggctgactacaactaacttagtgatcgcgacgcgtcatacatgactaagtcaaaagcagccggcagttttgctgggatcgtgttacgaatcttttctcggctgcagtcatgttttccttgcggcttgttggggctgcgtcttctacagtcttttttatttatatggattgcacctgcaacagactgcagcagctacggttgtagggcagccgaacaaatttcatggttgatggcagtcgtaatttattcaaccattttgttgagcacc

SEQ ID NO: 209596 - DNA, 1751 bp, Zea Mays
cctctggcctcttcgcgcagagccgcacaccgacccacgccggccgcgcccaccaggcagccaggcaccacgacgcggcagcccccggcctcggaagccaagagccataccgcctctttttcctccaaaagccaaaccaccacaccccctaatctctcgctctcttcctttctcacccccgtgaccctgtctcgccccttctcgcctcgccgccgcagccgatgggctccggggaggagccgtcgcagatgcggagggcgctggtggactcgctcgcgggtgccatctccggcggcatctcccgcaccgtcacctcccccctcgacgtcatcaaaatccgcttccagttagaacccacaacctcgtggggtattcttcgaagggatatatatggaccttccaaatacactgggcttctgcaagcaaccaaagatattctcagagaggaaggtttaccgggattctggagaggaaatgtaccggctttgttgatgtatatgccatatacagctatacaattcactgtcctacacaaactaaaaacatttgcttctggttcatctaaaacagaggatcatttgcatttgagcccttacttatcctatgtaagtggagctctagcaggatgtgcagcaactatagggtcatatccatttgaccttctgaggactattcttgcatcacagggtgaaccaaaaatttaccccaacatgaggtctgcatttgttgatataattaaaacccgtggtgttcaagggctttattctggtctatctccaactcttgttgaaatcataccatatgctggtttgcagtttggttcatatgacactttcaaacgttctatgatgacatggaacagatataaatattcgcatcttaactttggaagcgaggatgattctgtatcaagtttccagctatttctttgtgggtttgctgctgggacattttcaaaggctgcatgccacccacttgatgttgtaaagaaaaggttccagattgaagggctaaaacgccatccaaggtatggagctcgaattgagagcagcacatacaagggcatgtaccatgccctaaaggagattgtcgcaaaggagggatttggaggcctttataagggccttttcccctctttggtgaaatcggcccctgctggtgctgtgacatttgtggcatatgaatacatctcagactggttagagtcgatactgatgtgaaaatcttcaatgcagatagggagcaaggctggagttgagtgaggtcttgatggatcatggagctatcaagataccatgacgagaactttttgcacaccgtggacatggaggatggagaccggaaggtcaatcgtcaagtgcatacaattcctagagatccgatacatgtaaagccttacatagaaaagagctgttttgtcgtttcttattctttccccaattgcctaatgtggtggtagggcattcgttggcttgtaaaacaaggctgactacaactaacttagtgatcgcgacgcgtcatacatgactaagtcaaaagcagccggcagttttgctgggatcgtgttacgaatcttttctcggctgcagtcatgttttccttgcggcttgttggggctgcgtcttctacagtcttttttatttatatggattgcacctgcaacagactgcagcagctacggttgtagggcagccgaacaaatttcatggttgatggcagtcgtaatttattcaaccattttgttgagcacc

SEQ ID NO: 209597 - DNA, 1345 bp, Zea Mays
agtagctcagatcctgtttgcaggggtgctggtttggtggtcttgttttgtttgttatctttgtctaagtctgtatctagatcctccttttcttcttaatgaaatgactcgcagatctcctgcgtggttcgagaaaaaaactgtcgaaaacatagaacattcactttgatggagcgcgcgatgaacttgaagagaacagtgtacttctcccagagaacccaaatgtcatgataatccttttgtcatgcattcatgcttttgattcgcctgtgtcaaaatggacatactttgtgttcgacatgcaaggccagggtgcacaacaggtgccctacatgcagacaagagcttggtgatatcaggtgcttagcattggaaaaagtagcagagtcacttgagcttccctgtaagtactgctctttagggtgcccagagatcttcccatactacagcaagataaagcacgaagcacagtgcagcttcaggccatatacctgcccctatgctggttctgaatgtgctgtggctggtgatattccattccttgttgcacatttgagggatgatcacaaagtcgatatgcacagcggctgcacgttcaaccatagatatgtcaagtccaacccgcgagaggttgaaaacgccacctggatgcttacgtacttctgcctgcacttcgaggcattccagctcggaatggctccagtctacatggctttcctccggttcatgggtgatgagaatgatgcgaggaactacacatatagcctagaggttggtggtaacgggaggaagatggtgtgggaaggtactcctagaagcatccgtgacagccaccgcaaggtccgtgacagccatgatggcctcatcatccagaggaacatggcgctgttcttctcgggcggtgacaggaaggagctgaagctgagggtgactgggcggatctggaaggagcagaccaacccggacggggcctgcattcctaacctttgcagctgagcaagggagacgtttggaaagcaaaaaagaaagaaaatacggtgctgtttggctggcttgtctcaaaattgccacgttatgctttcatcatagtgtctgccgttgaaatgttgtagtagtaaaatcgtagggtgtaaaatgttttcttgtaaagtcattgtgtataccaaccaaattcaagaaagcttacaagttggcccataaatgcatgtgctacgttcttgtgtagtttgagttctgttatcaaggtattgggctcaggaaatgctcagtgttcatgtttatttgatagactattagtgttatcgcgaagaaaatgggaccaacgaattaactggatccattttct

SEQ ID NO: 209598 - DNA, 1118 bp, Zea Mays
ggcacctcctgggcaggctgggagatgattaagttccatctagtgtcaaaatggacatactttgtgttcgacatgcaaggccagggtgcacaacaggtgccctacatgcagacaagagcttggtgatatcaggtgcttagcattggaaaaagtagcagagtcacttgagcttccctgtaagtactgctctttagggtgcccagagatcttcccatactacagcaagataaagcacgaagcacagtgcagcttcaggccatatacctgcccctatgctggttctgaatgtgctgtggctggtgatattccattccttgttgcacatttgagggatgatcacaaagtcgatatgcacagcggctgcacgttcaaccatagatatgtcaagtccaacccgcgagaggttgaaaacgccacctggatgcttacgtacttctgcctgcacttcgaggcattccagctcggaatggctccagtctacatggctttcctccggttcatgggtgatgagaatgatgcgaggaactacacatatagcctagaggttggtggtaacgggaggaagatggtgtgggaaggtactcctagaagcatccgtgacagccaccgcaaggtccgtgacagccatgatggcctcatcatccagaggaacatggcgctgttcttctcgggcggtgacaggaaggagctgaagctgagggtgactgggcggatctggaaggagcagaccaacccggacggggcctgcattcctaacctttgcagctgagcaagggagacgtttggaaagcaaaaaagaaagaaaatacggtgctgtttggctggcttgtctcaaaattgccacgttatgctttcatcatagtgtctgccgttgaaatgttgtagtagtaaaatcgtagggtgtaaaatgttttcttgtaaagtcattgtgtataccaaccaaattcaagaaagcttacaagttggcccataaatgcatgtgctacgttcttgtgtagtttgagttctgttatcaaggtattgggctcaggaaatgctcagtgttcatgtttatttgatagactattagtgttatcgcgaagaaaatgggaccaacgaattaactggatccattttct

SEQ ID NO: 209599 - DNA, 1237 bp, Zea Mays
cttcaatacaaaacaaattaaggtacacaccctctccttttttgattgaactcttaggataccatgttctctttaaaaaaccaaaaaaatatttagatgttgagccaatcgttcacatcacactgtttacgccaaaatagaaaatataagaggaactttaacaaaaaatactaaaactaagtcttatctgatcatggttgtgacatcacttgaaggttgcaaaacaatgacctccaactaatacaacccacaacagctgaagaagaaattcagctttctcaaccaccaaatttggaagacaagaccgttgaaaagctgctcaacatagatccggatatgtttcccgcagaaggctatagatgtattgttactatatcacgcatcgtgcaaaatagcagatggtggtacccatcttgctccaggtgccacaaatcttcatctcaaatctcaactggatatcactgcacatcatgtggctgcacaaatattaagtttagatacaagctcagcttcattgctactgatggaacatgcgaagcagagttcttttttttgatagcatagccagaaaaatagtaggagaaccttagggcaaccttgttacagcagttacaacttctgagagtcccagcagccctagccgctattgtgtgtctgaaatttactcttgcagttgccatcaatatgtcagcctactatgtcatgaacagagtattctctattctatctattttaacaaatcatggaagacagaccttcataccatctaacatgcctagccatcctcaacaagagttgtatacacaagatgaagtacctagccttccggtcggccacacaagactctccagcaacatcaatggcaaaactatctacctgtagcaacgaaagaaacgaggtgtttgctttttgcgcacctatcaggagcaccatcacttttggatcatgaatgctttcctatagatatgaacctactgttatactatttgtggatatgtacatattgacttaacacctgcaagcacattgttgctaagtgttgatgtatggtagttgaatgctacttagtatgtattgtagtctaaatccactctacagctggtatcaactattatataaaaacaacgtcatatgcttatatttggtttcctccttacgcattatatactcatattatgtttaaatatttgttttacatacctgggtagtcacgccaaacccttaagctatatgtgct

SEQ ID NO: 209600 - DNA, 2548 bp, Zea Mays
gtcgggtgtcccttcctctcccagttctttctcgctttttctcctctctgcttttctttgttaccgtcggtgtcgggaattccgcttccgcacaaatatttcttttgctgtcagcttgctcaacggttctgtttgtttggtgagatgtgttcctctttctcctttgttgtgagtttccatttggtaggcatccttttccagattccttcgtggattagatccacgctcctctcgtcgagatcgtcttgctttttttctgagatggagattgggaccgaaaaggcaagtatttttctttggtagttttggcatgtgcagatagatcagaaagtgcttctacagtttacctcatttaactctattttggagattgaaactgaaaaggcaagtatttctttttggtaaagtctttcgcaagtggacatctagttccaaatttttttaaagggatctggttccaaattcatgcttggacctgccaggattctattgtttttggcgtatcctcttgctttggtacatgtagatcagcaagcaaatgtttttttatttcatttaatttcaatgagtgcaggtgacgttctgtttgtactttattgaacttcattatactattttcttttggtaaagttgttcgcatcaagtgcatgttgcattctttttagtttttaacggttctgctttcagcttgctcttgggtgcatttattttttagctgtgtttccattcctccaactgtgttttcattcttcctttgtcgaccatttcgactttgtggacaactaatttcctttgggtgaaatgatctgcacgaagttgagacttcgctttattttgtttatggacgcatcaagattccaacacgccgttatttttcttcgctggtttagtaatgaggaaatcccttttacggccctaattttagggtttagagttttaactgatatttttttaaaagttgttcctctctggtcccaactccatactatggtgtgtaaatttgccgcatcgctttttttttctggaaagctctaaaaataaggaaattatttgcacagttttttaataaaagatagcatcttgcacggttgctttttagagaaagaaaagtaaccaaattcggttttgtccaaattagtttcaatttgatactttctcacgttttacttcatgtttttatcgtttgggtttactaaattgcttagagttcaacatctttccctcagaactcactttttttgtctttgttcgactttcatagaattagatacaatttcctgctcgttccacacaaatttcctcctctcattgtttttatgtgagtttccttagatcaatacgtgtagccaggtcaacacatacaggttgtgtttgttgctacgtaaagaatgtcatctaggcacgaggactactatctctaatcattggagctttgtttggcaaggtcaaccatacctaaggggtactacaacaagttcatgatacttcaagcctggaattcctgaggcgcatacctactacaacaggttgcaaaacaatgacctccaactaatacaacccacaacagctgaagaagaaattcagctttctcaaccaccaaatttggaagacaagaccgttgaaaagctgctcaacatagatccggatatgtttcccgcagaaggctatagatgtattgttactatatcacgcatcgtgcaaaatagcagatggtggtacccatcttgctccaggtgccacaaatcttcatctcaaatctcaactggatatcactgcacatcatgtggctgcacaaatattaagtttagatacaagctcagcttcattgctactgatggaacatgcgaagcagagttcttttttttgatagcatagccagaaaaatagtaggagaaccttagggcaaccttgttacagcagttacaacttctgagagtcccagcagccctagccgctattgtgtgtctgaaatttactcttgcagttgccatcaatatgtcagcctactatgtcatgaacagagtattctctattctatctattttaacaaatcatggaagacagaccttcataccatctaacatgcctagccatcctcaacaagagttgtatacacaagatgaagtacctagccttccggtcggccacacaagactctccagcaacatcaatggcaaaactatctacctgtagcaacgaaagaaacgaggtgtttgctttttgcgcacctatcaggagcaccatcacttttggatcatgaatgctttcctatagatatgaacctactgttatactatttgtggatatgtacatattgacttaacacctgcaagcacattgttgctaagtgttgatgtatggtagttgaatgctacttagtatgtattgtagtctaaatccactctacagctggtatcaactattatataaaaacaacgtcatatgcttatatttggtttcctccttacgcattatatactcatattatgtttaaatatttgttttacatacctgggtagtcacgccaaacccttaagctatatgtgct

SEQ ID NO: 209601 - DNA, 2442 bp, Zea Mays
gtcgggtgtcccttcctctcccagttctttctcgctttttctcctctctgcttttctttgttaccgtcggtgtcgggaattccgcttccgcacaaatatttcttttgctgtcagcttgctcaacggttctgtttgtttggtgagatgtgttcctctttctcctttgttgtgagtttccatttggtaggcatccttttccagattccttcgtggattagatccacgctcctctcgtcgagatcgtcttgctttttttctgagatggagattgggaccgaaaaggcaagtatttttctttggtagttttggcatgtgcagatagatcagaaagtgcttctacagtttacctcatttaactctattttggagattgaaactgaaaaggcaagtatttctttttggtaaagtctttcgcaagtggacatctagttccaaatttttttaaagggatctggttccaaattcatgcttggacctgccaggattctattgtttttggcgtatcctcttgctttggtacatgtagatcagcaagcaaatgtttttttatttcatttaatttcaatgagtgcaggtgacgttctgtttgtactttattgaacttcattatactattttcttttggtaaagttgttcgcatcaagtgcatgttgcattctttttagtttttaacggttctgctttcagcttgctcttgggtgcatttattttttagctgtgtttccattcctccaactgtgttttcattcttcctttgtcgaccatttcgactttgtggacaactaatttcctttgggtgaaatgatctgcacgaagttgagacttcgctttattttgtttatggacgcatcaagattccaacacgccgttatttttcttcgctggtttagtaatgaggaaatcccttttacggccctaattttagggtttagagttttaactgatatttttttaaaagttgttcctctctggtcccaactccatactatggtgtgtaaatttgccgcatcgctttttttttctggaaagctctaaaaataaggaaattatttgcacagttttttaataaaagatagcatcttgcacggttgctttttagagaaagaaaagtaaccaaattcggttttgtccaaattagtttcaatttgatactttctcacgttttacttcatgtttttatcgtttgggtttactaaattgcttagagttcaacatctttccctcagaactcactttttttgtctttgttcgactttcatagaattagatacaatttcctgctcgttccacacaaatttcctcctctcattgtttttatgtgagtttccttagatcaatacgtgtagccaggtcaacacatacaggttgtgtttgttgctacgtaaagaatgtcatctaggcacgaggactactatctctaatcattggagctttgtttggcaaggcagaaggctatagatgtattgttactatatcacgcatcgtgcaaaatagcagatggtggtacccatcttgctccaggtgccacaaatcttcatctcaaatctcaactggatatcactgcacatcatgtggctgcacaaatattaagtttagatacaagctcagcttcattgctactgatggaacatgcgaagcagagttcttttttttgatagcatagccagaaaaatagtaggagaaccttagggcaaccttgttacagcagttacaacttctgagagtcccagcagccctagccgctattgtgtgtctgaaatttactcttgcagttgccatcaatatgtcagcctactatgtcatgaacagagtattctctattctatctattttaacaaatcatggaagacagaccttcataccatctaacatgcctagccatcctcaacaagagttgtatacacaagatgaagtacctagccttccggtcggccacacaagactctccagcaacatcaatggcaaaactatctacctgtagcaacgaaagaaacgaggcacgatgacgtgttctaatatattcagatatgccacatgacacagagggtgatgacagcgcataagtgaactcaacaagcaagagatatcgtcaccaccaaaatggtgtttgctttttgcgcacctatcaggagcaccatcacttttggatcatgaatgctttcctatagatatgaacctactgttatactatttgtggatatgtacatattgacttaacacctgcaagcacattgttgctaagtgttgatgtatggtagttgaatgctacttagtatgtattgtagtctaaatccactctacagctggtatcaactattatataaaaacaacgtcatatgcttatatttggtttcctccttacgcattatatactcatattatgtttaaatatttgttttacatacctgggtagtcacgccaaacccttaagctatatgtgct

SEQ ID NO: 209602 - DNA, 2418 bp, Zea Mays
gtcgggtgtcccttcctctcccagttctttctcgctttttctcctctctgcttttctttgttaccgtcggtgtcgggaattccgcttccgcacaaatatttcttttgctgtcagcttgctcaacggttctgtttgtttggtgagatgtgttcctctttctcctttgttgtgagtttccatttggtaggcatccttttccagattccttcgtggattagatccacgctcctctcgtcgagatcgtcttgctttttttctgagatggagattgggaccgaaaaggcaagtatttttctttggtagttttggcatgtgcagatagatcagaaagtgcttctacagtttacctcatttaactctattttggagattgaaactgaaaaggcaagtatttctttttggtaaagtctttcgcaagtggacatctagttccaaatttttttaaagggatctggttccaaattcatgcttggacctgccaggattctattgtttttggcgtatcctcttgctttggtacatgtagatcagcaagcaaatgtttttttatttcatttaatttcaatgagtgcaggtgacgttctgtttgtactttattgaacttcattatactattttcttttggtaaagttgttcgcatcaagtgcatgttgcattctttttagtttttaacggttctgctttcagcttgctcttgggtgcatttattttttagctgtgtttccattcctccaactgtgttttcattcttcctttgtcgaccatttcgactttgtggacaactaatttcctttgggtgaaatgatctgcacgaagttgagacttcgctttattttgtttatggacgcatcaagattccaacacgccgttatttttcttcgctggtttagtaatgaggaaatcccttttacggccctaattttagggtttagagttttaactgatatttttttaaaagttgttcctctctggtcccaactccatactatggtgtgtaaatttgccgcatcgctttttttttctggaaagctctaaaaataaggaaattatttgcacagttttttaataaaagatagcatcttgcacggttgctttttagagaaagaaaagtaaccaaattcggttttgtccaaattagtttcaatttgatactttctcacgttttacttcatgtttttatcgtttgggtttactaaattgcttagagttcaacatctttccctcagaactcactttttttgtctttgttcgactttcatagaattagatacaatttcctgctcgttccacacaaatttcctcctctcattgtttttatgtgagtttccttagatcaatacgtgtagccaggtcaacacatacaggttgtgtttgttgctacgtaaagaatgtcatctaggcacgaggactactatctctaatcattggagctttgtttggcaaggtcaaccatacctaaggggtactacaacaagttcatgatacttcaagcctggaattcctgaggcgcatacctactacaacaggcagaaggctatagatgtattgttactatatcacgcatcgtgcaaaatagcagatggtggtacccatcttgctccaggtgccacaaatcttcatctcaaatctcaactggatatcactgcacatcatgtggctgcacaaatattaagtttagatacaagctcagcttcattgctactgatggaacatgcgaagcagagttcttttttttgatagcatagccagaaaaatagtaggagaaccttagggcaaccttgttacagcagttacaacttctgagagtcccagcagccctagccgctattgtgtgtctgaaatttactcttgcagttgccatcaatatgtcagcctactatgtcatgaacagagtattctctattctatctattttaacaaatcatggaagacagaccttcataccatctaacatgcctagccatcctcaacaagagttgtatacacaagatgaagtacctagccttccggtcggccacacaagactctccagcaacatcaatggcaaaactatctacctgtagcaacgaaagaaacgaggtgtttgctttttgcgcacctatcaggagcaccatcacttttggatcatgaatgctttcctatagatatgaacctactgttatactatttgtggatatgtacatattgacttaacacctgcaagcacattgttgctaagtgttgatgtatggtagttgaatgctacttagtatgtattgtagtctaaatccactctacagctggtatcaactattatataaaaacaacgtcatatgcttatatttggtttcctccttacgcattatatactcatattatgtttaaatatttgttttacatacctgggtagtcacgccaaacccttaagctatatgtgct

SEQ ID NO: 209603 - DNA, 2742 bp, Zea Mays
gtcgggtgtcccttcctctcccagttctttctcgctttttctcctctctgcttttctttgttaccgtcggtgtcgggaattccgcttccgcacaaatatttcttttgctgtcagcttgctcaacggttctgtttgtttggtgagatgtgttcctctttctcctttgttgtgagtttccatttggtaggcatccttttccagattccttcgtggattagatccacgctcctctcgtcgagatcgtcttgctttttttctgagatggagattgggaccgaaaaggcaagtatttttctttggtagttttggcatgtgcagatagatcagaaagtgcttctacagtttacctcatttaactctattttggagattgaaactgaaaaggcaagtatttctttttggtaaagtctttcgcaagtggacatctagttccaaatttttttaaagggatctggttccaaattcatgcttggacctgccaggattctattgtttttggcgtatcctcttgctttggtacatgtagatcagcaagcaaatgtttttttatttcatttaatttcaatgagtgcaggtgacgttctgtttgtactttattgaacttcattatactattttcttttggtaaagttgttcgcatcaagtgcatgttgcattctttttagtttttaacggttctgctttcagcttgctcttgggtgcatttattttttagctgtgtttccattcctccaactgtgttttcattcttcctttgtcgaccatttcgactttgtggacaactaatttcctttgggtgaaatgatctgcacgaagttgagacttcgctttattttgtttatggacgcatcaagattccaacacgccgttatttttcttcgctggtttagtaatgaggaaatcccttttacggccctaattttagggtttagagttttaactgatatttttttaaaagttgttcctctctggtcccaactccatactatggtgtgtaaatttgccgcatcgctttttttttctggaaagctctaaaaataaggaaattatttgcacagttttttaataaaagatagcatcttgcacggttgctttttagagaaagaaaagtaaccaaattcggttttgtccaaattagtttcaatttgatactttctcacgttttacttcatgtttttatcgtttgggtttactaaattgcttagagttcaacatctttccctcagaactcactttttttgtctttgttcgactttcatagaattagatacaatttcctgctcgttccacacaaatttcctcctctcattgtttttatgtgagtttccttagatcaatacgtgtagccaggtcaacacatacaggttgtgtttgttgctacgtaaagaatgtcatctaggcacgaggactactatctctaatcattggagctttgtttggcaaggtcaaccatacctaaggggtactacaacaagttcatgatacttcaagcctggaattcctgaggcgcatacctactacaacaggttgcaaaacaatgacctccaactaatacaacccacaacagctgaagaagaaattcagctttctcaaccaccaaatttggaagacaagaccgttgaaaagctgctcaacatagatccggatatgtttcccgcagaaggctatagatgtattgttactatatcacgcatcgtgcaaaatagcagatggtggtacccatcttgctccaggtgccacaaatcttcatctcaaatctcaactggatatcactgcacatcatgtggctgcacaaatattaagtttagatacaagctcagcttcattgctactgatggaacatgcgaagcagagttcttttttttgatagcatagccagaaaaatagtaggagaaccttagggcaaccttgttacagcagttacaacttctgagagtcccagcagccctagccgctattgtgtgtctgaaatttactcttgcagttgccatcaatatgtcagcctactatgtcatgaacagagtattctctattctatctattttaacaaatcatggaagacagaccttcataccatctaacatgcctagccatcctcaacaagagttgtatacacaagatgaagtacctagccttccggtcggccacacaagactctccagcaacatcaatggcaaaactatctacctgtagcaacgaaagaaacgaggcacgatgacgtgttctaatatattcagatatgccacatgacacagagggtgatgacagcgcataagtgaactcaacaagcaagagatatcgtcaccaccaaaatggataaaacatagccacactagcaaaggcataccagatcttacaaaccccaaaaagaaaagctcctaaatcgtcatcaacttcgtgaaggtgtttgctttttgcgcacctatcaggagcaccatcacttttggatcatgaatgctttcctatagatatgaacctactgttatactatttgtggatatgtacatattgacttaacacctgcaagcacattgttgctaagtgttgatgtatggtagttgaatgctacttagtatgtattgtagtctaaatccactctacagctggtatcaactattatataaaaacaacgtcatatgcttatatttggtttcctccttacgcattatatactcatattatgtttaaatatttgttttacatacctgggtagtcacgccaaacccttaagctatatgtgct

SEQ ID NO: 209604 - DNA, 2662 bp, Zea Mays
ctccatccgtcgggtgtcccttcctctcccagttctttctcgctttttctcctctctgcttttctttgttaccgtcggtgtcgggaattccgcttccgcacaaatatttcttttgctgtcagcttgctcaacggttctgtttgtttggtgagatgtgttcctctttctcctttgttgtgagtttccatttggtaggcatccttttccagattccttcgtggattagatccacgctcctctcgtcgagatcgtcttgctttttttctgagatggagattgggaccgaaaaggcaagtatttttctttggtagttttggcatgtgcagatagatcagaaagtgcttctacagtttacctcatttaactctattttggagattgaaactgaaaaggcaagtatttctttttggtaaagtctttcgcaagtggacatctagttccaaatttttttaaagggatctggttccaaattcatgcttggacctgccaggattctattgtttttggcgtatcctcttgctttggtacatgtagatcagcaagcaaatgtttttttatttcatttaatttcaatgagtgcaggtgacgttctgtttgtactttattgaacttcattatactattttcttttggtaaagttgttcgcatcaagtgcatgttgcattctttttagtttttaacggttctgctttcagcttgctcttgggtgcatttattttttagctgtgtttccattcctccaactgtgttttcattcttcctttgtcgaccatttcgactttgtggacaactaatttcctttgggtgaaatgatctgcacgaagttgagacttcgctttattttgtttatggacgcatcaagattccaacacgccgttatttttcttcgctggtttagtaatgaggaaatcccttttacggccctaattttagggtttagagttttaactgatatttttttaaaagttgttcctctctggtcccaactccatactatggtgtgtaaatttgccgcatcgctttttttttctggaaagctctaaaaataaggaaattatttgcacagttttttaataaaagatagcatcttgcacggttgctttttagagaaagaaaagtaaccaaattcggttttgtccaaattagtttcaatttgatactttctcacgttttacttcatgtttttatcgtttgggtttactaaattgcttagagttcaacatctttccctcagaactcactttttttgtctttgttcgactttcatagaattagatacaatttcctgctcgttccacacaaatttcctcctctcattgtttttatgtgagtttccttagatcaatacgtgtagccaggtcaacacatacaggttgtgtttgttgctacgtaaagaatgtcatctaggcacgaggactactatctctaatcattggagctttgtttggcaaggtcaaccatacctaaggggtactacaacaagttcatgatacttcaagcctggaattcctgaggcgcatacctactacaacaggttgcaaaacaatgacctccaactaatacaacccacaacagctgaagaagaaattcagctttctcaaccaccaaatttggaagacaagaccgttgaaaagctgctcaacatagatccggatatgtttcccgcagaaggctatagatgtattgttactatatcacgcatcgtgcaaaatagcagatggtggtacccatcttgctccaggtgccacaaatcttcatctcaaatctcaactggatatcactgcacatcatgtggctgcacaaatattaagtttagatacaagctcagcttcattgctactgatggaacatgcgaagcagagttcttttttttgatagcatagccagaaaaatagtaggagaaccttagggcaaccttgttacagcagttacaacttctgagagtcccagcagccctagccgctattgtgtgtctgaaatttactcttgcagttgccatcaatatgtcagcctactatgtcatgaacagagtattctctattctatctattttaacaaatcatggaagacagaccttcataccatctaacatgcctagccatcctcaacaagagttgtatacacaagatgaagtacctagccttccggtcggccacacaagactctccagcaacatcaatggcaaaactatctacctgtagcaacgaaagaaacgaggcacgatgacgtgttctaatatattcagatatgccacatgacacagagggtgatgacagcgcataagtgaactcaacaagcaagagatatcgtcaccaccaaaatggtgtttgctttttgcgcacctatcaggagcaccatcacttttggatcatgaatgctttcctatagatatgaacctactgttatactatttgtggatatgtacatattgacttaacacctgcaagcacattgttgctaagtgttgatgtatggtagttgaatgctacttagtatgtattgtagtctaaatccactctacagctggtatcaactattatataaaaacaacgtcatatgcttatatttggtttcctccttacgcattatatactcatattatgtttaaatatttgttttacatacctgggtagtcacgccaaacccttaagctatatgtgct

SEQ ID NO: 209605 - DNA, 1420 bp, Zea Mays
cgagtacctacaaccggcccgcgagccctgccaccggcaccgccccaccctgcccgcgagttcgccgtcgcagtggccgactccttgccctgccaccggcaccaccctgccctgcccgcgagttcgtcgttgcagtcgcctgcagagcgccgcgagttcctcgtctttacctgcccagcgtcgctgcacctccccgtcgccccgtgagttcgccgtcgcagttgcatcttctccgtgcctcctcggattctagcgcgatggaccgaaggccagcgccaaaatcccgtcggtctgcattgaatgccgccataggtacgatttctggaggctggcatccatcgtcacaagataatcgtcgcagccccacgaacgacagtcatgcaacacatgcacaacctgaagctttgtcggcagctgcatctgtgcaaaaccctctggacaacagcattgatgcctcgtggatgcttcctgattacaacatactaccctcccaagataactactataggaatctgatgaaccaagatgatacagataatttaggcttggaggattgcgtgcaagttgatcctcttgtagctaatatgaattcccagacaaaaccaaagggccgctcaaaaaatttcactgatgatgaggacattctattgttgtcagtgtatctcaatgttagcaaagatcctactgctggaagggaccaaaaagatagcagattttgggaaagaattgaaaagtattatcatgtcaatttaacatttgaatcagatcgcaattgctcttcattgcgtcatcgatggggtataatccaaaaggaagtaagtcttttccaaagttactatgaagccatacaaaggaagaatgaaagtggaaagacaatgaatgacaagacacgagccaaagtggtcatcaataaaggactccacaatggctaccaagaagctggatcctcacaacggtaatgaagacgatggacatgacacccctagaccaccaggaaggaaagccgagaaagaaaaattgcgagcacggaagcaagaggacaatgacaatgatgcattgatggaagaactaaaaaaattagagagtcaagattggagatagaaaatgatcgaaaggcacgagaagacaagttattagagctggagagtagtaaacttgatcttgagcgtgaacaacgtgacgacaaggtgatgagaaccgacacaagtacaatggatgatgagtcaaaacaatattttaagttagtgaaagaggaaattttggcgcgacgttttgggagaaagcaagattgaggggtcatgttattagagttggttttagtcatactgaacatatttgtattttttctgtctcttcaatatagtatttttcctgaaacgactacaagatctgtttccaatatagtattttttttcgttgc

SEQ ID NO: 209606 - DNA, 1525 bp, Zea Mays
gagcggtagcggagtactaagggggtggagagagggagcactgtctcatgcatgaaagaaagtctccaaaacaaaagatttggtccagagcgcggccacacgggcccagcaatagcaacgtcacatggtggttgccatcgtcacgtcgagctctccctctccaccaactaatagttcctgacggtggagcagaaattcattaagagcatatagggattcacaagtggtacatattttgagcccaacaatcttgctgccatcgatactcctgatgcaagtggaggatttggtgacatgttttgctgtgaagtttgcgaaccatggtaaaccaacacctattgctttgatataatcatctcgatcactggttgatgtatttgaacaggacatgaatgatggcaaagttgtatgcgtcgttggatttgcctttctgtttgcagttgatgtaaggaaatgctatgttgaaacttttgccacttttgtgttatcatgattaagcagtgcttcccggctgggaaatgaaagtcttggattgtctttggtggcaggtgacatcaaatccttgtgtttcttgtgagattaatttctttcacatgaaaaaatggcgggctacatagattattagttatgcaccagataggaaatgcacagactttgtaggtgtgacaaagaggcaagataatatattttgtggatgtatcttagattttacaatgctgatgaggtggtgccttgcattttgtgacatggttagtgggtctttctacgtggattgcattatgcagggacgactagttccttacccaaatgtggttaaagttaggaacagtcttctccctgaaattgatttagtgatttcaaacagacttatatgtgtgatgcaggtatggttattctgctcatggaagatctacagggaagaaactgaggtagcatataactgccgcaagggaaaatatggtgtagcagatgaggatataatcttatatggtcaatgtgtttgaattggtccaaccattgatatttcttcgcggttgctagacttgagagtcgcagttttgcatagtcctatattctatctgcactaagagtaatatatacagccaagcggatgtttggtttaacatttacaaggtatgtttggtccttttgtttttggaattaatggttgtccgatgcttgccattcatatgagttctaatatcatgcccccttaaagtactcatcatcaaaagtttccatgtgaatgttttaaatgtagatttaaagggttgaaagacatgaaacagttattcaaacaggatcttaagtgtcgtgaaagactacaggtgaggttcaacttggcaaattgtttttctagtaactaaggagcaacaatgctatgtattttagcttgacttatatatctaagtacttacatttttggaatcgggcaaacagtgatagtttgaatcacatgttttgccaaaaggaattattagaactgttcaaagttgggaaaaaatacatatttatgctttcttat

SEQ ID NO: 209607 - DNA, 1338 bp, Zea Mays
ttcactgcaactgtgttccctcgctctcctccctcctccctcttcacctcagcacgggctctcttccctccgcttcctcccgtctcctctcctctctcgcacaatgccattgcgcggtgcgtgagagggagtcagacacacagacgaggaggaagagggggtagccagccagccaaaggcgaaagcgagaagaagaagaaaaaaggacattgcgcccgtgcaaggcgtgcgggcaggccggcgatgctgcggaggactgtgcccgaccgggccgcggactcgtccggctccgccgggggcggggacgcccggccccgcgccgacggctccggagccgcgctcttcgccgtgccgcgcctcttcgtcggattcgccgccaagcgcgcgccggacgcggagtcgtcgaggagcccgacgtcgccgctagaccccaaggcgctgctgctccggtcgccgaggagggcctggggcgcgccgggactagtcgacgccctcgccgccgacaccgctgccgccaactgcctgctcagcccgcgcctgcggctcgtcaggcagcacagctccccgcccaaggaatgcggcggcggcggaggaggacactcgcagccggagctcggcaagacgatgtcctgccccgcgccggacaccgcggccgccgccgccgccaccgccatgtcggtgccgtgcagcaggttccagttccgccgcggggatctgaagtctggtcctgaggaggccactaggtcggacaccggcgcgtacctcgtcagcaacggcaacgccaagcgcaactcgttcgacttcggtaagctcccgggcccgggctcgctgccagtgccagcgtcccggcgcttcgtgggctcggtctccgcgagcgagatcgagcagtcggaggactacacccgcgtcatcgcgcgtggccccaaccccaagacgacgcacatcttcggcgactgcatcctggagccccacacggccggggccagcgacgacgaggccgccgccgtggaatcggaggatggagccgccgccgggcgctacttcgtggtcaagtgcgccgcggaggccgatggtttcctcagctcctgcttcgcctgcaacaagaagctcgacggcaacgacatttacatctaccggtatgccattatctaatctaatctgacctgacctgacggggggaagggtttcagagaagagatactggctttatcagaatgagacgttgatccgagtgaagtagaactgcgcaccaaactgattcatgcagtgttcagctgacagcaatgctagttttttttcggagaatgaaaaaaaatgttaaaatcgagctagacaaca

SEQ ID NO: 209608 - DNA, 1729 bp, Zea Mays
tgcatcagtgccgaggtcgcattcaacaagtttgatgatcctttctttgcctcgtggatggagtcattgcaaccatcgttcagaggtgttgggcgtcagacgatgagaaatgattgtattgctagattcaagatgatgaggcaagagctaaggaatgagctacagagtattaactctcggatttgcttgacatctgatctttggacctcaaatcagaagttgggttatctttgcttgacagcccactacattgatgcaaactttatcttgaaaaagaagactattgcattcaaagatgtcaaatatccacacacgggcctagcagtcgaagaagtaattacgaagtgtctcatagagtgggggataaaagagaaggtgtttactatcacattggataatgcctccaacaatcaatcagcatgtgacctccttcgagaaagtggacgttcagacatgttatttggaggcgagcatcttcatatccgatgttgtgcacatatcttgaatctcctagttcaagatggaatggcaattgctcatggagcaatcgataagattcgtgatctggtcagacatatcatatcctcaccctctcgcatacaagcttttaatgagattgctgagaggtctggattgccttcaaaggccggattaattcttgatgttccaaatcgttggaattcgacacacaacatgattatggaggccattgagtacaaagttgtcttgaagagatatgctgaggaacaacttgagccttcaccagatgatgaagagtggacaaattctgaggcaattggagagtttcttggggcatttgaggaagctacaaaagcattctcagcacatagaagtccaacatctcatttgtttttgcataatgtgttatgtatccatcaagctctaagaaatgaaaattggcaaatcaattgtgtgcttgaggatttggcactagcaatggattctaagttcgataaatactgggagaagggcaagtataatatggcacttgtcatagccactatacttgacccgtcaaagaagatggattttttggactttttttatgagaagacgtgtcaacagtttatcgacatccagataaacatgtccttggccaaacaatggttcaccaaattttttggtgaatatgcaaaaatcgttcaaaaagatactacagtctcacctattgttgctacaaatactagtactttgggcccaccgattcttggaaaaagaaggttggataaagaattttctcagtggtcccaaacaagaggaagacgtcttgcaaagtctgagcttgacgcatacttagaagaagaatttgtgagaacagatgaaagatttgaaattctaagttggtggaggacaaatgcaaacaaatacccagtgctttcagctatggcgcgtgatttattagcaatacctttgagcactgttccttcggagtctgcttttagcgccggtggtcgcattcttgctgataatcgaagcttaatgacaccagaaacacttgaatgccttgtatgttgcaaggattggttgtatgagtacccaaatattcaagtttatccagttgtgtttggacccagctagcagcaacactcttcctaccagtggaaatggggagatttatgcgtcgtccggtgggcttctgatgctatctagatgtcccctttcattgttgctagcttcaagcttgatcacagactcttttcactgctac

SEQ ID NO: 209609 - DNA, 2080 bp, Zea Mays
tcttggaatttggccgccgtctgcgttgcttgggtggggaaggagcaggcggccaggcgcagagccgcaaaagcagacgcgaaaaagcccaggcccgagccgaagcggggaggcgacaccgctgcacctgcactaccgctcgcacggtcagcgatttgccgcctcgcgggagccagctttggcgtcggcgtcggcgtcatcgtcggcggggagttcccggagagggattccggtgaggatgagcagcggcggcggtggagggggagccaggggaccgtcggggcccgtgccggcgtccgcgaggaagctcgtgcaggggctcaaggagatcgtgaaccgccccgacgcggagatctacgcagcgctgcgggagtgcaacatggacccggacgaggcggtcagccgcctcctctcccaagatacttttcaagaggtaaagagcaagcgtgataggaaaaaagaggttaaagaaactccagagccaagatctcgaggagcaagtaactccagtcgatccagtagaggtggtgtggaccgtgctggacgaggcaattcagttcagtctggatcgagtggcactgattatatggcttcaaggtcatcaatattgggacctgctgtggcagctaccaatgccatgcagaagccaacagttcctagtttgtccacaaacaaagatgtggttcctaatggatcagttggagcacaacaatcatcatctggttttcagcacaattggtttggggtgccagaagagaacaactccactgcagttgaagcaacactgtcttccgaaagacacttggaaattgtggaggatgacaatcatttcaacgacgggttattgcagaactcaagcgcttaccaggctcaagtgcattcctatgttgataatgaagttgggatttccaatgttgatgcagaatcagcttcgatgaacttccagcatttaagcctgcagaatgaagatatagctgcaaccaagtctgctgaggataaccctgcggttatactccctgatcatctacaagctgcaaatgcagattgtgctcatttgagctttggtagttttgaatctggtgccttctctggcttgctttcatcaaaggtcccaaaaggcagtttggaggacgacgaggtgctcattccagatgaatcccgatcagttaatcgaatagatgttaggaatcaagattactatgatgacgatgctctaaattcttcagaaaatgtggatgttgagacaagaattggtaatatggataacattgatggaccttcagtttcagaatctgatgcactgaggcagggtgccatagatgtgcctggtcttcaatatgacctgccatcagtttcaagtcatgcatattcaaacacaacacagccaagtacaatggaagaaccacaaggaaacacacaagcacaacccctttcccatttttctggcttactgcaagcaaatactctacccaataacttgttggggtcaaatcttacccctcttcgggagtttgacttctcccagttccttcagacacagtcagctacaaaatataacccatctgttgcacctaataatctgccaccaatctccatgcaagagacttcaaaacagggaggcttccccaatactcagtctacgcaacatgttcccagtacaagcatttcgtcgggtcttcctctcccacaacaattgcctgtatactctcagccaactctgccccttgggccttttaccagcctggttggctatccatatttgcctcagaactattacctaccttcagcgccattccagcaagcgtactcaagtaatgggcctttccatcaatctgctgctcctgccgtgcctggagctggtatgaagtatccgatgccacaatacaagagcagccctcctgcttcgaccctaccacaaccatcatcactctctggttacggagggttcggaagtgcaaataatatccctggaaatttcagccaaaatcagggtgctcccgctgcacctacaactttgggatttgatgaagctttaggcacacaattcaaacaccccaatcattatgcagcactacagcag

SEQ ID NO: 209610 - DNA, 1887 bp, Zea Mays
gatcggcttgaaaaatatgattacaagaggtatacaacaactcattgttgcaccattacactatgttcaagataaattgtcaacaatggagtcaacagagataatcaaggaggatgcaagtgagagggaatctgatgaaatcgaagtttctagtgcaacacatgataagaaggctgaagcaataactgacgattcaaggcaaaattacaggacagcaatcgccagccattttctattcagagttcatacagatcctgtacatgaggaggctttctctatattgaagaagcttcagataattgagaaagatgttagctccagtgatttttgtacacggagggaatttgcaagatggtttgttaagttaagctcaaagtttgagaggaaaaggatgtgcaggattgttcctaataaattaacttctgacacagtccaatgtgcctttgatgatgtaaatattgacgacccagatttcctgtatatccaatttccagatttgctatttgagaagctcacactgtaaaagtctaattgtctaatttggcgatggaaagctttaggagaatctggtatcgtatccagcaagttatcaaactccttggaaatgttgacaagtggctctccttgttccaagggaaataccttgttcctacctgatagttacctatctcgattcgatcttgtcaactggaaagtgcttgttgagcatccacgcgcattgagaatagacgaaaaggaaatactagacgccttcaaccgggcaaacctgtaactaaagcgcaagcagctgctgcactgactagtggccgaatgaaggaagcagttcatgaagaattgaataaacttgaagcagaaaaccaagcccatctttctcttatagctgaaataatggaagagttaattagtaggggagatatacaacaacaatgggagcaaaagatgaaaaaggagcaagaacgggctcttgaagttgacaataatcttcaacatgtattgcatgagcatgcaaatgagaggacagacagagaagaggaactagcagacttgttgaaagaaagagcagctctagaatgccagaatcaggaactcataaatttaaggtcagaaattgacggcatgtatgatagattggcaactgagaacgaagaggtcatggctgatcagcagactttggaaaacctgatgtctgacatgaccagcaagcatcaagctgtcaatgaagctaaatcatatcttgaagctgagaaggaagctcttactatgttaaggacttgggtggaagatgaagcaggacgtgtccatgaacgagctgagacacttgagaaggctttgagaagatggcgaatcccagaagattgatccctccaaactaactgtgctttgcataggaaaagtcttgttcaaagtttttggagctacttggttccagagcatctgccatcagatctgaaaaattctcaatggaatggaatggtcgtgccataatgttctttgagatggttcattatcctttggtgcttcttggcatcttgttgccatcttaggggccgtctgtatcccttcattttggagaaattataatctatttaataaagtaggctatttaactttaaatttaacattccataactttccaaagttcaaatataagcctatcacaaaactatgttactttagagaaattgattttatgtatttctaaacaatgttactctgtaatttataacacactctttgactcacctcctgtagtagaaatatagcaaataaatatctctccatatggtcaacagtggtacactaatatattttgtacaaagctatattaagctatattagcttaatggatctatatctaaattacgattattagattggaattcaatt

SEQ ID NO: 209611 - DNA, 2000 bp, Zea Mays
tccatatttgaagttggcttaccactgcttgtttcatgatataatccttttattgcttactccttcagatcggcttgaaaaatatgattacaagaggtatacaacaactcattgttgcaccattacactatgttcaagataaattgtcaacaatggagtcaacagagataatcaaggaggatgcaagtgagagggaatctgatgaaatcgaagtttctagtgcaacacatgataagaaggctgaagcaataactgacgattcaaggcaaaattacaggacagcaatcgccagccattttctattcagagttcatacagatcctgtacatgaggaggctttctctatattgaagaagcttcagataattgagaaagatgttagctccagtgatttttgtacacggagggaatttgcaagatggtttgttaagttaagctcaaagtttgagaggaaaaggatgtgcaggattgttcctaataaattaacttctgacacagtccaatgtgcctttgatgatgtaaatattgacgacccagatttcctgtatatccaatctttaggagaatctggtatcgtatccagcaagttatcaaactccttggaaatgttgacaagtggctctccttgttccaagggaaataccttgttcctacctgatagttacctatctcgattcgatcttgtcaactggaaagtgcttgttgagcatccacgcgcattgagaatagacgaaaagataccgagtcaaaatgtttgcattttggatctgcgagcttgcccagatgtgtctccatccatgctcatagagctaatggctggtgaaaacaacatcatcagcagagtttttggaaatactagacgccttcaaccgggcaaacctgtaactaaagcgcaagcagctgctgcactgactagtggccgaatgaaggaagcagttcatgaagaattgaataaacttgaagcagaaaaccaagcccatctttctcttatagctgaaataatggaagagttaattagtaggggagatatacaacaacaatgggagcaaaagatgaaaaaggagcaagaacgggctcttgaagttgacaataatcttcaacatgtattgcatgagcatgcaaatgagaggacagacagagaagaggaactagcagacttgttgaaagaaagagcagctctagaatgccagaatcaggaactcataaatttaaggtcagaaattgacggcatgtatgatagattggcaactgagaacgaagaggtcatggctgatcagcagactttggaaaacctgatgtctgacatgaccagcaagcatcaagctgtcaatgaagctaaatcatatcttgaagctgagaaggaagctcttactatgttaaggacttgggtggaagatgaagcaggacgtgtccatgaacgagctgagacacttgagaaggctttgagaagatggcgaatcccagaagattgatccctccaaactaactgtgctttgcataggaaaagtcttgttcaaagtttttggagctacttggttccagagcatctgccatcagatctgaaaaattctcaatggaatggaatggtcgtgccataatgttctttgagatggttcattatcctttggtgcttcttggcatcttgttgccatcttaggggccgtctgtatcccttcattttggagaaattataatctatttaataaagtaggctatttaactttaaatttaacattccataactttccaaagttcaaatataagcctatcacaaaactatgttactttagagaaattgattttatgtatttctaaacaatgttactctgtaatttataacacactctttgactcacctcctgtagtagaaatatagcaaataaatatctctccatatggtcaacagtggtacactaatatattttgtacaaagctatattaagctatattagcttaatggatctatatctaaattacgattattagattggaattcaatt

SEQ ID NO: 209612 - DNA, 1344 bp, Zea Mays
tgcaaatatctactctatgaaaaggacagctatttggaaatatctgaacagaactctcccaagttgctgaacaaaaccaaagacagaaggaaccaccacaatccatacagaaatggtagggttcttcggcgcctctgctgcatctgatcactgtcgtttgctgacaacaaatggatcagttcaccatgaactgattagacgacaccatggcagaccaagaagtgcgatcaggtgctgcagcagcacggcaaggggaaggaccagggactattactaccaggtgctgggcatcgcaattcaatccacacctcagcagatcaaggaggcttacaggaaactccagaagcaacaccatccagacatcgccggctacaagggccacgactacacgctgctgctgaacgaggcgtacaaggttctgatgcgggatgtttccagttccaggcacgccgatggaaggggcaggagtagggtggggtcaggagccggttacaccggggacggatacagttcttgggaagggcccgtgagaagccaagctctcttcgtggacgagaacaagtgcataggatgccgggagtgcgtgcaccatgccgctaggacgttcgccatggacgacgttctcggcagcgcgcacgtggaggtccagttcggcgacctggagcagcagattcagctggctgtggagtcctgccccgtggactgcatccactgggtcgagagccacgacctgcccgtgctggagttcctgtcccggccgcagccgaaggaaggccacggcgtattcggcggcgggtgggagcgccccgggaacgtgtttgcggcggcgaagaacttcgccaggagactggagagggagaagcagcgggaggagctggaacgggatcagccctccgggggcctcgacggccgcgaggcggagacggaggcgcaggccgaggcgaggcgcagcgcgtgggaggagctcaggtggaagcccctgcttgatgcttggaatgggctgataggtggtcgttgacgctgcaggaggttgaagagaagctcagcgctggaagctgaacccgtaacatctgcagctgcagaaatagtggatgtgccaaggacaaaatagcacctttgtggccgtgggttatcaaacagtaggtgtcgtcgtaactcgtaaatgatcatgtgtaattacagattacaaaaaatgtgtaggaatagtagtcaaatatatgtgtgtagatgttggcatattgcacaggattatgtcccctttatatatatggtggttaatggaaatggcagggtggtacatcactgtatactacagacactagtagtttccggagaaaatctatt

SEQ ID NO: 209613 - DNA, 1730 bp, Zea Mays
agacgaaaaaccgagcccacgcgagaagaaaaaaagtggctaaaaatggaggcgtccgcggaggcggcggccgccgccgccgctgcgcgaacgttgaggtgggctggccgcgcggggcacctgggcggcgtcccgcgcgccgtcgtgttcgccgcggtgggcgcgttcgccaaggcgtgcgcctcgctgctcaacaccaccacggtccacaacgccgacgcgctcctccgcctcgtctcggcgcgggctcccgggacgccgctcctcaccgtcagcaatcacatgtccacatgacccgcttatgtggggattcaagggttttccaacttcggatgcaaagcttggaaggtgggtgctgacagcagaagatatatgcttcaagaatgtagtcatgtcctacatgtttcgacttggtaacatttcatttgaagatatggattgttgccttttgatagaggactacaaggcattttaaggtgtatccagtgaagcatgcaaaataggaaaacgtctagcacaatcctattaaatccagcaaacacctgtctgttccgtacttatgaaatccagtttcacttcaactgccagcaacctttttagaaattcagtttcatggcactcaattcacccaccaagactagcgaattgcagagggttggcatagcttgtcttcttgccataatatcttcagtccctcatttgcagtattgtgtatcagataagattagctgatgcttgctaatctatgtgctgtggtactagtacaagaagcaaatggtatcaaatgtagcgcctcattatattttgttcaactgatattcagatgtccaggcccttcacattatttggttattcttattttttccatttctaaggtgacaaataactgtgcgcacagggaaatgcataccaatcacgagagggggtgggatttatcaagaacacatgaatgaagcccttgacgtgcttagaaatggaggctggctgcatacattccctgaaggaaaaatagcccaagaagatcagccgattagaagattgaagtggggaacggccagtcttattgtccgagcacctataactccaatagttttgccaattgttcactctggtttcgaaaaggtcatgccagaaaactcgttctttggacggcgaccaccggtgccactctgcagtaagaagatagacatcattgttggagagccaatagagtttgacttgccaagcttgaagcaagaagcatcaacggtaccccatgactcatcctctgaacggaaggggtggccggccattacaccagatgggctggacgaggccgcccagagatggctttaccagaagatgtcagacaaggtccagtctgtgatggagagactgcggaaaacagttaccaaccttaagcagcgttgatcttcatctatcaggcaataccttgttgaactgctgattaggattctttaaccagcttgagttggtggatacagaaatggacaagtggtcgtcacacaagttcgtcaaagtattggtaataatagaattagagctcagattgtttcattttttagtctttttttagttattgttttgaaaggtttcttcattatttacaatcaactgttcaggttgcctgccagttttactgaggcatgaataaaaaaaggcttttgatattcagttgcaaaatcaccatccatttacctgtcttatgtgtagtggtttattttttttgt

SEQ ID NO: 209614 - DNA, 1604 bp, Zea Mays
agacgaaaaaccgagcccacgcgagaagaaaaaaagtggctaaaaatggaggcgtccgcggaggcggcggccgccgccgccgctgcgcgaacgttgaggtgggctggccgcgcggggcacctgggcggcgtcccgcgcgccgtcgtgttcgccgcggtgggcgcgttcgccaaggcgtgcgcctcgctgctcaacaccaccacggtccacaacgccgacgcgctcctccgcctcgtctcggcgcgggctcccgggacgccgctcctcaccgtcagcaatcacatgtccacgttagatgacccgcttatgtggggattcaagggttttccaacttcggatgcaaagcttggaaggtgggtgctgacagcagaagatatatgcttcaagaatgtagtcatgtcctacatgtttcgacttggtaacatttcatttgaagatatggattgttgccttttgatagaggactacaaggcattttaaggtgtatccagtgaagcatgcaaaataggaaaacgtctagcacaatcctattaaatccagcaaacacctgtctgttccgtacttatgaaatccagtttcacttcaactgccagcaacctttttagaaattcagtttcatggcactcaattcacccaccaagactagcgaattgcagagggttggcatagcttgtcttcttgccataatatcttcagtccctcatttgcagtattgtgtatcagataagattagctgatgcttgctaatctatgtgctgtggtactagtacaagaagcaaatggtatcaaatggaaatgcataccaatcacgagagggggtgggatttatcaagaacacatgaatgaagcccttgacgtgcttagaaatggaggctgggaaaaatagcccaagaagatcagccgattagaagattgaagtggggaacggccagtcttattgtccgagcacctataactccaatagttttgccaattgttcactctggtttcgaaaaggtcatgccagaaaactcgttctttggacggcgaccaccggtgccactctgcagtaagaagatagacatcattgttggagagccaatagagtttgacttgccaagcttgaagcaagaagcatcaacggtaccccatgactcatcctctgaacggaaggggtggccggccattacaccagatgggctggacgaggccgcccagagatggctttaccagaagatgtcagacaaggtccagtctgtgatggagagactgcggaaaacagttaccaaccttaagcagcgttgatcttcatctatcaggcaataccttgttgaactgctgattaggattctttaaccagcttgagttggtggatacagaaatggacaagtggtcgtcacacaagttcgtcaaagtattggtaataatagaattagagctcagattgtttcattttttagtctttttttagttattgttttgaaaggtttcttcattatttacaatcaactgttcaggttgcctgccagttttactgaggcatgaataaaaaaaggcttttgatattcagttgcaaaatcaccatccatttacctgtcttatgtgtagtggtttattttttttgt

SEQ ID NO: 209615 - DNA, 1526 bp, Zea Mays
aacacgataaataaaaaatgaatggagtattttctattaacataatatatgacttaattattggagccttaattttttttgtggccctaaaattttcaaatgaaattatatttaaatttttgggactcaaatataagacttgtttttagagggagtggttttttgacttttgttttataataaagaaaggtaaatcttgtttgtgaaaacgcgaatccagcaaagagcgagcaaagcggcaaatggcgcgtccagtggagacccaccgaaacctaccagtgtccctacatcgtcagaggggcatagacgaaaaaccgagcccacgcgagaagaaaaaaagtggctaaaaatggaggcgtccgcggaggcggcggccgccgccgccgctgcgcgaacgttgaggtgggctggccgcgcggggcacctgggcggcgtcccgcgcgccgtcgtgttcgccgcggtgggcgcgttcgccaaggcgtgcgcctcgctgctcaacaccaccacggtccacaacgccgacgcgctcctccgcctcgtctcggcgcgggctcccgggacgccgctcctcaccgtcagcaatcacatgtccacgttagatgacccgcttatgtggggattcaagggttttccaacttcggatgcaaagcttggaaggtgggtgctgacagcagaagatatatgcttcaagaatgtagtcatgtcctacatgtttcgacttgggaaatgcataccaatcacgagagggggtgggatttatcaagaacacatgaatgaagcccttgacgtgcttagaaatggaggctggcccaagaagatcagccgattagaagattgaagtggggaacggccagtcttattgtccgagcacctataactccaatagttttgccaattgttcactctggtttcgaaaaggtcatgccagaaaactcgttctttggacggcgaccaccggtgccactctgcagtaagaagatagacatcattgttggagagccaatagagtttgacttgccaagcttgaagcaagaagcatcaacggtaccccatgactcatcctctgaacggaaggggtggccggccattacaccagatgggctggacgaggccgcccagagatggctttaccagaagatgtcagacaaggtccagtctgtgatggagagactgcggaaaacagttaccaaccttaagcagcgttgatcttcatctatcaggcaataccttgttgaactgctgattaggattctttaaccagcttgagttggtggatacagaaatggacaagtggtcgtcacacaagttcgtcaaagtattggtaataatagaattagagctcagattgtttcattttttagtctttttttagttattgttttgaaaggtttcttcattatttacaatcaactgttcaggttgcctgccagttttactgaggcatgaataaaaaaaggcttttgatattcagttgcaaaatcaccatccatttacctgtcttatgtgtagtggtttattttttttgt

SEQ ID NO: 209616 - DNA, 1167 bp, Zea Mays
tagtagcccttctagaactctcccatccggttcctaccgagttttccttccccacctccccgccccacccatcgccgaatcggagtcccgctcgcgtccacccttgccagagctcgagagctaccttctggtccggttggacagatcccttcgggcgcagcgtccccccgagattattcaggcaaggtgctgtaacataagatgcaagggggaagaggtgggaggcagggtttgttcggttttggggacccttttgttggtttcggcagctttggacagccagggaacataatgtccggtttctttggtggcgcaaatccctttgatgaccctttcttcacaaacccctttggtggcatgatgcaacctagtttctcaacccctttcagcggcatgatgcaacctagcttcatgaacccctttggtagcatgatgcaacctagcttgcttggatcaagtatgtttgcatcccatggcaatctcaatggaggcacttttggaagccagacacatctcaatcaaggcatgagcaatgccagtggtttcattcagcaagcctctgaatcgagcaggcctaaagggccaattatcaaggagttgtcttcagatgacgaggataaaccagaggatgataaagaagatggcaagaagaatggcaactttaggaagcatccaagggaaagcagagaaccgtgtgtggaggacccagatgaagaagaagaagaagataataaaagacctaaacatagacaatttgggagggagctcagcagatctggtacatcacgtctacagcctcagacatttatgtttcagagttcaactgttacatatggtggtccaaatggagcctgttatacatcttcaacgactaggaagactggtgcaaacggaattacactggaagaaagcaaggaggcagacacaactactggtaaagccacccacaggatctcacgtggcattggcattaagggtcactcgttaacaagaaaccttaactccgatggacgtgtgaacacccttcaaactttacacaacttgaatgaagatgagcttggtgggtttgaagaatcatggcaaagaaatgccaggcagaatatgcctggctgggatactagaatgaacatgcttggcaacgcggtggtatcttgagttctttacaca

SEQ ID NO: 209617 - DNA, 1914 bp, Zea Mays
tagtagcccttctagaactctcccatccggttcctaccgagttttccttccccacctccccgccccacccatcgccgaatcggagtcccgctcgcgtccacccttgccagagctcgagagctaccttctggtccggttggacagatcccttcgggcgcagcgtccccccgagattattcaggcaaggtgctgtaacataagatgcaagggggaagaggtgggaggcagggtttgttcggttttggggacccttttgttggtttcggcagctttggacagccagggaacataatgtccggtttctttggtggcgcaaatccctttgatgaccctttcttcacaaacccctttggtggcatgatgcaacctagtttctcaacccctttcagcggcatgatgcaacctagcttcatgaacccctttggtagcatgatgcaacctagcttgcttggatcaagtatgtttgcatcccatggcaatctcaatggaggcacttttggaagccagacacatctcaatcaaggcatgagcaatgccagtggtttcattcagcaagcctctgaatcgagcaggcctaaagggccaattatcaaggagttgtcttcagatgacgaggataaaccagaggatgataaagaagatggcaagaagaatggcaactttaggaagcatccaagggaaagcagagaaccgtgtgtggaggacccagatgaagaagaagaagaagataataaaagacctaaacatagacaatttgggagggagctcagcagatctggtacatcacgtctacagcctcagacatttatgtttcagagttcaactgttacatatggtggtccaaatggagcctgttatacatcttcaacgactaggaagactggtgcaaacggagtaagtatatatcatcatctcatgaatgtttttcttcatctgccgcagtttatcccttccccagaccccacacgtggaagctttggcactgggtctcccccttttttttgcatatttgtagggtgaagggcaggcctggtgaagtggtgagagttgtctcattgagtactcatattacactggaagaaagcaaggaggcagacacaactactggtaaagccacccacaggatctcacgtggcattggcattaagggtcactcgttaacaagaaaccttaactccgatggacgtgtgaacacccttcaaactttacacaacttgaatgaagatgagcttggtgggtttgaagaatcatggcaaagaaatgccaggcagaatatgcctggctgggatactagaatgaacatgcttggcaacggaaatcttcacacgggcttccgagatgcgaatcaaaggccagcacttcctgccccaggacgatcccgtaaagcgaattcctcatggaacttccagaatggctcttccacgggtcgtgcaccccgcacatgagttcttctgtgccatacgcaggatcacagtgctcagtaccggtcgcatccactattttgcagaaaaatgttgcaacccgagcgctcattcgaaagactactgtatagcttatgacagttttttaatattgaagagcttcactggagacaactgaaaatcagaagctttccttagtttgagcagttctatcctagtgctccaatcactgtagtttagtgctgcctaatatgttttgatgggaaggacaatttcttcatgaatgactcgccctagaatcatgtagcctcttgccaacagcttatacatccacatatttaaactctactctgcgaacacttgaaaagtcttatatggtggtatatggtggcatgagtatgtatgtttgtaatttttctttcagatgcattctagctgccaataagaccgtctgcagcagtctatctagagtttattttatactgttctacac

SEQ ID NO: 209618 - DNA, 2412 bp, Zea Mays
ctttgtgctctccgatatattagtccagccccaagccctagaagagctaaaacccttgcggcggctaccttttccccagctccctctcgtctcgcggccgccgcaggcgaaaccccctcatcgcttcgcgctgtccaccgacgaatcttccccagagcgtgtgtatctgttgtttcagctgagttaatcggggactggtcgtgtgcggagatgttggtgctcttcgagacccccgcggggttcgccctattcaaggtgctcgacgaggggaagctcgacaaggtcgaggatctatggaaggagttcacgacgtcggactcagcgagaaaggtggtcgagctgaaggctttcaacaagtttgagaacacatctgatgccctatccgcggcaaccctgattattgatagcaagcctagcaagggtctgcgcaagttcttgcagaaacattgtgagggtgaaacattagcagtagctgattctaagcttggaaatgctataaaagaaaagctgaaaattgactgccttcacaatagtgctgtgatggagctgatgagaggactgagaaatcagcttaccgagcttataactgggttgggtgcacaagaccttggtccaatgagcttgggattgtcccacagcttgtctaggtataagctgaagttcagccctgagaaggttgatacaatgatcattcaagccattggattattggatgatcttgacaaggagcttaacacttatgccatgagagttcgtgaatggtatggctggcactttccagagctcaccaaaatagttacagataatatacagtatgccaaagttgtgaagatgatgggcaacagagttaatgcagtcaaccttgacttctctgagatattgtcagatgaagagctagaaacacagctaaaggaggcagcagtaatatccatgggaacagaagttagtgaccttgacttatcgaatatcagagagctatgtgatcaagtgctggccctttctgagtacagagcccagctgtatgactatttaagaagcaggatgaacactattgcaccaaatttgacagcactggctttattcagagctctaaagacaaagcattctacacctaagtatggcctcatctaccatgcatccttaattggcaaggcttctcaaaagcacaagggaaaaatctctcgttctcttgctgcaaaaacagctcttgctatccggtatgatgcccttggtgatggtgaggacaactccattggcactgagagtcgacttaagcttgagacacggcttcaagttcttgagggtagagaacttgggaaatctgctggttccacaaaggggaagcccaagatagaagtgtatgaaaaggaccggaagaagggtactggggctttaacaactcctgctaagacatataaccctgcagctgatctggtactcacggaagaaacaccaaagaagtcagaattggcttcaaagaagaggaaacataatgaggtggaaactgaaccattagcagagcctgcagaggaagcaatccaggaggatggtgaccaggaggatcggaagaagaagaagaaaaagaacaaggaaagcaaggaggctcctgctggtgaaggtgatggtgagaagaaaaagaaaaagaagtctaaggaggtcgaggaagagcctgttgtggctgctgcttcagaagttaagaagaagaaaaagaagtctgacgctgatggtgaggatgtcgcaatgcaaaccgaagaatcaggtaagaaagagaagaaaaagaagaaaaaggcgtgctgatgatgagtgagacattcacactggaagagaatttgcgggtaccaaactaccaaaggctgggactcagctgttctgtaaaatggatttgcgggtagaaacgatatcgacatcagtttttttggacccggcttgtattcaagtacttgctcgatcctggtgatgatggaatttaagttttgctgttgcaacctgatatattagtacgatgattgtcatggtaacgcggcagctgagagatcttccatgctcaatgttgacccgaacgtgctctggtaattggtagttttaatgctggaggtcatggttaaaattggcagagaaacaagtagtggctgatattttagcaaaaaatagacacgttttgattcttagtttttgttctcttgtgagtcttgagcacattcctgaaattgtactattcaggtggctctcaaaagctttcaatggagtgttttttagcctatctaaataatttgcatttaaggtttaaatgaaagttacccttaaaaacttgcaagttttctatgtacatgtaacggataaaagtggatatccgaactgtttgaataaatttaatattttaatattaatatagatgtgtatgaaatttgatga

SEQ ID NO: 209619 - DNA, 458 bp, Zea Mays
caccaagcatctggcatctcagtctgaagtggacgttgaagcgcagatactgaggaagggcagatcagtcgtggttaccacaatcgatttcagacttaaggacaccaaaaagctctgctacacatctcgagccaccttttacatcatgcccgtggcaagcctataagcccaagtttttatatggacaattccttctgtttacaggaccggagtttgtgttgtgtatatttaacttagaataccatatatcagcaatctgttgtattgataatgaagcagaagtcatattgattgagccatgatgcccaccactgcatctgtcccagactcaacctgtccacccacatacgtactaatttgttatggtttataaagggagagtggaagatcacgatcatgtgatgcttataaagttttaaatcagaaaatttctgctgtgtttatctgaaaatcagttt

SEQ ID NO: 209620 - DNA, 2467 bp, Zea Mays
cgccgctggagtggagtcctccatctcctcctcctcgcttcgcccaaacacaaccggctgctttgctttctcaacccaccagtcctcaatcacctcacaacacagcccctgtcagatcgtcccactgatcgggccgtgcaaaaccccccaaccttttcgacaggaccctgctggcgctacagtcttctcccggaggcagaaactctttgcttccgcctggctcgcgatgcttgtttgggtgcgcgggcctgcggcgaggtgaggcgacggcggcgccgggcggttgcatggtggccgatggagagtagacggggagggtcgggggcggcggcggaagatgcgggcggggcgatgccgagctttgggccaacgcagcacgccatgtatgttcccgcgccacaccgccttcttcatttacttgctcatggtttcttttctcccctcgtccaccggccctccatttggtatactgcgtgggatagattgcactgtgcatctcaagcagcaatcaatgcaattgaatgtcaggttaacatagaacggcgcagatgtgaacagcatgcaaccttctcgagttactgactttggggcacttgcacagtctgctggattccgaatagaagatcttgctaaccttaatgcaaatgccttgttcaatctgaagccaaattctcatacgattgacaacagtcctcttcagtttggaaattacggaaagtctatttctcctcatataaatactacagaagcaacaacagctgcaacaagaattgaccctcagctgtcagcacagcaaacaggagcacaaccaattctggtggcgttaccaactggtaacatggagaattggggagagtcagctatggctggtagccctatgactgacacatctacagatccagacactgatgagaggaaccagatgtttgaacaaggacttgttgctgtccccacagcatctgattctagcgacaaatcaagggacaaactagatcagaagacacttcggcgtcttgcccaaaatcgtgaagctgccaggaaaagccgattacgaaaaaaggcatacatccaaaaccttgagagtagcagactgaaacttactcagttagagcaagagcttcagcgggctcgtcaacagggtatttttatttcgacatcaggagatcaacctcaatcaacaagtggaaatggagctttggcatttgacatggagtatgcacgctggttggaggagcacaataaacatgtaaatgagttgagggctgcagtcaatgcacatgctggtgataatgatcttcgttgtattgttgatagcattatggtacattacgacgaaattttcaagctcaagggtgtggcagctaaagcagatgtttttcatgtgctgtctgggatgtggaagacccctgctgagagatgtttcatgtggttaggtggcttccgatcatctgagcttcttaagttactggcaggtcacctagagcctcttactgatcagcagcttgttggtatatccaacctgcagcagtcctcccaacaagctgaagatgctctttctcaagggatggaagcattgcaacagtcgcttgcagaaactctagcatctggatccttgggccctgctggaccttctggcaatgttgcaaattacatgggacaaatggcgatggctatgggaaaacttggcactcttgagaactttctacgacaggctgataatctacggctgcaaacacttcaacaaatgcaacgcatcttaactacccgacaatcagcacgagccctactcgcaataagcaatacaaataatcagacgagggactactgccaggtcaatatcatcggagggaagctctgtaggaggcatcgaacttctcaatctcatcaaaacatgccggaaggtggcagcatgacgtatcttcctgcaccaagagcaatgttcagaacgccatcctcccatactactcggccccttgagatcgtgatctccaccattccctgcacgaacgaaatgaacattagtacatgatgcaccgagaagttgcaagttccacattaagggcatatttagtttgttgctaactatgtcacattttgcttaaggttagtcgttcgaattgaagaactaaatttagtcacaaaagtgtggtaaattagccagcgaaccaaatatgctctaaatactgctgattcatatgtgcaaaaaagaaccgacctttcctctccggccctcgtactccctccatctacatgatttagttgttttagatttgtcctaagtcaacctctatcagagggagtacacattagtgttggacggtgtgtgtgagctgagaagggttaagtatttgtatcattgttgtttgccaattgaacaatgcattttgatacgacaaactgctgctaaactaaaccatggttcgagcagatttagagtttgtttagttgtatgcttaagatacaaaaa

SEQ ID NO: 209621 - DNA, 1857 bp, Zea Mays
ctggagtggagtcctccatctcctcctcctcgcttcgcccaaacacaaccggctgctttgctttctcaacccaccagtcctcaatcacctcacaacacagcccctgtcagatcgtcccactgatcgggccgtgcaaaaccccccaaccttttcgacaggaccctgctggcgctacagtcttctcccggaggcagaaactctttgcttccgcctggctcgcgatgcttgtttgggtgcgcgggcctgcggcgaggtgaggcgacggcggcgccgggcggttgcatggtggccgatggagagtagacggggagggtcgggggcggcggcggaagatgcgggcggggcgatgccgagctttgggccaacgcagcacgccattcgcgcaggcgcagatgtgaacagcatgcaaccttctcgagttactgactttggggcacttgcacagtctgctggattccgaatagaagatcttgctaaccttaatgcaaatgccttgttcaatctgaagccaaattctcatacgattgacaacagtcctcttcagtttggaaattacggaaagtctatttctcctcatataaatactacagaagcaacaacagctgcaacaagaattgaccctcagctgtcagcacagcaaacaggagcacaaccaattctggtggcgttaccaactggtaacatggagaattggggagagtcagctatggctggtagccctatgactgacacatctacagatccagacactgatgagaggaaccagatgtttgaacaaggacttgttgctgtccccacagcatctgattctagcgacaaatcaagggacaaactagatcagaagacacttcggcgtcttgcccaaaatcgtgaagctgccaggaaaagccgattacgaaaaaaggcatacatccaaaaccttgagagtagcagactgaaacttactcagttagagcaagagcttcagcgggctcgtcaacagggtatttttatttcgacatcaggagatcaacctcaatcaacaagtggaaatggagctttggcatttgacatggagtatgcacgctggttggaggagcacaataaacatgtaaatgagttgagggctgcagtcaatgcacatgctggtgataatgatcttcgttgtattgttgatagcattatggtacattacgacgaaattttcaagctcaagggtgtggcagctaaagcagatgtttttcatgtgctgtctgggatgtggaagacccctgctgagagatgtttcatgtggttaggtggcttccgatcatctgagcttcttaagcagtcctcccaacaagctgaagatgctctttctcaagggatggaagcattgcaacagtcgcttgcagaaactctagcatctggatccttgggccctgctggaccttctggcaatgttgcaaattacatgggacaaatggcgatggctatgggaaaacttggcactcttgagaactttctacgacaggctgataatctacggctgcaaacacttcaacaaatgcaacgcatcttaactacccgacaatcagcacgagccctactcgcaataagtgactacttctctcggctgcgtgctttgagttctctttggcttgcccgtccaagggaataaattcaattaattcataactaggataatttttttttgtactgtttctagtatgcccattagtttcttcagaatgctcatgtgtcagtgagatatttggatcatattgtaggccatcatggtttactggacaagtttgtaacaattttggaggaaaaaaactgagttgtaaatacatctggaataatctaagatcttatgaagggatgatatgggaggat

SEQ ID NO: 209622 - DNA, 5911 bp, Zea Mays
gtttttattagcatggaagcgaaatccaaacccctgaccaattcgggccgagcagcaggcggaggaggagttgcatccgtggcctcccgtgttgctcctcctcgcgcccgcgtccctattacttctccgcgtccgtgctggggcgcggcgcgcccaccgatcctgttctacctcgcgtctgcgctgcgacgttacctgctgctgtcgcccgtcggtggtggaattcgtcgcgcggatcgagccgcgggctcgattcgggcttggcgcctctgtatatatgtcggaattcgccgtagcgtgtgattaggttttgttgttcttctgtgtcggcctggtcttcgcgtgttgtgttttgttgtctggcggaggcgaatctagggtaacggtcagtcgggaatggagtcctccgacgacgggggctccgggccggcggcagggagtcccggccctccgtcggcccccgcagccgttggcggtgcgagtagcgctcctggcgcgtctggatccggcgggaagccgccggtgaagcgcgtcatgaagacgccctaccagctggaggtcctcgagaggacgtacgcagaggactcgtatcccaacgagacgaagcgggcggagctgtcggtgcagttgaacctcacagacaggcagcttcagatgtggttctgccaccgccggctcaaggaccggaaaccgccggccaagaggcagctaagggacgaggaggttagcgtcccagtcatagggccgccgccacctgtgcttccgcctccattgcctcccagcgagatgatggtggggactgtcggaacctatggtgagcagctgctgccctattccaggagagggtctggccggttatcggctgcacctaggttatctgtgccggagattgggaggaggtactatgaaccgccacaagtcatgctgcctcatatggcaccagtgcaccttatgcaagcagagcaccgggtgatcgattctgtggaagcacttataggggaacctttgagggacgatggaccagtgcttggtattgaatttgatccacttcctcctggtgcatttggagcacctatcgtccctgagcaaccgaggcagccctttcgatcatatgagaccaagatgttttctggtcccaaaaccatgaaggcagtacatgaataccagtttcttcctgagcagccaagtgatacatatgagagggcaagccagtcacacttctatgattcttcagcagaagcgtcaaacttgagggtagctccgctgtctacaggatcacgctttctccatggagttgagcaggcacctagctatacatttcacagtcaatcatctggttctagccatttgactcaacgtggcagtggcaggtcacctattgcatcggcattgacagatcatgagggggctttgtcaaatattaatgctagcacaactccaatccacggccaacttggcatccctcaagttgccggattcgaaagccccctggcatcccctgaaagattgggttatcatgatgaagatacatatcacatggacagaaagcgcaagcataatgaggaagctaagattgctagggaggttgaggctcatgaaaagagaatcagaaaggagcttgagaagcaagatctgctgaacagaaagagagaagaacaaatgcggagagaaatggagagacatgatcgtgagagacgtaaggaagaggagaggttgatgcgtgaaaggcagagggaagaagagaaattccaaagggaacaaagacgcgaacacaagcgcatggagaagtttatgcagaaacaatctatacgagctgaaaaactgagacaaagagaggagcttcgacgagagaaagaagctgcgaggcagaaggctgctaatgagagggctacagctcgtagaattgcgcgagagagtatggaactgatggaagatgagcgcttggaactattagagttggcctctcgtagtaaagggctgccctcaatggtttctcttgatagtgacacattacagcagcttgattcattcagaggaatgctggggaagttccctcctgaaactgtgagactgaaggtgcctttttcaataaaaccatgggcagcttccgaggatattattggaaaccttttgatggcttggaagttttttgttaccttcggtgatgttcttgggcttccgtcatttacgttggatgaatttgtgcaggctcttcatgattatgattcaaggcttttaggtgaattgcatgtttctctgctgaaatctgttataaaagatattgaggatgttgcccggactccttcagttgctttaggtgtaaatcagagcagttctgctaatcctggaggtggtcacccacaaattgttgaaggggcctatgcttggggcatcaacatactcaactggcagagacacttgaactttcttacatggcctgaaatattgcgccaatttggtttatgtgctggttttgggcctcagttaaagaaaagtgatgctgaaattgtccatcaccgcgatgataacgagggtcgtaatggtgtagatgtcatttccattctgcgaaatggttcagccgctgtgaaggctgctgctttaatgaaagaaagagggtatactaatcgtcgtaggtctcgacaccgtctgacacctggaacagtaaagtttgctgctttccatgtactgtcacttgaagggagcaaaggtctcacaatattggaagttgcagaaaagatccagaaatctggacttagagaccttacaacaagtaagacaccagaggcatctatatctgcggcattgtcgagagacactaagctttttgaaagaacggcaccttcgacatattgtgttaaaactccttacagaaaggacccagatgattctgaggctgtgttggcagcggcacgtgaaaaaatcagggcgtttcagaatgcgcttccggagtgtgaagaagtcgagaaggatgtggatgaggctgagagggatgatgattctgaatgtgatgatgccgatgatgatgctgatggtgatgatgtgaatattgaagacaaggatgccaagtcgccccttgttggagctcaatatggtgcacaaattacagtagttggtgacataaagaaagaatcaaacatcgtgatgaacacatcagtgccaccaagcattcagattaaatctagtgcaagtgtaccatttcatactttagacagtaaagcaagtagttcaactgatccagaggttggagatgatgctaaagacattgagatagacgaaagtaatcaaggggagtcctgggtacaggggctagctgagggtgactactgtgatcttagtgtagacgaacgcctcaatgctttggttgcacttattgccgttgctaacgagggaaattctatccgtgcaattctggaggaacgcctagaagcagcgagtgctttgaaaaaacaattgtgggctgaggcacaacttgataagaggcgtataagggatgactttactagtaagatgcagtatgattcttataaccagcttactactggtgatgtatatcatcagcggaatggtgcaagccgagaatcgagtactaacgcagaaagcttgtctgttcagcaatatgcttcatctgagaaaactcgatctcagttgaaatccttcataggtcacaaggcagaacagctttatgtgtacaggtctctaccacttggacaagaccggagacggaaccggtattggcagttctctgcatcttcatcatcctatgaccctggttcgggaagaatcttttttgaatctagagatggatactggagggtcattgatacatcagaggcatttgaagctttggtagcttcccttgatactcgtggcatccgcgagtcacatttgcactcaattttgcaaagtatcgagccaaccttcaaggaagctgttgagaggaaaagatattttcaagatagaggttgggcgcaatgaagctgagaagaattctatctcgaaaagggcttccgtgtttctgaaatggatctggagagagtgctacagtcaccaatctacatacgccatgagatatggaaagaagcggtgtcctgagttgattcactcttgtgattattgctaccagatatacttagctgaagaaaggcactgttcttgccacaaaacattcaaacacattcacaatttcttggaacactcatcacaatgtgaagaaaaacaaagaacagatcccaattggaagatgcaaactgtggacctttctgtacccgtaggattgagattgctaaggctgctcttagctaccattgaggccttagtaccggcagaagctcttctacctttttggacggatgggtatcggaaatcttggggtgcgaagttgtattctgcatcatctgccgaagaagtcttgcagatgcttagtgtgctggaaagtgcaataaagcgagactacttatcatctaactttgaaacgacaactgagttgcttaattcaagcacacaagattttgctactcagaattcggctggaggttctggatctgccactgcacttccatgggttcctgacactactgctgctgtagccttgagattgttagacttggatgcttccatctcatacacccttcatccaaagttgggttcaaataaggagcaagaatctggagatttcatgaaacttccaccgagatatccttctatgaataagggcaaacaagaaatagaacagttcaggcctattggttttgatcaacaggatggaacgttgctacctaacagcaatggtcgtagaggtcggggaaggggaggtagaggaggcagcaggggaggtagatctcgtggtcatggtggtagggttcccagaggtattggcagctcttccaggattcagttcagggatgacaatagtatgctctatgggagagccccacgaaagaatgcacgtggtggccgcggccgtggacgtggacgtggacgtggacttcgaactgttagacctcggcaaccatccgagctcagtgccagatcaattccaaaggcaaacctattgggcagttttagcatgttaagtaagacaaatcacactggcactacgcattctcccgagagctcaggtgcagaagagtgggcctttgagaggagggaatatgtgaaggatgatgagaacaatttggtctctcaatccgatgagtctgaggaaaatgtcgaacctatgaatgaggaatatggtgagcatatttcaggctatccaagagacaattccgactccagacccgtacagatgatgggtgatgggagcgacgataatgatgaggatgctgaaggagatgagggtgaggaagatggagaggactatgaagctgaagatcctggtgatgaggatgatgacgttgagatggatggggatgatgatgtcgaggtggatgaggatgatgacattgagatggatggggatgatgacattgaagatgatgatgacgacgacggtggagatggagcagccaacggagatgaggatggaggtggtacatcatcatattcttcagagtatagtgaatgatgagtgattgaagttgtgcaggcttgtggtaaatgatgtaacagaggctttggtgggctcaccaacgctaatgctgacttgaaaaactatttaggaggttgccagttctaaactgtcttgtgtggcttgttattagatagaagccactcaacattagaagatcggccttgtgtgtatacatacataccaattatcaaaagttgaaaatgagggtcgatcagctgtctgttttatgttcagctacttttttcattgttatatattgggagcgttctctttaagacggttgacatatttctaaactcactctcaattttgattttgtagcaagcttgaaaaaaattgctt

SEQ ID NO: 209623 - DNA, 6217 bp, Zea Mays
cgggccgagcagcaggcggaggaggagttgcatccgtggcctcccgtgttgctcctcctcgcgcccgcgtccctattacttctccgcgtccgtgctggggcgcggcgcgcccaccgatcctgttctacctcgcgtctgcgctgcgacgttacctgctgctgtcgcccgtcggtggtggaattcgtcgcgcggatcgagccgcgggctcgattcgggcttggcgcctctgtatatatgtcggaattcgccgtagcgtgtgattaggttttgttgttcttctgtgtcggcctggtcttcgcgtgttgtgttttgttgtctggcggaggcgaatctagggtaacggtcagtcgggaatggagtcctccgacgacgggggctccgggccggcggcagggagtcccggccctccgtcggcccccgcagccgttggcggtgcgagtagcgctcctggcgcgtctggatccggcgggaagccgccggtgaagcgcgtcatgaagacgccctaccagctggaggtcctcgagaggacgtacgcagaggactcgtatcccaacgagacgaagcgggcggagctgtcggtgcagttgaacctcacagacaggcagcttcagatgtggttctgccaccgccggctcaaggaccggaaaccgccggccaagaggcagctaagggacgaggaggttagcgtcccagtcatagggccgccgccacctgtgcttccgcctccattgcctcccagcgagatgatggtggggactgtcggaacctatggtgagcagctgctgccctattccaggagagggtctggccggttatcggctgcacctaggttatctgtgccggagattgggaggaggtactatgaaccgccacaagtcatgctgcctcatatggcaccagtgcaccttatgcaagcagagcaccgggtgatcgattctgtggaagcacttataggggaacctttgagggacgatggaccagtgcttggtattgaatttgatccacttcctcctggtgcatttggagcacctatcgtccctgagcaaccgaggcagccctttcgatcatatgagaccaagatgttttctggtcccaaaaccatgaaggcttcggcaatcttgcctaccacagaccctttacttcaaaatacagggaaacggaaatccttcattggctcttctcatcttggctcacaggcagtacatgaataccagtttcttcctgagcagccaagtgatacatatgagagggcaagccagtcacacttctatgattcttcagcagaagcgtcaaacttgagggtagctccgctgtctacaggatcacgctttctccatggagttgagcaggcacctagctatacatttcacagtcaatcatctggttctagccatttgactcaacgtggcagtggcaggtcacctattgcatcggcattgacagatcatgagggggctttgtcaaatattaatgctagcacaactccaatccacggccaacttggcatccctcaagttgccggattcgaaagccccctggcatcccctgaaagattgggttatcatgatgaagatacatatcacatggacagaaagcgcaagcataatgaggaagctaagattgctagggaggttgaggctcatgaaaagagaatcagaaaggagcttgagaagcaagatctgctgaacagaaagagagaagaacaaatgcggagagaaatggagagacatgatcgtgagagacgtaaggaagaggagaggttgatgcgtgaaaggcagagggaagaagagaaattccaaagggaacaaagacgcgaacacaagcgcatggagaagtttatgcagaaacaatctatacgagctgaaaaactgagacaaagagaggagcttcgacgagagaaagaagctgcgaggcagaaggctgctaatgagagggctacagctcgtagaattgcgcgagagagtatggaactgatggaagatgagcgcttggaactattagagttggcctctcgtagtaaagggctgccctcaatggtttctcttgatagtgacacattacagcagcttgattcattcagaggaatgctggggaagttccctcctgaaactgtgagactgaaggtgcctttttcaataaaaccatgggcagcttccgaggatattattggaaaccttttgatggcttggaagttttttgttaccttcggtgatgttcttgggcttccgtcatttacgttggatgaatttgtgcaggctcttcatgattatgattcaaggcttttaggtgaattgcatgtttctctgctgaaatctgttataaaagatattgaggatgttgcccggactccttcagttgctttaggtgtaaatcagagcagttctgctaatcctggaggtggtcacccacaaattgttgaaggggcctatgcttggggcatcaacatactcaactggcagagacacttgaactttcttacatggcctgaaatattgcgccaatttggtttatgtgctggttttgggcctcagttaaagaaaagtgatgctgaaattgtccatcaccgcgatgataacgagggtcgtaatggtgtagatgtcatttccattctgcgaaatggttcagccgctgtgaaggctgctgctttaatgaaagaaagagggtatactaatcgtcgtaggtctcgacaccgtctgacacctggaacagtaaagtttgctgctttccatgtactgtcacttgaagggagcaaaggtctcacaatattggaagttgcagaaaagatccagaaatctggacttagagaccttacaacaagtaagacaccagaggcatctatatctgcggcattgtcgagagacactaagctttttgaaagaacggcaccttcgacatattgtgttaaaactccttacagaaaggacccagatgattctgaggctgtgttggcagcggcacgtgaaaaaatcagggcgtttcagaatgcgcttccggagtgtgaagaagtcgagaaggatgtggatgaggctgagagggatgatgattctgaatgtgatgatgccgatgatgatgctgatggtgatgatgtgaatattgaagacaaggatgccaagtcgccccttgttggagctcaatatggtgcacaaattacagtagttggtgacataaagaaagaatcaaacatcgtgatgaacacatcagtgccaccaagcattcagattaaatctagtgcaagtgtaccatttcatactttagacagtaaagcaagtagttcaactgatccagaggttggagatgatgctaaagacattgagatagacgaaagtaatcaaggggagtcctgggtacaggggctagctgagggtgactactgtgatcttagtgtagacgaacgcctcaatgctttggttgcacttattgccgttgctaacgagggaaattctatccgtgcaattctggagaagcagcgagtgctttgaaaaaacaattgtgggctgaggcacaacttgataagaggcgtataagggatgactttactagtaagatgcagtatgattcttatgtgagtatgaaggttgatacagatcaagaaaataatgctgctgaaattacccttacaccagtgcatgaccctattaaaaacaataacggaaatgccaatttgatgaacaatggtttgcttgttgataagcagaaccagcttactactggtgatgtatatcatcagcggaatggtgcaagccgagaatcgagtactaacgcagaaagcttgtctgttcagcaatatgcttcatctgagaaaactcgatctcagttgaaatccttcataggtcacaaggcagaacagctttatgtgtacaggtctctaccacttggacaagaccggagacggaaccggtattggcagttctctgcatcttcatcatcctatgaccctggttcgggaagaatcttttttgaatctagagatggatactggagggtcattgatacatcagaggcatttgaagctttggtagcttcccttgatactcgtggcatccgcgagtcacatttgcactcaattttgcaaagtatcgagccaaccttcaaggaagctgttgagaggaaaaggtgtgctaatttagaacacccaactggacggacttcggaaaatggaagtaatgaaagtccaaattgcaacaatgaatttggaagtccatgcagtaccctttctggtgttgcttctgataatcttatggcacattcagatattttcaagatagaggttgggcgcaatgaagctgagaagaattctatctcgaaaagggcttccgtgtttctgaaatggatctggagagagtgctacagtcaccaatctacatacgccatgagatatggaaagaagcggtgtcctgagttgattcactcttgtgattattgctaccagatatacttagctgaagaaaggcactgttcttgccacaaaacattcaaacacattcacaatttcttggaacactcatcacaatgtgaagaaaaacaaagaacagatcccaattggaagatgcaaactgtggacctttctgtacccgtaggattgagattgctaaggctgctcttagctaccattgaggccttagtaccggcagaagctcttctacctttttggacggatgggtatcggaaatcttggggtgcgaagttgtattctgcatcatctgccgaagaagtcttgcagatgcttagtgtgctggaaagtgcaataaagcgagactacttatcatctaactttgaaacgacaactgagttgcttaattcaagcacacaagattttgctactcagaattcggctggaggttctggatctgccactgcacttccatgggttcctgacactactgctgctgtagccttgagattgttagacttggatgcttccatctcatacacccttcatccaaagttgggttcaaataaggagcaagaatctggagatttcatgaaacttccaccgagatatccttctatgaataagggcaaacaagaaatagaacagttcaggcctattggttttgatcaacaggatggaacgttgctacctaacagcaatggtcgtagaggtcggggaaggggaggtagaggaggcagcaggggaggtagatctcgtggtcatggtggtagggttcccagaggtattggcagctcttccaggattcagttcagggatgacaatagtatgctctatgggagagccccacgaaagaatgcacgtggtggccgcggccgtggacgtggacgtggacgtggacttcgaactgttagacctcggcaaccatccgagctcagtgccagatcaattccaaaggcaaacctattgggcagttttagcatgttaagtaagacaaatcacactggcactacgcattctcccgagagctcaggtgcagaagagtgggcctttgagaggagggaatatgtgaaggatgatgagaacaatttggtctctcaatccgatgagtctgaggaaaatgtcgaacctatgaatgaggaatatggtgagcatatttcaggctatccaagagacaattccgactccagacccgtacagatgatgggtgatgggagcgacgataatgatgaggatgctgaaggagatgagggtgaggaagatggagaggactatgaagctgaagatcctggtgatgaggatgatgacgttgagatggatggggatgatgatgtcgaggtggatgaggatgatgacattgagatggatggggatgatgacattgaagatgatgatgacgacgacggtggagatggagcagccaacggagatgaggatggaggtggtacatcatcatattcttcagagtatagtgaatgatgagtgattgaagttgtgcaggcttgtggtaaatgatgtaacagaggctttggtgggctcaccaacgctaatgctgacttgaaaaactatttaggaggttgccagttctaaactgtcttgtgtggcttgttattagatagaagccactcaacattagaagatcggccttgtgtgtatacatacataccaattatcaaaagttgaaaatgagggtcgatcagctgtctgttttatgttcagctacttttttcattgttatatattgggagcgttctctttaagacggttgacatatttctaaactcactctcaattttgattttgtagcaagcttgaaaaaaattgctt

SEQ ID NO: 209624 - DNA, 5846 bp, Zea Mays
gagcagcaggcggaggaggagttgcatccgtggcctcccgtgttgctcctcctcgcgcccgcgtccctattacttctccgcgtccgtgctggggcgcggcgcgcccaccgatcctgttctacctcgcgtctgcgctgcgacgttacctgctgctgtcgcccgtcggtggtggaattcgtcgcgcggatcgagccgcgggctcgattcgggcttggcgcctctgtatatatgtcggaattcgccgtagcgtgtgattaggttttgttgttcttctgtgtcggcctggtcttcgcgtgttgtgttttgttgtctggcggaggcgaatctagggtaacggtcagtcgggaatggagtcctccgacgacgggggctccgggccggcggcagggagtcccggccctccgtcggcccccgcagccgttggcggtgcgagtagcgctcctggcgcgtctggatccggcgggaagccgccggtgaagcgcgtcatgaagacgccctaccagctggaggtcctcgagaggacgtacgcagaggactcgtatcccaacgagacgaagcgggcggagctgtcggtgcagttgaacctcacagacaggcagcttcagatgtggttctgccaccgccggctcaaggaccggaaaccgccggccaagaggcagctaagggacgaggaggttagcgtcccagtcatagggccgccgccacctgtgcttccgcctccattgcctcccagcgagatgatggtggggactgtcggaacctatggtgagcagctgctgccctattccaggagagggtctggccggttatcggctgcacctaggttatctgtgccggagattgggaggaggtactatgaaccgccacaagtcatgctgcctcatatggcaccagtgcaccttatgcaagcagagcaccgggtgatcgattctgtggaagcacttataggggaacctttgagggacgatggaccagtgcttggtattgaatttgatccacttcctcctggtgcatttggagcacctatcgtccctgagcaaccgaggcagccctttcgatcatatgagaccaagatgttttctggtcccaaaaccatgaaggcagtacatgaataccagtttcttcctgagcagccaagtgatacatatgagagggcaagccagtcacacttctatgattcttcagcagaagcgtcaaacttgagggtagctccgctgtctacaggatcacgctttctccatggagttgagcaggcacctagctatacatttcacagtcaatcatctggttctagccatttgactcaacgtggcagtggcaggtcacctattgcatcggcattgacagatcatgagggggctttgtcaaatattaatgctagcacaactccaatccacggccaacttggcatccctcaagttgccggattcgaaagccccctggcatcccctgaaagattgggttatcatgatgaagatacatatcacatggacagaaagcgcaagcataatgaggaagctaagattgctagggaggttgaggctcatgaaaagagaatcagaaaggagcttgagaagcaagatctgctgaacagaaagagagaagaacaaatgcggagagaaatggagagacatgatcgtgagagacgtaaggaagaggagaggttgatgcgtgaaaggcagagggaagaagagaaattccaaagggaacaaagacgcgaacacaagcgcatggagaagtttatgcagaaacaatctatacgagctgaaaaactgagacaaagagaggagcttcgacgagagaaagaagctgcgaggcagaaggctgctaatgagagggctacagctcgtagaattgcgcgagagagtatggaactgatggaagatgagcgcttggaactattagagttggcctctcgtagtaaagggctgccctcaatggtttctcttgatagtgacacattacagcagcttgattcattcagaggaatgctggggaagttccctcctgaaactgtgagactgaaggtgcctttttcaataaaaccatgggcagcttccgaggatattattggaaaccttttgatggcttggaagttttttgttaccttcggtgatgttcttgggcttccgtcatttacgttggatgaatttgtgcaggctcttcatgattatgattcaaggcttttaggtgaattgcatgtttctctgctgaaatctgttataaaagatattgaggatgttgcccggactccttcagttgctttaggtgtaaatcagagcagttctgctaatcctggaggtggtcacccacaaattgttgaaggggcctatgcttggggcatcaacatactcaactggcagagacacttgaactttcttacatggcctgaaatattgcgccaatttggtttatgtgctggttttgggcctcagttaaagaaaagtgatgctgaaattgtccatcaccgcgatgataacgagggtcgtaatggtgtagatgtcatttccattctgcgaaatggttcagccgctgtgaaggctgctgctttaatgaaagaaagagggtatactaatcgtcgtaggtctcgacaccgtctgacacctggaacagtaaagtttgctgctttccatgtactgtcacttgaagggagcaaaggtctcacaatattggaagttgcagaaaagatccagaaatctggacttagagaccttacaacaagtaagacaccagaggcatctatatctgcggcattgtcgagagacactaagctttttgaaagaacggcaccttcgacatattgtgttaaaactccttacagaaaggacccagatgattctgaggctgtgttggcagcggcacgtgaaaaaatcagggcgtttcagaatgcgcttccggagtgtgaagaagtcgagaaggatgtggatgaggctgagagggatgatgattctgaatgtgatgatgccgatgatgatgctgatggtgatgatgtgaatattgaagacaaggatgccaagtcgccccttgttggagctcaatatggtgcacaaattacagtagttggtgacataaagaaagaatcaaacatcgtgatgaacacatcagtgccaccaagcattcagattaaatctagtgcaagtgtaccatttcatactttagacagtaaagcaagtagttcaactgatccagaggttggagatgatgctaaagacattgagatagacgaaagtaatcaaggggagtcctgggtacaggggctagctgagggtgactactgtgatcttagtgtagacgaacgcctcaatgctttggttgcacttattgccgttgctaacgagggaaattctatccgtgcaattctggaggaacgcctagaagcagcgagtgctttgaaaaaacaattgtgggctgaggcacaacttgataagaggcgtataagggatgactttactagtaagatgcagtatgattcttatctttatgtgtacaggtctctaccacttggacaagaccggagacggaaccggtattggcagttctctgcatcttcatcatcctatgaccctggttcgggaagaatcttttttgaatctagagatggatactggagggtcattgatacatcagaggcatttgaagctttggtagcttcccttgatactcgtggcatccgcgagtcacatttgcactcaattttgcaaagtatcgagccaaccttcaaggaagctgttgagaggaaaaggtgtgctaatttagaacacccaactggacggacttcggaaaatggaagtaatgaaagtccaaattgcaacaatgaatttggaagtccatgcagtaccctttctggtgttgcttctgataatcttatggcacattcagatattttcaagatagaggttgggcgcaatgaagctgagaagaattctatctcgaaaagggcttccgtgtttctgaaatggatctggagagagtgctacagtcaccaatctacatacgccatgagatatggaaagaagcggtgtcctgagttgattcactcttgtgattattgctaccagatatacttagctgaagaaaggcactgttcttgccacaaaacattcaaacacattcacaatttcttggaacactcatcacaatgtgaagaaaaacaaagaacagatcccaattggaagatgcaaactgtggacctttctgtacccgtaggattgagattgctaaggctgctcttagctaccattgaggccttagtaccggcagaagctcttctacctttttggacggatgggtatcggaaatcttggggtgcgaagttgtattctgcatcatctgccgaagaagtcttgcagatgcttagtgtgctggaaagtgcaataaagcgagactacttatcatctaactttgaaacgacaactgagttgcttaattcaagcacacaagattttgctactcagaattcggctggaggttctggatctgccactgcacttccatgggttcctgacactactgctgctgtagccttgagattgttagacttggatgcttccatctcatacacccttcatccaaagttgggttcaaataaggagcaagaatctggagatttcatgaaacttccaccgagatatccttctatgaataagggcaaacaagaaatagaacagttcaggcctattggttttgatcaacaggatggaacgttgctacctaacagcaatggtcgtagaggtcggggaaggggaggtagaggaggcagcaggggaggtagatctcgtggtcatggtggtagggttcccagaggtattggcagctcttccaggattcagttcagggatgacaatagtatgctctatgggagagccccacgaaagaatgcacgtggtggccgcggccgtggacgtggacgtggacgtggacttcgaactgttagacctcggcaaccatccgagctcagtgccagatcaattccaaaggcaaacctattgggcagttttagcatgttaagtaagacaaatcacactggcactacgcattctcccgagagctcaggtgcagaagagtgggcctttgagaggagggaatatgtgaaggatgatgagaacaatttggtctctcaatccgatgagtctgaggaaaatgtcgaacctatgaatgaggaatatggtgagcatatttcaggctatccaagagacaattccgactccagacccgtacagatgatgggtgatgggagcgacgataatgatgaggatgctgaaggagatgagggtgaggaagatggagaggactatgaagctgaagatcctggtgatgaggatgatgacgttgagatggatggggatgatgatgtcgaggtggatgaggatgatgacattgagatggatggggatgatgacattgaagatgatgatgacgacgacggtggagatggagcagccaacggagatgaggatggaggtggtacatcatcatattcttcagagtatagtgaatgatgagtgattgaagttgtgcaggcttgtggtaaatgatgtaacagaggctttggtgggctcaccaacgctaatgctgacttgaaaaactatttaggaggttgccagttctaaactgtcttgtgtggcttgttattagatagaagccactcaacattagaagatcggccttgtgtgtatacatacataccaattatcaaaagttgaaaatgagggtcgatcagctgtctgttttatgttcagctacttttttcattgttatatattgggagcgttctctttaagacggttgacatatttctaaactcactctcaattttgattttgtagcaagcttgaaaaaaattgctt

SEQ ID NO: 209625 - DNA, 5826 bp, Zea Mays
caggcggaggaggagttgcatccgtggcctcccgtgttgctcctcctcgcgcccgcgtccctattacttctccgcgtccgtgctggggcgcggcgcgcccaccgatcctgttctacctcgcgtctgcgctgcgacgttacctgctgctgtcgcccgtcggtggtggaattcgtcgcgcggatcgagccgcgggctcgattcgggcttggcgcctctgtatatatgtcggaattcgccgtagcgtgtgattaggttttgttgttcttctgtgtcggcctggtcttcgcgtgttgtgttttgttgtctggcggaggcgaatctagggtaacggtcagtcgggaatggagtcctccgacgacgggggctccgggccggcggcagggagtcccggccctccgtcggcccccgcagccgttggcggtgcgagtagcgctcctggcgcgtctggatccggcgggaagccgccggtgaagcgcgtcatgaagacgccctaccagctggaggtcctcgagaggacgtacgcagaggactcgtatcccaacgagacgaagcgggcggagctgtcggtgcagttgaacctcacagacaggcagcttcagatgtggttctgccaccgccggctcaaggaccggaaaccgccggccaagaggcagctaagggacgaggaggttagcgtcccagtcatagggccgccgccacctgtgcttccgcctccattgcctcccagcgagatgatggtggggactgtcggaacctatggtgagcagctgctgccctattccaggagagggtctggccggttatcggctgcacctaggttatctgtgccggagattgggaggaggtactatgaaccgccacaagtcatgctgcctcatatggcaccagtgcaccttatgcaagcagagcaccgggtgatcgattctgtggaagcacttataggggaacctttgagggacgatggaccagtgcttggtattgaatttgatccacttcctcctggtgcatttggagcacctatcgtccctgagcaaccgaggcagccctttcgatcatatgagaccaagatgttttctggtcccaaaaccatgaaggcagtacatgaataccagtttcttcctgagcagccaagtgatacatatgagagggcaagccagtcacacttctatgattcttcagcagaagcgtcaaacttgagggtagctccgctgtctacaggatcacgctttctccatggagttgagcaggcacctagctatacatttcacagtcaatcatctggttctagccatttgactcaacgtggcagtggcaggtcacctattgcatcggcattgacagatcatgagggggctttgtcaaatattaatgctagcacaactccaatccacggccaacttggcatccctcaagttgccggattcgaaagccccctggcatcccctgaaagattgggttatcatgatgaagatacatatcacatggacagaaagcgcaagcataatgaggaagctaagattgctagggaggttgaggctcatgaaaagagaatcagaaaggagcttgagaagcaagatctgctgaacagaaagagagaagaacaaatgcggagagaaatggagagacatgatcgtgagagacgtaaggaagaggagaggttgatgcgtgaaaggcagagggaagaagagaaattccaaagggaacaaagacgcgaacacaagcgcatggagaagtttatgcagaaacaatctatacgagctgaaaaactgagacaaagagaggagcttcgacgagagaaagaagctgcgaggcagaaggctgctaatgagagggctacagctcgtagaattgcgcgagagagtatggaactgatggaagatgagcgcttggaactattagagttggcctctcgtagtaaagggctgccctcaatggtttctcttgatagtgacacattacagcagcttgattcattcagaggaatgctggggaagttccctcctgaaactgtgagactgaaggtgcctttttcaataaaaccatgggcagcttccgaggatattattggaaaccttttgatggcttggaagttttttgttaccttcggtgatgttcttgggcttccgtcatttacgttggatgaatttgtgcaggctcttcatgattatgattcaaggcttttaggtgaattgcatgtttctctgctgaaatctgttataaaagatattgaggatgttgcccggactccttcagttgctttaggtgtaaatcagagcagttctgctaatcctggaggtggtcacccacaaattgttgaaggggcctatgcttggggcatcaacatactcaactggcagagacacttgaactttcttacatggcctgaaatattgcgccaatttggtttatgtgctggttttgggcctcagttaaagaaaagtgatgctgaaattgtccatcaccgcgatgataacgagggtcgtaatggtgtagatgtcatttccattctgcgaaatggttcagccgctgtgaaggctgctgctttaatgaaagaaagagggtatactaatcgtcgtaggtctcgacaccgtctgacacctggaacagtaaagtttgctgctttccatgtactgtcacttgaagggagcaaaggtctcacaatattggaagttgcagaaaagatccagaaatctggacttagagaccttacaacaagtaagacaccagaggcatctatatctgcggcattgtcgagagacactaagctttttgaaagaacggcaccttcgacatattgtgttaaaactccttacagaaaggacccagatgattctgaggctgtgttggcagcggcacgtgaaaaaatcagggcgtttcagaatgcgcttccggagtgtgaagaagtcgagaaggatgtggatgaggctgagagggatgatgattctgaatgtgatgatgccgatgatgatgctgatggtgatgatgtgaatattgaagacaaggatgccaagtcgccccttgttggagctcaatatggtgcacaaattacagtagttggtgacataaagaaagaatcaaacatcgtgatgaacacatcagtgccaccaagcattcagattaaatctagtgcaagtgtaccatttcatactttagacagtaaagcaagtagttcaactgatccagaggttggagatgatgctaaagacattgagatagacgaaagtaatcaaggggagtcctgggtacaggggctagctgagggtgactactgtgatcttagtgtagacgaacgcctcaatgctttggttgcacttattgccgttgctaacgagggaaattctatccgtgcaattctggaggaacgcctagaagcagcgagtgctttgaaaaaacaattgtgggctgaggcacaacttgataagaggcgtataagggatgactttactagtaagatgcagtatgattcttatgtctctaccacttggacaagaccggagacggaaccggtattggcagttctctgcatcttcatcatcctatgaccctggttcgggaagaatcttttttgaatctagagatggatactggagggtcattgatacatcagaggcatttgaagctttggtagcttcccttgatactcgtggcatccgcgagtcacatttgcactcaattttgcaaagtatcgagccaaccttcaaggaagctgttgagaggaaaaggtgtgctaatttagaacacccaactggacggacttcggaaaatggaagtaatgaaagtccaaattgcaacaatgaatttggaagtccatgcagtaccctttctggtgttgcttctgataatcttatggcacattcagatattttcaagatagaggttgggcgcaatgaagctgagaagaattctatctcgaaaagggcttccgtgtttctgaaatggatctggagagagtgctacagtcaccaatctacatacgccatgagatatggaaagaagcggtgtcctgagttgattcactcttgtgattattgctaccagatatacttagctgaagaaaggcactgttcttgccacaaaacattcaaacacattcacaatttcttggaacactcatcacaatgtgaagaaaaacaaagaacagatcccaattggaagatgcaaactgtggacctttctgtacccgtaggattgagattgctaaggctgctcttagctaccattgaggccttagtaccggcagaagctcttctacctttttggacggatgggtatcggaaatcttggggtgcgaagttgtattctgcatcatctgccgaagaagtcttgcagatgcttagtgtgctggaaagtgcaataaagcgagactacttatcatctaactttgaaacgacaactgagttgcttaattcaagcacacaagattttgctactcagaattcggctggaggttctggatctgccactgcacttccatgggttcctgacactactgctgctgtagccttgagattgttagacttggatgcttccatctcatacacccttcatccaaagttgggttcaaataaggagcaagaatctggagatttcatgaaacttccaccgagatatccttctatgaataagggcaaacaagaaatagaacagttcaggcctattggttttgatcaacaggatggaacgttgctacctaacagcaatggtcgtagaggtcggggaaggggaggtagaggaggcagcaggggaggtagatctcgtggtcatggtggtagggttcccagaggtattggcagctcttccaggattcagttcagggatgacaatagtatgctctatgggagagccccacgaaagaatgcacgtggtggccgcggccgtggacgtggacgtggacgtggacttcgaactgttagacctcggcaaccatccgagctcagtgccagatcaattccaaaggcaaacctattgggcagttttagcatgttaagtaagacaaatcacactggcactacgcattctcccgagagctcaggtgcagaagagtgggcctttgagaggagggaatatgtgaaggatgatgagaacaatttggtctctcaatccgatgagtctgaggaaaatgtcgaacctatgaatgaggaatatggtgagcatatttcaggctatccaagagacaattccgactccagacccgtacagatgatgggtgatgggagcgacgataatgatgaggatgctgaaggagatgagggtgaggaagatggagaggactatgaagctgaagatcctggtgatgaggatgatgacgttgagatggatggggatgatgatgtcgaggtggatgaggatgatgacattgagatggatggggatgatgacattgaagatgatgatgacgacgacggtggagatggagcagccaacggagatgaggatggaggtggtacatcatcatattcttcagagtatagtgaatgatgagtgattgaagttgtgcaggcttgtggtaaatgatgtaacagaggctttggtgggctcaccaacgctaatgctgacttgaaaaactatttaggaggttgccagttctaaactgtcttgtgtggcttgttattagatagaagccactcaacattagaagatcggccttgtgtgtatacatacataccaattatcaaaagttgaaaatgagggtcgatcagctgtctgttttatgttcagctacttttttcattgttatatattgggagcgttctctttaagacggttgacatatttctaaactcactctcaattttgattttgtagcaagcttgaaaaaaattgctt

SEQ ID NO: 209626 - DNA, 5020 bp, Zea Mays
caccagcaggggaggttataagggctagctgatgtccctgagcaaccgaggcagccctttcgatcatatgagaccaagatgttttctggtcccaaaaccatgaaggcagtacatgaataccagtttcttcctgagcagccaagtgatacatatgagagggcaagccagtcacacttctatgattcttcagcagaagcgtcaaacttgagggtcacctattgcatcggcattgacagatcatgagggggctttgtcaaatattaatgctagcacaactccaatccacggccaacttggcatccctcaagttgccggattcgaaagccccctggcatcccctgaaagattgggttatcatgatgaagatacatatcacatggacagaaagcgcaagcataatgaggaagctaagattgctagggaggttgaggctcatgaaaagagaatcagaaaggagcttgagaagcaagatctgctgaacagaaagagagaagaacaaatgcggagagaaatggagagacatgatcgtgagagacgtaaggaagaggagaggttgatgcgtgaaaggcagagggaagaagagaaattccaaagggaacaaagacgcgaacacaagcgcatggagaagtttatgcagaaacaatctatacgagctgaaaaactgagacaaagagaggagcttcgacgagagaaagaagctgcgaggcagaaggctgctaatgagagggctacagctcgtagaattgcgcgagagagtatggaactgatggaagatgagcgcttggaactattagagttggcctctcgtagtaaagggctgccctcaatggtttctcttgatagtgacacattacagcagcttgattcattcagaggaatgctggggaagttccctcctgaaactgtgagactgaaggtgcctttttcaataaaaccatgggcagcttccgaggatattattggaaaccttttgatggcttggaagttttttgttaccttcggtgatgttcttgggcttccgtcatttacgttggatgaatttgtgcaggctcttcatgattatgattcaaggcttttaggtgaattgcatgtttctctgctgaaatctgttataaaagatattgaggatgttgcccggactccttcagttgctttaggtgtaaatcagagcagttctgctaatcctggaggtggtcacccacaaattgttgaaggggcctatgcttggggcatcaacatactcaactggcagagacacttgaactttcttacatggcctgaaatattgcgccaatttggtttatgtgctggttttgggcctcagttaaagaaaagtgatgctgaaattgtccatcaccgcgatgataacgagggtcgtaatggtgtagatgtcatttccattctgcgaaatggttcagccgctgtgaaggctgctgctttaatgaaagaaagagggtatactaatcgtcgtaggtctcgacaccgtctgacacctggaacagtaaagtttgctgctttccatgtactgtcacttgaagggagcaaaggtctcacaatattggaagttgcagaaaagatccagaaatctggacttagagaccttacaacaagtaagacaccagaggcatctatatctgcggcattgtcgagagacactaagctttttgaaagaacggcaccttcgacatattgtgttaaaactccttacagaaaggacccagatgattctgaggctgtgttggcagcggcacgtgaaaaaatcagggcgtttcagaatgcgcttccggagtgtgaagaagtcgagaaggatgtggatgaggctgagagggatgatgattctgaatgtgatgatgccgatgatgatgctgatggtgatgatgtgaatattgaagacaaggatgccaagtcgccccttgttggagctcaatatggtgcacaaattacagtagttggtgacataaagaaagaatcaaacatcgtgatgaacacatcagtgccaccaagcattcagattaaatctagtgcaagtgtaccatttcatactttagacagtaaagcaagtagttcaactgatccagaggttggagatgatgctaaagacattgagatagacgaaagtaatcaaggggagtcctgggtacaggggctagctgagggtgactactgtgatcttagtgtagacgaacgcctcaatgctttggttgcacttattgccgttgctaacgagggaaattctatccgtgcaattctggaggaacgcctagaagcagcgagtgctttgaaaaaacaattgtgggctgaggcacaacttgataagaggcgtataagggatgactttactagtaagatgcagtatgattcttatgtgagtatgaaggttgatacagatcaagaaaataatgctgctgaaattacccttacaccagtgcatgaccctattaaaaacaataacggaaatgccaatttgatgaacaatggtttgcttgttgataagcagaaccagcttactactggtgatgtatatcatcagcggaatggtgcaagccgagaatcgagtactaacgcagaaagcttgtctgttcagcaatatgcttcatctgagaaaactcgatctcagttgaaatccttcataggtcacaaggcagaacagctttatgtgtacaggtctctaccacttggacaagaccggagacggaaccggtattggcagttctctgcatcttcatcatcctatgaccctggttcgggaagaatcttttttgaatctagagatggatactggagggtcattgatacatcagaggcatttgaagctttggtagcttcccttgatactcgtggcatccgcgagtcacatttgcactcaattttgcaaagtatcgagccaaccttcaaggaagctgttgagaggaaaaggtgtgctaatttagaacacccaactggacggacttcggaaaatggaagtaatgaaagtccaaattgcaacaatgaatttggaagtccatgcagtaccctttctggtgttgcttctgataatcttatggcacattcagatattttcaagatagaggttgggcgcaatgaagctgagaagaattctatctcgaaaagggcttccgtgtttctgaaatggatctggagagagtgctacagtcaccaatctacatacgccatgagatatggaaagaagcggtgtcctgagttgattcactcttgtgattattgctaccagatatacttagctgaagaaaggcactgttcttgccacaaaacattcaaacacattcacaatttcttggaacactcatcacaatgtgaagaaaaacaaagaacagatcccaattggaagatgcaaactgtggacctttctgtacccgtaggattgagattgctaaggctgctcttagctaccattgaggccttagtaccggcagaagctcttctacctttttggacggatgggtatcggaaatcttggggtgcgaagttgtattctgcatcatctgccgaagaagtcttgcagatgcttagtgtgctggaaagtgcaataaagcgagactacttatcatctaactttgaaacgacaactgagttgcttaattcaagcacacaagattttgctactcagaattcggctggaggttctggatctgccactgcacttccatgggttcctgacactactgctgctgtagccttgagattgttagacttggatgcttccatctcatacacccttcatccaaagttgggttcaaataaggagcaagaatctggagatttcatgaaacttccaccgagatatccttctatgaataagggcaaacaagaaatagaacagttcaggcctattggttttgatcaacaggatggaacgttgctacctaacagcaatggtcgtagaggtcggggaaggggaggtagaggaggcagcaggggaggtagatctcgtggtcatggtggtagggttcccagaggtattggcagctcttccaggattcagttcagggatgacaatagtatgctctatgggagagccccacgaaagaatgcacgtggtggccgcggccgtggacgtggacgtggacgtggacttcgaactgttagacctcggcaaccatccgagctcagtgccagatcaattccaaaggcaaacctattgggcagttttagcatgttaagtaagacaaatcacactggcactacgcattctcccgagagctcaggtgcagaagagtgggcctttgagaggagggaatatgtgaaggatgatgagaacaatttggtctctcaatccgatgagtctgaggaaaatgtcgaacctatgaatgaggaatatggtgagcatatttcaggctatccaagagacaattccgactccagacccgtacagatgatgggtgatgggagcgacgataatgatgaggatgctgaaggagatgagggtgaggaagatggagaggactatgaagctgaagatcctggtgatgaggatgatgacgttgagatggatggggatgatgatgtcgaggtggatgaggatgatgacattgagatggatggggatgatgacattgaagatgatgatgacgacgacggtggagatggagcagccaacggagatgaggatggaggtggtacatcatcatattcttcagagtatagtgaatgatgagtgattgaagttgtgcaggcttgtggtaaatgatgtaacagaggctttggtgggctcaccaacgctaatgctgacttgaaaaactatttaggaggttgccagttctaaactgtcttgtgtggcttgttattagatagaagccactcaacattagaagatcggccttgtgtgtatacatacataccaattatcaaaagttgaaaatgagggtcgatcagctgtctgttttatgttcagctacttttttcattgttatatattgggagcgttctctttaagacggttgacatatttctaaactcactctcaattttgattttgtagcaagcttgaaaaaaattgctt

SEQ ID NO: 209627 - DNA, 4816 bp, Zea Mays
tttgctctgttatagagtagtaaaaacttcacctttggatcatttacctcactctctacaactacaagtctacaaggtaatgctcatgtaaaaaattctctttgaagggcttaacgaagagttttacagggataggcatgcaaatcctaaagctatatccgcttaaaaaaatctaggaatccgtaaacagtgtacaggtcaaaacaaaagaaagaaaaaaaactgcacacgacgtcaatcactctcactgcctctttccaccctgctgtagactgccctttctaccgttatatacccagcacaggatgtcgcgaccgatcggtttcccgagctgcagaggaattcttgcgtggatgctcgtctcttgcctagttgtttgtttcttgcagaggaattttttcctgaacttgtccccgccgtcttgaaggtttcttgtttgggagcagggcggaggcgctcctttccttcttggccgacgatggtatggactgggcagcggcgcgcgcgagcgatttttgcggcaaaccccctgcgagaaacatcgtccgcagaacacctcactttcactttttgtactcttccgtctctgccctcgcgttattgcctcgtctcgctcgcctggctggctcgtgccttgccttgctcagcgtacgcgaacgcagcgagaaggaggagcaaggaaatagagagagagagaaaaaaaaatcaagtcatccccctttcctctaagctcgttccatggagaactcttctcacaagcggacgcgggaggcggccgacctcgccgccggaggctgtggagaggagggctcgccgcaggccgacgccaagaggctgcggccgcaggacctgctcgacatgctggaggacgacaccgacacggccgcggtcggcgacctaccgtcggtcatgcggagcctgtaggaggagatagctagcttcgacgaggccgcggagacgccggcgccgacatcggggcagcagccagagctgggcttcctactcgaggcctcggacgatgagctggggttgccgccgacgggcgccgcctcctcttcgtcggaggaggctgggcgcgcgggggcaccggagcccgcgctcgacggccagatctggggcttggagggcggaggtgctcctttccttcttggccggcggcggcatggactgggcagcggctttcgggtctccgtcgtggagcgcggtggcgacggaccctggcccgaccatgctgtccttcgcaggcccgtcctcctccgccaccgacgccgaggtgcgactccaggatttcaccgtgggtcgcatggaagcggaggcgacggtcgcgagcatcacgcacggatgggggcaggcgatagcacggcatgcagacgcccaagtccagcaatgctggggcatcacgagcgggcgggggtaccgcggcgtgcgtcacggggacggggcgggcgcacgggcgggcatcgcgatgacgggtgcgggagcaggcgggggcacgcgaatcacgggagtggagccacggtggtggtggacgccctcgttagtgtcttatagagtagtagagatagagattgtaggcgtccacaattcccagtggcgcacggttctgctgtccctccatcctcccgcgctccctccgtgctacatcaacgcccgcaggttctgcctctccctgtcactacgccgcctgcccccgccgcacccctccccgttactaggtgcggcgccgcgccgcgccgcctcctcggcctcgcctccgcgctcgccgacgactcgtcctgctccgacctcctcccgctgttcccagtccccgccggctacgccgcctctgacgccgcggatccccgatgccgagagctgcccgtcgcccgctgccgtcagcagcgtcttcagtaagttccgcgacccggcgccatctcctgtgacccctgacgacgctgcggcggcgcctgacgagcccagggatcttggcttcgacgatgacgacagtttcgacgccgattctattctgtgcggcgtccaccagagcgcggccgagggcatcgatggcatcatggcttctggcaggatcagaatatcatcatcaatcaagcgctgaagcggcatagtgtcgatcctgaatggtggatgtgccctgccatacctgtgaaagacattaccccggcaccaccgccttcagtggcaatggcgaaggaagactaagaagaagtcactggggacaatatacgaggaggggactcctgagcctgccaatggcgacgacgatggagctttggcactgccagagacaggattggggcttagcttgaatactgatggggtgctcaaggcgtggtgtggcagaggctctgcgtttgctgatggcaatgggcctgacttgccattgtcccctgctcatgtggtagtaagtatttccagcttatctaaagatataaaagatcttacatttccagttaaaaattaaagatggctagagctcttggaaccctgagtagtacctgctattagttcatatcgtctggtaagtagaatctatttcacttcagtagaagtacagatcgtctgttgttttatatcagcagtgatcagaaaaatcttggcatgcattgctttgtttcagtcccttcgcatttcttgtcaatggaagatttctcccagaagaaaatctgtgtctgaaatttgctaatatgaaatagtacagtatgcccaccagtacttgactttactggctcaatgggccaggcagaaggaaattccaattggttgttttctttgagttgaatcattataacaaacttagccctcattatgttgtatctgcagtttttgaattcaattgaagtaaaaggaaatatcatagtttggtcctttcgcgaattttttttgtccaattttttgtccttgtaggtttttccgttgcattagaaaacactgtaggctgcttccttgcgttgcctctccgtttgcaggaacaagagaccagtttttatgtcatagacatgaactactttcctggtatgtggctgctttcttgcgttgtctctccgtttgcagggaagggtgctcccagcccccgtcatgccccttggcccctcccaaccctcgtcgtcataacggagggtgctgcgacaagccagcggatgagcgtggcgatcccgctggagcagtccatcacgccggtgctttaggactttatgaatctcaacatatgctatctaccagtgtattactgtggagcctcgtcgtcgactcccacgtccatgagaccacctaggagttgctcgtgtacagctagctctaccaattcgagggatacataagtgggaggcgtccacaattcccagtggcgcacggttctgccgtctctccgccctcccgcgctgcatcaaccgacaaagctaatttaaccaaacaattacaatagcagattttaaaaaatctatatattaagtaggtgtaggtgactcacacggtttgattatttgctggactctgtaccatggtttgtagtttgtactacatccgatgcaagaaagaataaaattatagttctggaattaaagttcagttttgttctcataatgcagagttctggaattaaagttcaataatacagttctcagccaccatgttacatgtgcctccttcaaaaaggattgtgttattagagttcagtattagagtttagtactggtacctggtactccttttttgtgctactgctctgcttcgcccatcaaaaatatagtagcttgtatgactgcacacctgatgtggtagattaaatcactctacacagccacctgttttcttagctaaatgtgtgtgtggtgcgagcagaaggttcttcggattatcctctcatttttagtattcccagttctctatccggatgactacaaaatcacaggttgaactgttttatatatctttcagtttggacagtcatatttcacattcattggaaacagctaacctgaacgctttcaaggcataaccataaccttttaagtctttgtaattttttctcctccaactgcatttgcatttttaaatacatcacgtgtcccatagtctattagctaggtgctaaggcaaatatgaaagtatgactatttttatatgtgattttagcttttcaatgcagcaactacaacttctttgcaactctattttccatctcatgttttcagtactgagggaggtgccgggggagaaaatttttctcagtttggtgctgatttatcaagacgaatgacttattgccacagagctaaggatgacagtagagaaagttggggcagatttccggcttcaatttatgtccttatcagcactacaacagcaacgacgagcacagtagcaaagcagtccgagccttgtggaggagagcctccacaagaagtgcctcgacgggttccctacctccgccgccggtatcgtgtcattgatgggccacttcatcgctatctagcacaaggtgcaacacccccttccctcgctccttcgctcttcctggctccaatctgatacaccctctacgttagggtatgagtgaccgagtgacacttgatctgtcgactttaaccggggcagtcgacaaagcacgcgcctggatgccctactatatgtattgagtacataggattattagtacacttcctttgcactgtcacagcgatctagatctccacgaactaaatgtggatcctctctcttggcgtgcacaccgatcttttcattcacactgcactcaccgtcatggcatccaccaaggacttctcgttcgtctctgccttcaggtccaacaaatactttt

SEQ ID NO: 209628 - DNA, 4077 bp, Zea Mays
tttgctctgttatagagtagtaaaaacttcacctttggatcatttacctcactctctacaactacaagtctacaaggtaatgctcatgtaaaaaattctctttgaagggcttaacgaagagttttacagggataggcatgcaaatcctaaagctatatccgcttaaaaaaatctaggaatccgtaaacagtgtacaggtcaaaacaaaagaaagaaaaaaaactgcacacgacgtcaatcactctcactgcctctttccaccctgctgtagactgccctttctaccgttatatacccagcacaggatgtcgcgaccgatcggtttcccgagctgcagaggaattcttgcgtggatgctcgtctcttgcctagttgtttgtttcttgcagaggaattttttcctgaacttgtccccgccgtcttgaaggtttcttgtttgggagcagggcggaggcgctcctttccttcttggccgacgatggtatggactgggcagcggcgcgcgcgagcgatttttgcggcaaaccccctgcgagaaacatcgtccgcagaacacctcactttcactttttgtactcttccgtctctgccctcgcgttattgcctcgtctcgctcgcctggctggctcgtgccttgccttgctcagcgtacgcgaacgcagcgagaaggaggagcaaggaaatagagagagagagaaaaaaaaatcaagtcatccccctttcctctaagctcgttccatggagaactcttctcacaagcggacgcgggaggcggccgacctcgccgccggaggctgtggagaggagggctcgccgcaggccgacgccaagaggctgcggccgcaggacctgctcgacatgctggaggacgacaccgacacggccgcggtcggcgacctaccgtcggtcatgcggagcctgtaggaggagatagctagcttcgacgaggccgcggagacgccggcgccgacatcggggcagcagccagagctgggcttcctactcgaggcctcggacgatgagctggggttgccgccgacgggcgccgcctcctcttcgtcggaggaggctgggcgcgcgggggcaccggagcccgcgctcgacggccagatctggggcttggagggcggaggtgctcctttccttcttggccggcggcggcatggactgggcagcggctttcgggtctccgtcgtggagcgcggtggcgacggaccctggcccgaccatgctgtccttcgcaggcccgtcctcctccgccaccgacgccgaggtgcgactccaggatttcaccgtgggtcgcatggaagcggaggcgacggtcgcgagcatcacgcacggatgggggcaggcgatagcacggcatgcagacgcccaagtccagcaatgctggggcatcacgagcgggcgggggtaccgcggcgtgcgtcacggggacggggcgggcgcacgggcgggcatcgcgatgacgggtgcgggagcaggcgggggcacgcgaatcacgggagtggagccacggtggtggtggacgccctcgttagtgtcttatagagtagtagagatagagattgtaggcgtccacaattcccagtggcgcacggttctgctgtccctccatcctcccgcgctccctccgtgctacatcaacgcccgcaggttctgcctctccctgtcactacgccgcctgcccccgccgcacccctccccgttactaggtgcggcgccgcgccgcgccgcctcctcggcctcgcctccgcgctcgccgacgactcgtcctgctccgacctcctcccgctgttcccagtccccgccggctacgccgcctctgacgccgcggatccccgatgccgagagctgcccgtcgcccgctgccgtcagcagcgtcttcagtaagttccgcgacccggcgccatctcctgtgacccctgacgacgctgcggcggcgcctgacgagcccagggatcttggcttcgacgatgacgacagtttcgacgccgattctattctgtgcggcgtccaccagagcgcggccgagggcatcgatggcatcatgggtaagctctctatggaaaacaacggggcgtccggatcaggctcaagcgttgactccaacatgcccgaatccaagatgcacccctacctcaggaaccttatggtgctcgggctcagcttctggcaggatcagaatatcatcatcaatcaagcgctgaagcggcatagtgtcgatcctgaatggtggatgtgccctgccatacctgtgaaagacattaccccggcaccaccgccttcagtggcaatggcgaaggaagactaagaagaagtcactggggacaatatacgaggaggggactcctgagcctgccaatggcgacgacgatggagctttggcactgccagagacaggattggggcttagcttgaatactgatggggtgctcaaggcgtggtgtggcagaggctctgcgtttgctgatggcaatgggcctgacttgccattgtcccctgctcatgtggtagtaagtatttccagcttatctaaagatataaaagatcttacatttccagttaaaaattaaagatggctagagctcttggaaccctgagtagtacctgctattagttcatatcgtctggtaagtagaatctatttcacttcagtagaagtacagatcgtctgttgttttatatcagcagtgatcagaaaaatcttggcatgcattgctttgtttcagtcccttcgcatttcttgtcaatggaagatttctcccagaagaaaatctgtgtctgaaatttgctaatatgaaatagtacagtatgcccaccagtacttgactttactggctcaatgggccaggcagaaggaaattccaattggttgttttctttgagttgaatcattataacaaacttagccctcattatgttgtatctgcagtttttgaattcaattgaagtaaaaggaaatatcatagtttggtcctttcgcgaattttttttgtccaattttttgtccttgtaggtttttccgttgcattagaaaacactgtaggctgcttccttgcgttgcctctccgtttgcaggaacaagagaccagtttttatgtcatagacatgaactactttcctggtatgtggctgctttcttgcgttgtctctccgtttgcagggaagggtgctcccagcccccgtcatgccccttggcccctcccaaccctcgtcgtcataacggagggtgctgcgacaagccagcggatgagcgtggcgatcccgctggagcagtccatcacgccggtgctttaggactttatgaatctcaacatatgctatctaccagtgtattactgtggagcctcgtcgtcgactcccacgtccatgagaccacctaggagttgctcgtgtacagctagctctaccaattcgagggatacataagtgggagtactgagggaggtgccgggggagaaaatttttctcagtttggtgctgatttatcaagacgaatgacttattgccacagagctaaggatgacagtactggactgcagagagaaagttggggcagatttccggcttcaatttatgtccttatcagcactacaacagcaacgacgagcacagtagcaaagcagtccgagccttgtggaggagagcctccacaagaagtgcctcgacgggttccctacctccgccgccggtatcgtgtcattgatgggccacttcatcgctatctagcacaaggtgcaacacccccttccctcgctccttcgctcttcctggctccaatctgatacaccctctacgttagggtatgagtgaccgagtgacacttgatctgtcgactttaaccggggcagtcgacaaagcacgcgcctggatgccctactatatgtattgagtacataggattattagtacacttcctttgcactgtcacagcgatctagatctccacgaactaaatgtggatcctctctcttggcgtgcacaccgatcttttcattcacactgcactcaccgtcatggcatccaccaaggacttctcgttcgtctctgccttcaggtccaacaaatactttt

SEQ ID NO: 209629 - DNA, 6039 bp, Zea Mays
tttgctctgttatagagtagtaaaaacttcacctttggatcatttacctcactctctacaactacaagtctacaaggtaatgctcatgtaaaaaattctctttgaagggcttaacgaagagttttacagggataggcatgcaaatcctaaagctatatccgcttaaaaaaatctaggaatccgtaaacagtgtacaggtcaaaacaaaagaaagaaaaaaaactgcacacgacgtcaatcactctcactgcctctttccaccctgctgtagactgccctttctaccgttatatacccagcacaggatgtcgcgaccgatcggtttcccgagctgcagaggaattcttgcgtggatgctcgtctcttgcctagttgtttgtttcttgcagaggaattttttcctgaacttgtccccgccgtcttgaaggtttcttgtttgggagcagggcggaggcgctcctttccttcttggccgacgatggtatggactgggcagcggcgcgcgcgagcgatttttgcggcaaaccccctgcgagaaacatcgtccgcagaacacctcactttcactttttgtactcttccgtctctgccctcgcgttattgcctcgtctcgctcgcctggctggctcgtgccttgccttgctcagcgtacgcgaacgcagcgagaaggaggagcaaggaaatagagagagagagaaaaaaaaatcaagtcatccccctttcctctaagctcgttccatggagaactcttctcacaagcggacgcgggaggcggccgacctcgccgccggaggctgtggagaggagggctcgccgcaggccgacgccaagaggctgcggccgcaggacctgctcgacatgctggaggacgacaccgacacggccgcggtcggcgacctaccgtcggtcatgcggagcctgtaggaggagatagctagcttcgacgaggccgcggagacgccggcgccgacatcggggcagcagccagagctgggcttcctactcgaggcctcggacgatgagctggggttgccgccgacgggcgccgcctcctcttcgtcggaggaggctgggcgcgcgggggcaccggagcccgcgctcgacggccagatctggggcttggagggcggaggtgctcctttccttcttggccggcggcggcatggactgggcagcggctttcgggtctccgtcgtggagcgcggtggcgacggaccctggcccgaccatgctgtccttcgcaggcccgtcctcctccgccaccgacgccgaggtgcgactccaggatttcaccgtgggtcgcatggaagcggaggcgacggtcgcgagcatcacgcacggatgggggcaggcgatagcacggcatgcagacgcccaagtccagcaatgctggggcatcacgagcgggcgggggtaccgcggcgtgcgtcacggggacggggcgggcgcacgggcgggcatcgcgatgacgggtgcgggagcaggcgggggcacgcgaatcacgggagtggagccacggtggtggtggacgccctcgttagtgtcttatagagtagtagagatagagattgtaggcgtccacaattcccagtggcgcacggttctgctgtccctccatcctcccgcgctccctccgtgctacatcaacgcccgcaggttctgcctctccctgtcactacgccgcctgcccccgccgcacccctccccgttactaggtgcggcgccgcgccgcgccgcctcctcggcctcgcctccgcgctcgccgacgactcgtcctgctccgacctcctcccgctgttcccagtccccgccggctacgccgcctctgacgccgcggatccccgatgccgagagctgcccgtcgcccgctgccgtcagcagcgtcttcagtaagttccgcgacccggcgccatctcctgtgacccctgacgacgctgcggcggcgcctgacgagcccagggatcttggcttcgacgatgacgacagtttcgacgccgattctattctgtgcggcgtccaccagagcgcggccgagggcatcgatggcatcatgggatcagaatatcatcatcaatcaagcgctgaagcggcatagtgtcgatcctgaatggtggatgtgccctgccatacctgtgaaagacattaccccggcaccaccgccttcagtggcaatggcgaaggaagactaagaagaagtcactggggacaatatacgaggaggggactcctgagcctgccaatggcgacgacgatggagctttggcactgccagagacaggattggggcttagcttgaatactgatggggtgctcaaggcgtggtgtggcagaggctctgcgtttgctgatggcaatgggcctgacttgccattgtcccctgctcatgtggtagtaagtatttccagcttatctaaagatataaaagatcttacatttccagttaaaaattaaagatggctagagctcttggaaccctgagtagtacctgctattagttcatatcgtctggtaagtagaatctatttcacttcagtagaagtacagatcgtctgttgttttatatcagcagtgatcagaaaaatcttggcatgcattgctttgtttcagtcccttcgcatttcttgtcaatggaagatttctcccagaagaaaatctgtgtctgaaatttgctaatatgaaatagtacagtatgcccaccagtacttgactttactggctcaatgggccaggcagaaggaaattccaattggttgttttctttgagttgaatcattataacaaacttagccctcattatgttgtatctgcagtttttgaattcaattgaagtaaaaggaaatatcatagtttggtcctttcgcgaattttttttgtccaattttttgtccttgtaggtttttccgttgcattagaaaacactgtaggctgcttccttgcgttgcctctccgtttgcaggaacaagagaccagtttttatgtcatagacatgaactactttcctggtatgtggctgctttcttgcgttgtctctccgtttgcagggaagggtgctcccagcccccgtcatgccccttggcccctcccaaccctcgtcgtcataacggagggtgctgcgacaagccagcggatgagcgtggcgatcccgctggagcagtccatcacgccggtgctttaggactttatgaatctcaacatatgctatctaccagtgtattactgtggagcctcgtcgtcgactcccacgtccatgagaccacctaggagttgctcgtgtacagctagctctaccaattcgagggatacataagtgggaggcgtccacaattcccagtggcgcacggttctgccgtctctccgccctcccgcgctgcatcaaccgacaaagctaatttaaccaaacaattacaatagcagattttaaaaaatctatatattaagtaggtgtaggtgactcacacggtttgattatttgctggactctgtaccatggtttgtagtttgtactacatccgatgcaagaaagaataaaattatagttctggaattaaagttcagttttgttctcataatgcagagttctggaattaaagttcaataatacagttctcagccaccatgttacatgtgcctccttcaaaaaggattgtgttattagagttcagtattagagtttagtactggtacctggtactccttttttgtgctactgctctgcttcgcccatcaaaaatatagtagcttgtatgactgcacacctgatgtggtagattaaatcactctacacagccacctgttttcttagctaaatgtgtgtgtggtgcgagcagaaggttcttcggattatcctctcatttttagtattcccagttctctatccggatgactacaaaatcacaggttgaactgttttatatatctttcagtttggacagtcatatttcacattcattggaaacagctaacctgaacgctttcaaggcataaccataaccttttaagtctttgtaattttttctcctccaactgcatttgcatttttaaatacatcacgtgtcccatagtctattagctaggtgctaaggcaaatatgaaagtatgactatttttatatgtgattttagcttttcaatgcagcaactacaacttctttgcaactctattttccatctcatgttttcagtactgagggaggtgccgggggagaaaatttttctcagtttggtgctgatttatcaagacgaatgacttattgccacagagctaaggatgacagtgtgagtatttttgctgttcaatgtaactcagttctgttatttttttgactgttgttgatgcatttctgtctagactggactgcagagagaaagttggggcagatttccggcttcaatttatgtccttatcagcactacaacagcaacgacgagcacagtagcaaagcagtccgagccttgtggaggagagcctccacaagaagtgcctcgacgggttccctacctccgccgccggtatcgtgtcattgatgggccacttcatcgctatctagcacaaggctgccctttgtgctcaagttcttccgagacgtcaagcgtgtgcgagaacaaggagctatagatgatcgtgacactttcctccatgcagtgcgagatctcctatgttttcactcaaatgtccaaggaagctgtgtttgctgtggaatttcaaggaagctgtgtttggtgtggagaaggagattgagataaccagattggaaggctgtaacacctgcgacggaagtggtgccaagccaggtacaaaggcaacggcatgtaaaacttgtggaggtcagggccaggtagtctcctccacaagaacactgcttggaatattccagcaagtctccacctgcaatacttgtggtggcatcggtgaattctccactccttgcaacacctgtgggggtgatggctgggtgcgaaggacaaagaggatcagcctaaaggttcctgctggagtggattctggaagcatgctgagggtctggtctgagggtaatgctggcaggagaggaggccctcctgggacctttatgtcttcattgatgttctctctgatcctattcttaagcgagatgggacaaacattctctacacatgcaaggtttcttacattgatgcaatccttgggaccaccgtcaaaatccccactgttgacggaacagttgaccttaagataccctcagggactcagccaggcacagctctggtgatgtccaagaaaggtgtcccgcttctcgagaagtcaaatgcccgtggagaccagctggtgtgtgtccaggttgatattctgaagcgtctgagcagcgacgagaagaagctaattgaggagcttgcaaacctgaacaaggctcaaacaaccaatagcaggagatgattgtcacacaaggcttcgtaggacaacgtgcttgtgtggtaggcaattttgatgcaaactgcagtgatgattggatggaaagagttggtagtgataaactcttctacgaactacatacagcaaggggtacactggagcaaaaatgtgtcgttccacatctgtaacctcgtttttaagctattaaagttgagtcagtgaactggacgtttttgcaatagcttagcatatgcactaggcaactttattagcctttttttgttgttatacgacttttgtattcttgaaagccttaggcaaaatatctgatggtggaatcaggtttagacttgacatttctttcacaaatgctgcaccatgcattcatggaatctgtaagctgtaccatggaaatgttaactgtagttttattgtttgtgatgcatttggggtttattggtttgctcttcaaatacgttatgcagacactacgtttttttctcccttcggcagctgttgatttgaagctgcctctcgtagagcaggtgcgttttgctctaggctactgttaatatgaagctgtgtcatgtgtgtccactggacatgacactggataggataagctatattcaattaaatttgtagtataac

SEQ ID NO: 209630 - DNA, 845 bp, Zea Mays
ctcatatagataatcttatataaaaataggtttatatatcctggtgctcttgccatggctggtgcatcgctcctctccccatcctgcacgctcctccgcctgattcccagcgcgtcgcacttcaagagattcgatcgggttcgccggttcgcgcccgccgccatggcgacttcctcaggaccaaaggaggcgccagcgaataaccctgggctccagaccgaggtcgaccccgccaccaaaggctacttcttgcaacaaacgatgttacgtgtgaaggacccaaaagtgagccttgacttctactcacgtgtgatgggcatgtcgttgctgaaaaggttggattttgaagagatgaaattcagtttgtattttctaggttacgaggatgtgaccttagcccctgatgatcatatcaagcggactgaatggacttttaggcaaaaagctactcttgagctcacccacaactggggcacggaaaatgaccctgaattcaaaggttaccataatgggaactcagaccctcgtggttttggtcatataggagtaactgtggatgatgtccacaaggcatgtgaacgctttgaacgtcttggggttgagtttgtgaagaaacctgatgatggaaaaatcaaaggcatcgctttcatcaaagatcctgatggttactggatcgaaatatttgaccagacgattgggacggtaacttcttcagcatcatgatgaacagtagtggttccttatatgcacacttgactcgtcgccataggagtgaactatttgaatggttactgttgttgtcaaccattatcaatttcgggtgagcgagggcctccatggcttct

SEQ ID NO: 209631 - DNA, 372 bp, Zea Mays
ccactttgaagatgagatcccaaaggttgctgaaaaggttggattttgaagagatgaaattcagtttgtattttctaggttacgaggatgtgaccttagcccctgatgatcatatcaagcggactgaatggacttttaggcaaaaagctactcttgagctcacccacaactggggcacggaaaatgaccctgaattcaaaggttaccataatgggaactcagaccctcgtggttttggtcatataggagtaactgtggatgatgtccacaaggcatgtgaacgctttgaacgtcttggggttgagtttgtgaagaaacctgatgatgggtaactgagcatattacgactgatgtacactagggattgcccaa

SEQ ID NO: 209632 - DNA, 3534 bp, Zea Mays
ttttcatttcacattttttcctcacaaaaaagagagggaaacaatattgcagggccgcccgcgccggaaccgaccacttcaccggcagcgagccggagactccgtggagcccctgtccccgcgccggcgtgggcggagggaggggagcagcggcagcggcagccagcagaagaaggataacggggggctcttggagcctctgggaagaagcttctagaagctgcctgaggcgagggcgagcgcgccgttgccagagtgatctcggtggaataagccgcgcggggccggcgccgtgggggatgcgcctctgggtgccggcaccctccgggatttgaatggtagccagatctcgagggggaggggagcttctcgaagctgggtgaggcgcgcgggccggccgccctgcggttagggtttggtggaagcgggatggtggggagctcggtggagggaggagcggacggagatggaggctgctgcggcgtcggggacacctcgcccgggaccatcgtgtgggtgcggcggaggaatgggtcctggtggcccggcaggatcctgggcccccaggagctcccaccatcgcagatcatgtcgccgaggtccggtacgccggtcaagctcctcggccgggaagacgcaagcgtggattggtacaaccttgagaaatcaaaacgtgttaaagcattcaggtgtggggagtttgatgcctgtattgagaaggcagaggctactcaagggactcttgtgaagaaaagagagaaatatgcaaggagagaagatgctattcttcatgcgcttgaattggagaggaagcagcttgcatcaaagtaccagactcaaggtttcagacctggaccacctgcttgcacaaaacatcacaaagaccttggaagtactcgctacaagagtaagaagggcaagaagcgcaaagatgcatctgttcctcctgatgtaaaaaaagaagtgggacaatgttttctgcctgctggttcaaagagaaacttttcaggatcacttactcaaggaaatcttgtcagtaatcacatgggtgacttctcccctttgggacattctcatggaggtgccactttagaaaacaaggagagtacagttgtgaagaaaaatagatcagatggaagtgattttgaagactctcttgtttcaaaatcagacagacgcagaccactttctcaagtattgcagagcagtgaaaacttgcttcctcacttaaagcaaaatgatgattttggggctttgttaatcgcggagagtaataatccttcacttgccgcctcctggtccagaagaaataaatatacgtacatggctagtgattctggcgaaactgagagtcatagtgatttaccttctataaagatgtcttctactagaactgattttgagaatgaaagctatcttcagcatcctgtttatttttctgaggagcagacttctgacttcattgagaagcaaataaccgagtcttccgagagggaatgttcagaaagcgagactgaagatgatgctgaacttctgcagaatgcaagtgtgattctacgtacagaatcacatgctccttgtccatattctattccagtttctgacaagttcaagcatgtggattatgatgacaatgaggtgatctattctacttatatgccccagttgaatgaatatgaggaagaggatggttcttctgagctgggtgtctctcagtggcacatgaaaggtaaacgtaacaatcgtaatgccgtgaagagattagtggatatgagagatggaaatacatggttaaataaatacaatggatcattaaaaggatctttgcataacacaaatggtgggaatcccagaaaagaaggtatgcacacatctggtgagcagttttttgaggaaagcttttaccaaataaaagaggagcccaattatgattctgatgaaactaatttatttgagaacatgagccattcagagactaacttgtactatggtaaaaaatacccttcatccttgagaaccacaagagatcttagccgaggctacagttactttaatgactcttcaaatgtttctcccctaaacaaggacactgaacgaatatatcatgttgatcggaatgcatattgggatagaccttcattttaccaaaggaagttgacttcaagttttggtggcatgggaccaatgttgttcaatgttaacctcaaagttcaggccagctaccaaggagagcatgtccctcttgtctctttgatgagcagacttaatggcaaagcaattgttggacaccctatccaaattgaaatagttgaagatggttccacagcagtattctgtggtgacagtggtatgcaagagaccacagctgctccacctgcttggccaacaggtagaaggactgccatgcaaagagttccccgttcaaatccatcaggagcactgttggatggcgataatgaaggtggtcttgtgtattctgattatgagacgaaaccaaccttaagaaagtactcatcttcttcgaatcaccaggttaaggtgaataataaaatcagttctaatgctaagaggtcatcagctaagccccctaagaagtcatccaagaaaacaaacctctcaagccagaaacttagagctctctcttccatctccactgcaaaaaaccatcatggagaaggtggtcaagcgaaggcaaattggcacaatgacatatttggtggtttaatcggatcagaaggagcagttcctctagtgacatgtgtcccaacgaaggttgtgttcactaggatattggaagcagttggaaggccacctctgtctgccgctcgccgtgttagaatggctagtcctccggtacgagatcctccataggcttcaactgtagtgctacatgcggtttatgtcgccagccatcgacatgcaagttttatgtacattcctgttaattgatgaagaggcagaccattcaatcatccggtaacacctgtgaggagtcgattgacatggttgctccgtaataacttggaacagctgatcccttattagcagtggtgacaacctgtaaaaatcagtaatatttctgactggagactgaggtcatgaatgcttcagagcagctcacatatttctgactggagactgcgtccatgaatgcttcagagcagttgagccatcgataccatgaagaggtactcttcggtgtagctagcactggtaactttcgtcacaactgtctcctgtaaagtactagtttcaacattttaggtggcaatttagtcaaaacatttgtgccgtcatatatagcgataggtcatagatttcctaatgccatgtataatcccttaattacatcctgatgtgtctgtcatttgttgtcgagaagtagttggttcaactgtatgtttagagaagcatgtgtacctagtcgatgtaatatatactagtccagagcgcgcgccctgcgcgcgtttataaacaattaggtataaatgcataaacatcttttaatcatgaagttgcatattgaatacttat

SEQ ID NO: 209633 - DNA, 3551 bp, Zea Mays
aaaacattttcatttcacattttttcctcacaaaaaagagagggaaacaatattgcagggccgcccgcgccggaaccgaccacttcaccggcagcgagccggagactccgtggagcccctgtccccgcgccggcgtgggcggagggaggggagcagcggcagcggcagccagcagaagaaggataacggggggctcttggagcctctgggaagaagcttctagaagctgcctgaggcgagggcgagcgcgccgttgccagagtgatctcggtggaataagccgcgcggggccggcgccgtgggggatgcgcctctgggtgccggcaccctccgggatttgaatggtagccagatctcgagggggaggggagcttctcgaagctgggtgaggcgcgcgggccggccgccctgcggttagggtttggtggaagcgggatggtggggagctcggtggagggaggagcggacggagatggaggctgctgcggcgtcggggacacctcgcccgggaccatcgtgtgggtgcggcggaggaatgggtcctggtggcccggcaggatcctgggcccccaggagctcccaccatcgcagatcatgtcgccgaggtccggtacgccggtcaagctcctcggccgggaagacgcaagcgggattggtacaaccttgagaaatcaaaacgtgttaaagcattcaggtgtggggagtttgatgcctgtattgagaaggcagaggctactcaagggactcttgtgaagaaaagagagaaatatgcaaggagagaagatgctattcttcatgcgcttgaattggagaggaagcagcttgcatcaaagtaccagactcaaggtttcagacctggaccacctggtaatatttctgcttgcacaaaacatcacaaagaccttggaagtactcgctacaagagtaagaagggcaagaagcgcaaagatgcatctgttcctcctgatgtaaaaaaagaagtgggacaatgttttctgcctgctggttcaaagagaaacttttcaggatcacttactcaaggaaatcttgtcagtaatcacatgggtgacttctcccctttgggacattctcatggaggtgccactttagaaaacaaggagagtacagttgtgaagaaaaatagatcagatggaagtgattttgaagactctcttgtttcaaaatcagacagacgcagaccactttctcaagtattgcagagcagtgaaaacttgcttcctcacttaaagcaaaatgatgattttggggctttgttaatcgcggagagtaataatccttcacttgccgcctcctggtccagaagaaataaatatacgtacatggctagtgattctggcgaaactgagagtcatagtgatttaccttctataaagatgtcttctactagaactgattttgagaatgaaagctatcttcagcatcctgtttatttttctgaggagcagacttctgacttcattgagaagcaaataaccgagtcttccgagagggaatgttcagaaagcgagactgaagatgatgctgaacttctgcagaatgcaagtgtgattctacgtacagaatcacatgctccttgtccatattctattccagtttctgacaagttcaagcatgtggattatgatgacaatgaggtgatctattctacttatatgccccagttgaatgaatatgaggaagaggatggttcttctgagctgggtgtctctcagtggcacatgaaaggtaaacgtaacaatcgtaatgccgtgaagagattagtggatatgagagatggaaatacatggttaaataaatacaatggatcattaaaaggatctttgcataacacaaatggtgggaatcccagaaaagaaggtatgcacacatctggtgagcagttttttgaggaaagcttttaccaaataaaagaggagcccaattatgattctgatgaaactaatttatttgagaacatgagccattcagagactaacttgtactatggtaaaaaatacccttcatccttgagaaccacaagagatcttagccgaggctacagttactttaatgactcttcaaatgtttctcccctaaacaaggacactgaacgaatatatcatgttgatcggaatgcatattgggatagaccttcattttaccaaaggaagttgacttcaagttttggtggcatgggaccaatgttgttcaatgttaacctcaaagttcaggccagctaccaaggagagcatgtccctcttgtctctttgatgagcagacttaatggcaaagcaattgttggacaccctatccaaattgaaatagttgaagatggttccacagcagtattctgtggtgacagtggtatgcaagagaccacagctgctccacctgcttggccaacaggtagaaggactgccatgcaaagagttccccgttcaaatccatcaggagcactgttggatggcgataatgaaggtggtcttgtgtattctgattatgagacgaaaccaaccttaagaaagtactcatcttcttcgaatcaccaggttaaggtgaataataaaatcagttctaatgctaagaggtcatcagctaagccccctaagaagtcatccaagaaaacaaacctctcaagccagaaacttagagctctctcttccatctccactgcaaaaaaccatcatggagaaggtggtcaagcgaaggcaaattggcacaatgacatatttggtggtttaatcggatcagaaggagcagttcctctagtgacatgtgtcccaacgaaggttgtgttcactaggatattggaagcagttggaaggccacctctgtctgccgctcgccgtgttagaatggctagtcctccggtacgagatcctccataggcttcaactgtagtgctacatgcggtttatgtcgccagccatcgacatgcaagttttatgtacattcctgttaattgatgaagaggcagaccattcaatcatccggtaacacctgtgaggagtcgattgacatggttgctccgtaataacttggaacagctgatcccttattagcagtggtgacaacctgtaaaaatcagtaatatttctgactggagactgaggtcatgaatgcttcagagcagctcacatatttctgactggagactgcgtccatgaatgcttcagagcagttgagccatcgataccatgaagaggtactcttcggtgtagctagcactggtaactttcgtcacaactgtctcctgtaaagtactagtttcaacattttaggtggcaatttagtcaaaacatttgtgccgtcatatatagcgataggtcatagatttcctaatgccatgtataatcccttaattacatcctgatgtgtctgtcatttgttgtcgagaagtagttggttcaactgtatgtttagagaagcatgtgtacctagtcgatgtaatatatactagtccagagcgcgcgccctgcgcgcgtttataaacaattaggtataaatgcataaacatcttttaatcatgaagttgcatattgaatacttat

SEQ ID NO: 209634 - DNA, 3589 bp, Zea Mays
ccggaaaccaggaaccaaacttaccccgaaagaaaagaaaacattttcatttcacattttttcctcacaaaaaagagagggaaacaatattgcagggccgcccgcgccggaaccgaccacttcaccggcagcgagccggagactccgtggagcccctgtccccgcgccggcgtgggcggagggaggggagcagcggcagcggcagccagcagaagaaggataacggggggctcttggagcctctgggaagaagcttctagaagctgcctgaggcgagggcgagcgcgccgttgccagagtgatctcggtggaataagccgcgcggggccggcgccgtgggggatgcgcctctgggtgccggcaccctccgggatttgaatggtagccagatctcgagggggaggggagcttctcgaagctgggtgaggcgcgcgggccggccgccctgcggttagggtttggtggaagcgggatggtggggagctcggtggagggaggagcggacggagatggaggctgctgcggcgtcggggacacctcgcccgggaccatcgtgtgggtgcggcggaggaatgggtcctggtggcccggcaggatcctgggcccccaggagctcccaccatcgcagatcatgtcgccgaggtccggtacgccggtcaagctcctcggccgggaagacgcaagcgtggattggtacaaccttgagaaatcaaaacgtgttaaagcattcaggtgtggggagtttgatgcctgtattgagaaggcagaggctactcaagggactcttgtgaagaaaagagagaaatatgcaaggagagaagatgctattcttcatgcgcttgaattggagaggaagcagcttgcatcaaagtaccagactcaaggtttcagacctggaccacctggtaatatttctgcttgcacaaaacatcacaaagaccttggaagtactcgctacaagagtaagaagggcaagaagcgcaaagatgcatctgttcctcctgatgtaaaaaaagaagtgggacaatgttttctgcctgctggttcaaagagaaacttttcaggatcacttactcaaggaaatcttgtcagtaatcacatgggtgacttctcccctttgggacattctcatggaggtgccactttagaaaacaaggagagtacagttgtgaagaaaaatagatcagatggaagtgattttgaagactctcttgtttcaaaatcagacagacgcagaccactttctcaagtattgcagagcagtgaaaacttgcttcctcacttaaagcaaaatgatgattttggggctttgttaatcgcggagagtaataatccttcacttgccgcctcctggtccagaagaaataaatatacgtacatggctagtgattctggcgaaactgagagtcatagtgatttaccttctataaagatgtcttctactagaactgattttgagaatgaaagctatcttcagcatcctgtttatttttctgaggagcagacttctgacttcattgagaagcaaataaccgagtcttccgagagggaatgttcagaaagcgagactgaagatgatgctgaacttctgcagaatgcaagtgtgattctacgtacagaatcacatgctccttgtccatattctattccagtttctgacaagttcaagcatgtggattatgatgacaatgaggtgatctattctacttatatgccccagttgaatgaatatgaggaagaggatggttcttctgagctgggtgtctctcagtggcacatgaaaggtaaacgtaacaatcgtaatgccgtgaagagattagtggatatgagagatggaaatacatggttaaataaatacaatggatcattaaaaggatctttgcataacacaaatggtgggaatcccagaaaagaaggtatgcacacatctggtgagcagttttttgaggaaagcttttaccaaataaaagaggagcccaattatgattctgatgaaactaatttatttgagaacatgagccattcagagactaacttgtactatggtaaaaaatacccttcatccttgagaaccacaagagatcttagccgaggctacagttactttaatgactcttcaaatgtttctcccctaaacaaggacactgaacgaatatatcatgttgatcggaatgcatattgggatagaccttcattttaccaaaggaagttgacttcaagttttggtggcatgggaccaatgttgttcaatgttaacctcaaagttcaggccagctaccaaggagagcatgtccctcttgtctctttgatgagcagacttaatggcaaagcaattgttggacaccctatccaaattgaaatagttgaagatggttccacagcagtattctgtggtgacagtggtatgcaagagaccacagctgctccacctgcttggccaacaggtagaaggactgccatgcaaagagttccccgttcaaatccatcaggagcactgttggatggcgataatgaaggtggtcttgtgtattctgattatgagacgaaaccaaccttaagaaagtactcatcttcttcgaatcaccaggttaaggtgaataataaaatcagttctaatgctaagaggtcatcagctaagccccctaagaagtcatccaagaaaacaaacctctcaagccagaaacttagagctctctcttccatctccactgcaaaaaaccatcatggagaaggtggtcaagcgaaggcaaattggcacaatgacatatttggtggtttaatcggatcagaaggagcagttcctctagtgacatgtgtcccaacgaaggttgtgttcactaggatattggaagcagttggaaggccacctctgtctgccgctcgccgtgttagaatggctagtcctccggtacgagatcctccataggcttcaactgtagtgctacatgcggtttatgtcgccagccatcgacatgcaagttttatgtacattcctgttaattgatgaagaggcagaccattcaatcatccggtaacacctgtgaggagtcgattgacatggttgctccgtaataacttggaacagctgatcccttattagcagtggtgacaacctgtaaaaatcagtaatatttctgactggagactgaggtcatgaatgcttcagagcagctcacatatttctgactggagactgcgtccatgaatgcttcagagcagttgagccatcgataccatgaagaggtactcttcggtgtagctagcactggtaactttcgtcacaactgtctcctgtaaagtactagtttcaacattttaggtggcaatttagtcaaaacatttgtgccgtcatatatagcgataggtcatagatttcctaatgccatgtataatcccttaattacatcctgatgtgtctgtcatttgttgtcgagaagtagttggttcaactgtatgtttagagaagcatgtgtacctagtcgatgtaatatatactagtccagagcgcgcgccctgcgcgcgtttataaacaattaggtataaatgcataaacatcttttaatcatgaagttgcatattgaatacttat

SEQ ID NO: 209635 - DNA, 4172 bp, Zea Mays
cacccaccccccaccaccacgcccgacctcgtccgcggtgaaggtcaaggagacggcggaggaagcctgacaaccgtgtggatggggatctcgttcaagctgtcgaaggtcggggtccgcgtgcacccggccgcgcgctcggcgtccgcggcggtggcggaaaagccgggcgcgggtgggaaggagggttcgctgtctgagtcgacacgcgaggacaaaagaaaagatgtcaatggcatcaaaattttaccagcatgctccaaagaaattttgccagatcatgaggtttctttcacattgagcctctatgagagaggttatctcatttcaaagtcagcacccatggatcctagtcagacctcaattcaggacggcaaaacactgcatccctatgatagagcatcagaaaagttgttctctgctatcgaagctgggaggctacctggcgatatttttgatgagataccaagcaagtactataatggatcagttgtttgtgagatacatgactaccgaaagcatgtgtccaaccaagcgcctgcatcatctgctgagctaggatcaccaattgtgaataaagtacgactgcgaatgacctttgaaaatgttgtaaaggacattacccttctatctgatgattcctggagttacagggattttatggaagctgaggcttgtattttgagagctctacaaccggaactttgcttagaccccacacctaaactggatcgacttcatcaggatcctgttccgcataagttgagccttggtatagggaaaaagaggaggctgaggcaaaatcctgaagttgtcacatccagtcacatgtctcatggtaaaaaggtttgcattgataggttacctgaaagtgccaaagctgatgagatgggcatcactagcagtaatgcagctcagcaggttggtggtaacattaccatccaaaatatgtcagtctcaggtggttctcagacacttagaccaaataattcttcacaagatgctgccagaacgcttttgcctcaatctggtctacagcaaaccttgtgttattctgctgctggtaatgatcatatggcaggaccacctgccaatttttctggaaccagttcatgcatttcatctcatcagagcctgattggttacagtgactctgtggctgccaacagccttctatctgtgaagagggaaatgcaggatgcctcgcttcaagatcctaagagaataaagcgaactggtggtattgatgatgtacagcagcagcagataaggcctcaaccccttggtgggcaggagatgcaatggaagaaccatcaactgcatccacaattagatgttaaggggatgcagtatgcatcttcactgagtggtcagagatatccttcttcgatgatgaacaacatgcaagatccaggatcttccttatattttagtcatcagcaaaatttgagatacgatgctaagcaagagcagatggatggttctgataagtcaaaagacaccttgcagtctatggcacctgaaacttccatgctggatcagcagcaatcccaatctcaacatttaccacaacaatcagtggcaagaaataatgttccaaacatgggacagtggcaaaatactcggttcgcagctgagaaggacttcaaaaaagaagacataattcagagaagaaagttagcacctagctctcgtgcccctactgggcctgtgattcagtctccagtgtcctcgaaatctggagagttatcaggcagttcaatgggtggccagtttggttctgctgtgacatcagctgtaacaggggtacagaaagataaatttgctgcaaattccggtactgcagttggatttccttctgtagcttccagtcctagtgattccatgcaccgaatacaacagcctgctgttgcttcctcaaagaggaaaacaaattctgtccccaaaactcaaccgcctgtgagtgctgttgggtctccagccagtgtttcaaacatgcatgcgctgctgaatgcaagcagtccatcgattgggaccacacctatgggagaccaagcaatccttgataaatttgtgaaaattgataacatttcccatcggtaccagcttttcaataagaagaagtttgataaaatatctcaaaagaaaaccattatcaatcgaaaccaaaatgtagctggttgtctcaacagttgtttccattctgaggattatatagataccacaagacctctttgtaattctatgattagtggaactataaacacatgcaagggtagggtaataaactttgtgagcacaaaagacatgtaccaaggtcattcaaggccattcccggttgattttaacgaactgtctgatgaaactgtaagaatgcaatatggagatataaaagattttgatgatccaaattcatatggttgtgtattcatattaccgacaaagcactatgctgacttgtttgcggggcagcttatttcccttatgttgcaagatggacattctaaagctgacgatgaagttgtgcgtagcaccccttttgctaacatcagtacaccctttggacctttaccaaacaacgtagtgagtgatgtaaagcaagagggaggtgtaagccaacaacttaatgccgcagcccatgcaaatgtggcacctggaacacaaatgcaacagcttcctgtcaataggatgcttccatctgcaaatggcaaccagattctagcaatgcagcaaggttatatgcaaggggcagccatgcctccaaggagccagcatcttgaccaaaatttggttcagcagccgcagcaccaacagccacaacagcaaccactgcagcaaaatgctcaagcccaggtgcagcaaccatcatctcttccactgaaccagatgcaaagacctcaggttctgcctacgagcccattatctcagatgttggggcctggctcaaatctcccaatgggctcaagtcagataggtaagaataaggctcctcccacatctttgcagcttcaaatgctacaggcacaaccccaacaacctatgtctaggaaagtgatgatggggcttggctcagccatgaacatgggcaatatggttaacaatgttgttggtcttggtggcctcggaaatgttatgggaatgggcaacgtgcggccaatatcttcccccatggcatcgatgtcaggcttaggtaacaattccaatccaatgaacatgggaatggcatccaatcttgctgcagctggacttcggccaggcatgaaccctgctgctattgccaaggtgcgtatggggttggcacagcaaagggcagcaggcatgtaccctggaatggttggaatgcctggaagcagctcatcaatccttcctagttcagctggcttgtctatgatgggccagccgctaaacagaggcaaccttggccccctccagagggccatgatgtcgtctatgggccctccaaaaatgccaggaggtaactttcagctgaatgctcaacagcaaatacacctccagcatcagttgcagcagctccaacagaacccacagcagcagctccaacagctacagcaacagcaacaaatacaacaactgcagcagcagcagcagcagcagctccaacaacagcaactgcagcagcaacaacaaatgggatctccgttaggccctcctccaagcccgcagctgagctccggtcaacagcatagctaactccccgatggagcagctgcaaggcgccattaagggaggtcctggtagtagtaaccggagtccacttcttgcctatggaaggtgtaaacactgaccaagatcactctgttctcttgtttgctgtggtaaatgaggttaaattaggtgtgttataagttataggccatagaggacagctttaaggaccagctttatgcttggatttttatgctgtacattgtagttagtaggaatggtgtgttggagctcggtaatcagttctatgcaagcattattcaattggacagttttctactcttgtagcttcatgtttaaatttaaattaaattcatcaaaattgtggacttgttacgtaaccattgtggttaccgataagtatcttcatttgttcgccaacaattttgtaacgttgtcaaattcaattttggctgtgtatatgggtctgactggatatcggcatt

SEQ ID NO: 209636 - DNA, 4085 bp, Zea Mays
cacccaccccccaccaccacgcccgacctcgtccgcggtgaaggtcaaggagacggcggaggaagcctgacaaccgtgtggatggggatctcgttcaagctgtcgaaggtcggggtccgcgtgcacccggccgcgcgctcggcgtccgcggcggtggcggaaaagccgggcgcgggtgggaaggagggttcgctgtctgagtcgacacgcgaggacaaaagaaaagatgtcaatggcatcaaaattttaccagcatgctccaaagaaattttgccagatcatgaggtttctttcacattgagcctctatgagagaggttatctcatttcaaagtcagcacccatggatcctagtcagacctcaattcaggacggcaaaacactgcatccctatgatagagcatcagaaaagttgttctctgctatcgaagctgggaggctacctggcgatatttttgatgagataccaagcaagtactataatggatcagttgtttgtgagatacatgactaccgaaagcatgtgtccaaccaagcgcctgcatcatctgctgagctaggatcaccaattgtgaataaagtacgactgcgaatgacctttgaaaatgttgtaaaggacattacccttctatctgatgattcctggagttacagggattttatggaagctgaggcttgtattttgagagctctacaaccggaactttgcttagaccccacacctaaactggatcgacttcatcaggatcctgttccgcataagttgagccttggtatagggaaaaagaggaggctgaggcaaaatcctgaagttgtcacatccagtcacatgtctcatggtaaaaaggtttgcattgataggttacctgaaagtgccaaagctgatgagatgggcatcactagcagtaatgcagctcagcaggttggtggtaacattaccatccaaaatatgtcagtctcaggtggttctcagacacttagaccaaataattcttcacaagatgctgccagaacgcttttgcctcaatctggtctacagcaaaccttgtgttattctgctgctggtaatgatcatatggcaggaccacctgccaatttttctggaaccagttcatgcatttcatctcatcagagcctgattggttacagtgactctgtggctgccaacagccttctatctgtgaagagggaaatgcaggatgcctcgcttcaagatcctaagagaataaagcgaactggtggtattgatgatgtacagcagcagcagataaggcctcaaccccttggtgggcaggagatgcaatggaagaaccatcaactgcatccacaattagatgttaaggggatgcagtatgcatcttcactgagtggtcagagatatccttcttcgatgatgaacaacatgcaagatccaggatcttccttatattttagtcatcagcaaaatttgagatacgatgctaagcaagagcagatggatggttctgataagtcaaaagacaccttgcagtctatggcacctgaaacttccatgctggatcagcagcaatcccaatctcaacatttaccacaacaatcagtggcaagaaataatgttccaaacatgggacagtggcaaaatactcggttcgcagctgagaaggacttcaaaaaagaagacataattcagagaagaaagttagcacctagctctcgtgcccctactgggcctgtgattcagtctccagtgtcctcgaaatctggagagttatcaggcagttcaatgggtggccagtttggttctgctgtgacatcagctgtaacaggggtacagaaagataaatttgctgcaaattccggtactgcagttggatttccttctgtagcttccagtcctagtgattccatgcaccgaatacaacagcctgctgttgcttcctcaaagaggaaaacaaattctgtccccaaaactcaaccgccttttctttggaagtctgtcatgggagactttttaaggaagttttgggttgcacggtaccagcttttcaataagaagaagtttgataaaatatctcaaaagaaaaccattatcaatcgaaaccaaaatgtagctggttgtctcaacagttgtttccattctgaggattatatagataccacaagacctctttgtaattctatgattagtggaactataaacacatgcaagggtagggtaataaactttgtgagcacaaaagacatgtaccaaggtcattcaaggccattcccggttgattttaacgaactgtctgatgaaactgtaagaatgcaatatggagatataaaagattttgatgatccaaattcatatggttgtgtattcatattaccgacaaagcactatgctgacttgtttgcggggcagcttatttcccttatgttgcaagatggacattctaaagctgacgatgaagttgtgcgtagcaccccttttgctaacatcagtacaccctttggacctttaccaaacaacgtagtgagtgatgtaaagcaagagggaggtgtaagccaacaacttaatgccgcagcccatgcaaatgtggcacctggaacacaaatgcaacagcttcctgtcaataggatgcttccatctgcaaatggcaaccagattctagcaatgcagcaaggttatatgcaaggggcagccatgcctccaaggagccagcatcttgaccaaaatttggttcagcagccgcagcaccaacagccacaacagcaaccactgcagcaaaatgctcaagcccaggtgcagcaaccatcatctcttccactgaaccagatgcaaagacctcaggttctgcctacgagcccattatctcagatgttggggcctggctcaaatctcccaatgggctcaagtcagataggtaagaataaggctcctcccacatctttgcagcttcaaatgctacaggcacaaccccaacaacctatgtctaggaaagtgatgatggggcttggctcagccatgaacatgggcaatatggttaacaatgttgttggtcttggtggcctcggaaatgttatgggaatgggcaacgtgcggccaatatcttcccccatggcatcgatgtcaggcttaggtaacaattccaatccaatgaacatgggaatggcatccaatcttgctgcagctggacttcggccaggcatgaaccctgctgctattgccaaggtgcgtatggggttggcacagcaaagggcagcaggcatgtaccctggaatggttggaatgcctggaagcagctcatcaatccttcctagttcagctggcttgtctatgatgggccagccgctaaacagaggcaaccttggccccctccagagggccatgatgtcgtctatgggccctccaaaaatgccaggaggtaactttcagctgaatgctcaacagcaaatacacctccagcatcagttgcagcagctccaacagaacccacagcagcagctccaacagctacagcaacagcaacaaatacaacaactgcagcagcagcagcagcagcagctccaacaacagcaactgcagcagcaacaacaaatgggatctccgttaggccctcctccaagcccgcagctgagctccggtcaacagcatagctaactccccgatggagcagctgcaaggcgccattaagggaggtcctggtagtagtaaccggagtccacttcttgcctatggaaggtgtaaacactgaccaagatcactctgttctcttgtttgctgtggtaaatgaggttaaattaggtgtgttataagttataggccatagaggacagctttaaggaccagctttatgcttggatttttatgctgtacattgtagttagtaggaatggtgtgttggagctcggtaatcagttctatgcaagcattattcaattggacagttttctactcttgtagcttcatgtttaaatttaaattaaattcatcaaaattgtggacttgttacgtaaccattgtggttaccgataagtatcttcatttgttcgccaacaattttgtaacgttgtcaaattcaattttggctgtgtatatgggtctgactggatatcggcatt

SEQ ID NO: 209637 - DNA, 651 bp, Zea Mays
ggaaaatcacacgcagcgccacacgcccccgcgcgacgcgtgtccgtccggcgaccgggcggcacgcctgctctccctctcccctctcccctctccccacttgtctcactcgcctcctgctccgctcctacaaaagagacctagcctgtctgtcctgttcctgctgtgtgctcaccacctccggccgtatcgtattcttcagagaagctcgatcttgcggtggccggtctcttgcatctgcggatctgcctccaggctactccagtcacgccactcgatcgatcgccaccttctctctctctctctctctctctctagtccagggacgaccggccggtccaggagatgagctcggttgggaggcaggactccatggacagcttggattgctcctactacctctcggatggcggcctcgtggaagcgcccaccttgtcctccaagcaaatcgagcatgccaggaagcaagctttgacgatcttggaaaccaagtccccagaagaggtcttgaagattttcaccgagggttcagaggccaaagccgacctggcgagggagaaggcccacaccccgacgacgcctccaaaaggtgctgatgcaaaggctactactactagcggcacggtgcggacctcaccgccgacgaactga

SEQ ID NO: 209638 - DNA, 2896 bp, Zea Mays
cccagagagcgggcaacgaaccaagccgtaaacagccccggaaaaattactcttgtgggttcccacctggcgactgtttttcttctccagtacacctcgccagcgcgataacttaactgcggcggcagccgccggcccgccgcccagctgcgcaggtcttcgtcgcgccggccactagaacgcagcacataagtgcatccatccactggcggccccattaggttcttcgttacggagtaagatcaattttagccatggtgctggcgcagctcgtttttctgaagtttcgggacttcaattgaacccttgagtggacagccacaaaaccatggctgcggttgccggcgtgtcggaaccgccaatggtggagcaagtgatcactgaattcttcgccaagagcctccacgtcatcctggagtcgcgctcaccctatgattcgtcgcggaacttcacactgccctccccaccgtcgtcgccactggctggcagccagccacgtgaccggtggttcaaccttgctctccgggactgccctgccgcgcttgagaattttgacctgtggaggcagagcaacctcgagcctctggtcattgacattgtcctcctgcaacgtgacaacaccagaaccgccagtgtcgaggccagcaggatcatcgagaggtgggtaattaagtacgaaactagcaggtctggcaatgttatcaagaacactgacaagaacgctagaagcagctgttctcaggatcatagcttgtacaggagggcgtacattggctcgacagtgttgttccggtcattgtatctggttgtcaggctcttgccagcataccatcttttcgaggagctcaattcatctggaaggatctgtccgttaagcctcttgcacaggatttcatcatttgttgagccattcacccgcgcagaggatgcagagatgaaacactttgcatttgctccgattgaaactctgcttggttccttaagcttgtcagtttcgtatgtacctgtgttggagttggctgcagtcccagagcagtccacaccaatgccacctgaacttataaaggattatgtcggaagccccacaacagattttcttaggaagcttgattccctaccttcagatggcattgcacctgcatgttttccagtgaccaggcggcacagttggagcactgggcatggagttagaccaccggcatcaccatttcttatgagttcagaaccccatggacgcctacagccatgtatgcctaccgataattctccgacagcatacatacatccacatattacatcatcatctgagaaaaagagaaatacagtaaatgaagagtgttattcatcgccacctctgtctccatcaccatctcatccgccttctagctacccaagaaatcctttcttcagatatgggagtgctccattaagtattcccacagtgagggctggcggaggtggtagcaggctgcctccttctccacgaaggaaggataaacagcaatgctcatctcaaaatgagaatctgacacattctcccaatgataaatcaatagtatcaaaggatttggtcaagcttagtgagtttcataatgcgaagtatttgcaaaaggttttatcgtttggtaatgatgatttaatgtattttcgtggactaaagttgacccatacctccagcaaacttttcatcatggatgaactggatgaacgggagttggtttttgcatgggaagataaagacaccatcattgatcagcttaacaggattgatctctctgactgggaggaccatgaatcgagccaggaacttggaggctcgttaacgagatctccagatgcagcgatcggtattcttatgcgcgtcctaaagaacgccccaggcctcagggaaaggctactgacagtccccagtgctggcacagttcctcaagaaccttcttcactccagagggtagtgactgaggaacatggcagcggagcatcaagctctgcggtggtgccttctgctcttctgaggtcaaggacagcggcggacgcgctgcaggagctgaacaggtacaagcagattagagaatcgatactgagccgcagcagagggcatccctgcagcaccgagctggaggagaaccccgcggatggagacccatagcatacagtatgacgacgaaagcgagctgtatataagtagagaaggctagaagctagctggctgtcttttaagttgctggtggctgctgagatgattttggaaattaggtagctgctaggaactgaccaactctctatatctgctatacatgtataagctacggcagacatatatatctgggatgatggcccacttgctgggttgtgtaaagtcgagacgtttaactgaagttcatgccgtgaaaatgtggttgaccttggctctgttctgtcgacgatttgttaccggacccatgaaagatcttgaagtgttctgtattaaaaaataggatccatttttttatctgttgagatttaatctcggataaatgtagttttcgatgcttcgatgcaagtggtacccaagaaagacacttttcgttacttaggatcaatgcttcagaaagagggagacatcgatgagaatgccagtcatagaattaaagttggatggttgaagtggtggcaagctgcaggtgtcttatgcgacccccgggtgccacacaaactaaaagacaaaaggcctgtttggaacactgcctcggcagccacatcccgccacactcaggacgccatagttgtggcgctcaaattggcagccgcaccttaggcgtgctgcggcgccgcatgcgtctgtccaaacagacccaaattctacaggacaacaatctggtcggctatgttgtatgtagcagaatgttggcccact

SEQ ID NO: 209639 - DNA, 1530 bp, Zea Mays
ctcgtctagactctggaccggttcgatcgcacgtgcgcacatgccgtggttactttctgctaggctacgcttccggattatgtgatctctctatgggctagtgttaccgattctttcgtggcggatcttgatgagctattggagtataggacagagaagactatcctggagatgaaaacgcagagacagaaaacttggaagatgatgctaatgatagtgtccctgacctgaaatctcttgatcttgatagtgtctaaaaacatcagaaggcacaatggtataaagacataatgaagacatgatcacaatggcagaaacgacaactggtggggagcctctttctgaagataatttagtaaatactattgaagcatccgacagagctcttaaccttgatgccgacaaagaagatgatacttgaatttttgaagggcagaatgggatacgttgcacgaaaccttgccgccattgttggcagtgctgttgcctcgaaaccgagtcgtgctgccgtgttggtggtttgggagcactggccaaaatgcccgcttgtaatgtgctgcactgctgcttctcggtgcaaaaaagacaaatctgtctggattctctactgcgtcagtgcagtctcgtattggttatctagaacaaactgaagtattatttgaaagcacacctccatctttaagatttcagtctagtagacttatagctgcaaagtcaacactagcaacaaggatcgattgtataaggctatcttcagcagtttactcattctcatctcttattttaacctacactctataaacagtgcattttacagtacaaaacagtgttttacatgttcatatgcacgatctgctggctatagcctaagagatgatccaactagaacggttgtgcagaacttgttagaagaaattagtaagaagattgaaaactggcaacaactaccacctgcaaggcttccaaagccaattccaattccagactttatgcctaaaaagaaacgaggggttgttggctccggaaaatgaaggaaagataatttatttgaaactttctcatgtccaaattgattaaaactattgtacttcatgtaaaagattgctatataatgcccattcacatgtctcatttgcattttgcaatttgttatattactcgagttccctggttgcattacctgtttggctgtttgtcttagttgcattttgcaacttactttgttatatcactctgagtgacccttcaatttcctcttacctttttgtatttgggaactcaattgtgaagatatgcacagaccaacacgatgaagcttgtgaatcggatgaagtttagcatgccagaggagagcacattgggtgatggcttagggaaaggttacggcttgcttgggcaggctggaagcgggaagctacgtgtgtcagctggtcaaagcaaactttctactaaaattgctaaaattttcaaagagaacagttctgagagtagtgtgtgaagattggggttgacatcaagcttagcattttc

SEQ ID NO: 209640 - DNA, 2668 bp, Zea Mays
gttcactatcacacgttgtgtgcgtgttaccgattctttcgtggcggatcttgatgagctattggagtataggacagagaagactatcctggagatgaaaacgcagagacagaaaacttggaagatgatgctaatgatagtgtccctgacctgaaatctcttgatcttgatagtgtctaaaaacatcagaaggcacaatggtataaagacataatgaagatgcacttgaaaggtgactccaatcaaggggccattctgcaagatcaagataccagcttgttgttgattgcaatgcttcatcagtagatattgacaatgagattactataatccacaatttcatacgtgacaagttcaagctaaaggaccctctactagaatcctgtgttcactatccgattgattatgcccgtgttgtctggaagattggaaatgacatggacttaacacttgatttgaaagttatttaccttctgcagacatgatcacaatggcagaaacgacaactggtggggagcctctttctgaagataatttagtaaatactattgaagcatccgacagagctcttaaccttgatgccgacaaagaagatgatacttgaatttttgaagggcagaatgggatacgttgcacgaaaccttgccgccattgttggcagtgctgttgcctcgaaaccgagtcgtgctgccgtgttggtggtttgggagcactggccaaaatgcccgcttgtaatgtgctgcactgctgcttctcggtgcaaaaaagacaaatctgtctggattctctactgcgtcagtgcagtctcgtattggttatctagaacaaactgaagtattatttgaaagcacacctccatctttaagatttcagtctagtagacttatagctgcaaagtcaacactagcaacaaggatcgattgtataaggctatcttcagcagtttactcattctcatctcttattttaacctacactctataaacagtgcattttacagtacaaaacagtgttttacatgttcatatgcacgatctgctggctatagcctaagagatgatccaactagaacggttgtgcagaacttgttagaagaaattagtaagaagattgaaaactggcaacaactaccacctgcaaggcttccaaagccaattccaattccagactttatgcctaaaaagaaacgaggggttgttggctccggaaaatgaaggaaagataatttatttgaaactttctcatgtccaaattgattaaaactattgtacttcatgtaaaagattgctatataatgcccattcacatgtctcatttgcattttgcaatttgttatattactcgagttccctggttgcattacctgtttggctgtttgtcttagttgcattttgcaacttactttgttatatcactctgagtgacccttcaatttcctcttacctttttgtatttgggaactcaattgtgaagatatgcacagaccaacacgatgaagcttgtgaatcggatgaagtttagcatgccagaggagagcacattgggtgatggcttagggaaaggttacggcttgcttgggcaggctggaagcgggaagctacgtgtgtcagctggtcaaagcaaactttctactaaaattgctaaaatgggcgaagctacttggttagcggtggatgcacatacatcccttcaaatccaaaattcagttataataatcaaaatttcaccatataagcatctctcatatcctattcttatgcacccacaagagagttgcaccccctttatatccataactataacaaaaaagcaaacacgtcaacagtgtgatggactgatggtagtgttagagtggacgtactaaccagttcaatcaaagagcctttaaacttttcggttgaactggttagtgtgtccactctaataagttatcaaagtcagagggctcgagttcgaatcatgacagagactttatttgtgcctccacccatttatttctatgtttgcacctttctctttggctgcacatgattagggtgttgaagtgtataagtggatttgttaccttctcctatctgattaagcttttgggttgaagatgttagtgtgtccaatctaacatggtatgaaagctacaggtcttaagttcgaattctgatagaggctttatttgtgcctccattcatttatttccacgtttgtgcgtccctttctctctagttgtgtttgcgcctttctttctagatggacgtgagtgacagtgttaaagtatataaatgaattgattatcttcttccatcagtttaaaattttggattcaactgttagtgtatactaacatgtaggtcttctggctatctattagtattcaaatcttagttgcataaaagaaatgccccttgctgtgtaactatctacagcttttgggggtcttttctcgaccctgtatccctgtagttggagttaaaccttggggagtcgaaattgtttacctggcagcatatatgccattgcaccggataccattcccaatagacactgctttattatgcatgctgctgccctgaacttatacattcttcaagaaaaagcttatttgtctgcacttgtaatcttaacagtcccttttttacaatacgtacctcgtcattaatctgttttggtatac

SEQ ID NO: 209641 - DNA, 2806 bp, Zea Mays
ctcgctctctctttttttattaaccgtacacgcggacgggcgcggggcgccgtaggcccctagctgcggtgatccgccgctctcgcagcaccgtcgcgctcgcctccgcccgcccgctcgtcgagtggacgcgcgctgcaccgcgactccagtcatggctagtgttaccgattctttcgtggcggatcttgatgagctattggagtataggacagagaagactatcctggagatgaaaacgcagagacagaaaacttggaagatgatgctaatgatagtgtccctgacctgaaatctcttgatcttgatagtgtctaaaaacatcagaaggcacaatggtataaagacataatgaagatgcacttgaaaggtgactccaatcaaggggccattctgcaagatcaagataccagcttgttgttgattgcaatgcttcatcagtagatattgacaatgagattactataatccacaatttcatacgtgacaagttcaagctaaaggaccctctactagaatcctgtgttcactatccgattgattatgcccgtgttgtctggaagattggaaatgacatggacttaacacttgatttgaaagttatttaccttctgcagacatgatcacaatggcagaaacgacaactggtggggagcctctttctgaagataatttagtaaatactattgaagcatccgacagagctcttaaccttgatgccgacaaagaagatgatacttgaatttttgaagggcagaatgggatacgttgcacgaaaccttgccgccattgttggcagtgctgttgcctcgaaaccgagtcgtgctgccgtgttggtggtttgggagcactggccaaaatgcccgcttgtaatgtgctgcactgctgcttctcggtgcaaaaaagacaaatctgtctggattctctactgcgtcagtgcagtctcgtattggttatctagaacaaactgaagtattatttgaaagcacacctccatctttaagatttcagtctagtagacttatagctgcaaagtcaacactagcaacaaggatcgattgtataaggctatcttcagcagtttactcattctcatctcttattttaacctacactctataaacagtgcattttacagtacaaaacagtgttttacatgttcatatgcacgatctgctggctatagcctaagagatgatccaactagaacggttgtgcagaacttgttagaagaaattagtaagaagattgaaaactggcaacaactaccacctgcaaggcttccaaagccaattccaattccagactttatgcctaaaaagaaacgaggggttgttggctccggaaaatgaaggaaagataatttatttgaaactttctcatgtccaaattgattaaaactattgtacttcatgtaaaagattgctatataatgcccattcacatgtctcatttgcattttgcaatttgttatattactcgagttccctggttgcattacctgtttggctgtttgtcttagttgcattttgcaacttactttgttatatcactctgagtgacccttcaatttcctcttacctttttgtatttgggaactcaattgtgaagatatgcacagaccaacacgatgaagcttgtgaatcggatgaagtttagcatgccagaggagagcacattgggtgatggcttagggaaaggttacggcttgcttgggcaggctggaagcgggaagctacgtgtgtcagctggtcaaagcaaactttctactaaaattgctaaaatgggcgaagctacttggttagcggtggatgcacatacatcccttcaaatccaaaattcagttataataatcaaaatttcaccatataagcatctctcatatcctattcttatgcacccacaagagagttgcaccccctttatatccataactataacaaaaaagcaaacacgtcaacagtgtgatggactgatggtagtgttagagtggacgtactaaccagttcaatcaaagagcctttaaacttttcggttgaactggttagtgtgtccactctaataagttatcaaagtcagagggctcgagttcgaatcatgacagagactttatttgtgcctccacccatttatttctatgtttgcacctttctctttggctgcacatgattagggtgttgaagtgtataagtggatttgttaccttctcctatctgattaagcttttgggttgaagatgttagtgtgtccaatctaacatggtatgaaagctacaggtcttaagttcgaattctgatagaggctttatttgtgcctccattcatttatttccacgtttgtgcgtccctttctctctagttgtgtttgcgcctttctttctagatggacgtgagtgacagtgttaaagtatataaatgaattgattatcttcttccatcagtttaaaattttggattcaactgttagtgtatactaacatgtaggtcttctggctatctattagtattcaaatcttagttgcataaaagaaatgccccttgctgtgtaactatctacagcttttgggggtcttttctcgaccctgtatccctgtagttggagttaaaccttggggagtcgaaattgtttacctggcagcatatatgccattgcaccggataccattcccaatagacactgctttattatgcatgctgctgccctgaacttatacattcttcaagaaaaagcttatttgtctgcacttgtaatcttaacagtcccttttttacaatacgtacctcgtcattaatctgttttggtatac

SEQ ID NO: 209642 - DNA, 4595 bp, Zea Mays
tcaccacaccagaatgggctcaagcaagccggctgatgccgaggcgcgtcggcgcgcgcgcgcgcgtgagctgaacctgacccctcgagctcaacctcaactcctatgcttgccacacacctcctacttcgcttgccccgaagctttctttaagcacccccaagtgcccggccaaaataatccgtgcactacggcgacagtggtgctcgcctgttgtataaaagaacaaggcgaacagcgggtgctgctcgaggaggaagaagaggagcggcttttgagctctgaggtctcggtcaccgcccccccaccccaccaccaccaccaccactgggtttttagatccaatgccaaggccgtgaggaagctagctcttgcgtcgtgaggaagagccgaccagagaagctaggagcgcgtggcaatggcggagggcgatgcgggaaaggcggaggcggggagctgcagcgccgccgccgcctccggcgccggcgggtgcgacgcggtcaagaagcggccggagcagagcgtggcgttccacgagctgttcggcttcgcggacccgctggactggctgctcatggctgcggggagcgcgggcgccgtggtgcacggcgccgctatgccggtcttcttcctcctcttcggcgagctcgtcaacggcttcggcaagaaccagcacaacctccgccgcatgacggacgaggtgtccaagtattcgctctacttcgtctacctcggcctcgtcgtctgcgcctcgtcgtacctagagatcgcgtgctggatgtacacgggcgagcggcaggtgggcgcgctgcggaggcggtacctcgaggccgtgctgcggcaggacgtgggcttcttcgacaccgacgcgcgtaccggcgacgtcgtcttcagcgtctctaccgatacgctcctcgtgcaggacgccattggcgagaaggtcggcaacttcatccactacctcgcgacgttcctggccgggctggtcgtcgggttcgtctcggcgtggcggctggcgctgctcagcatcgccgtcatccccggcatcgccttcgccggcgggctgtacgcgtacacgctcactggcctgacctccaagagccgggactcgtacgccaacgccggaatcatagccgagcaggccattgcccaggtgaggactgtctactcctatgtgggtgagaccaaggccctgaattcctactcggaggcgattcagaacaccctgaagctgggttacaaggccgggatggccaaggggcttggcatcggctgcacctatggaatcgcctgtatgtcatgggcgctggtgttctggtacgccggcgtgttcatacggaacggccagacagacggtgggaaggccttcactgcgattttctcagcaatcgtcggtggcctgagcctggggcagtcgttttcgaaccttggagcgttcagcaaagggaagattgccggctacaagctgctggaagtgataaggcagaggccaacgatagttcaggacacggcagacgggaggtgcctcgacgaagtgcatggcaacatagagttcaaggaagtggccttcagctacccttcccgcccggacgtcatgattttccgagacttctccctcttcttccccgctgggaagaccgcggccgtcgtcggaggcagcgggtctgggaagagcacggttgttgctctcattgagcggttctacgatcctaatcaggggcaagttttactcgacaatgtggacatcaagacgctgcaattgaagtggcttagggaccagattggcttggtgaatcaggaacccgcacttttcgcgactacgattcttgagaacattctttatggcaagcctgatgcgacaatggcggaggtcgaggctgcggctacttcagctaatgcccatagcttcattgctctccttcctaatggctacaacactcatgtgggagatagggggcttcagctctccggtggtcagaagcaacgcatcgccatcgcccgcgcgatgctgaagaacccgaagctcctgctactagacgaggccaccagcgcactcgacgctggttcggagagcatcgtccaagaagccctcgaccggttgatggtcggcaggaccaccgtcgtggttgcccacaggctatcgaccataaggtgtgtcgacatgatcgcggtgatccagcaaggccagcaccggcgccgacggccgcatcgagatggtttccaacgccgacaacgaccgcaagtacccggcgccgaggggctacttcttcaagctcctgaaactgaacgcgccggagtggccctacaccatactgggcgctgtcgggtccgtcctgtccgggttcatcggccccacgttcgccatcgtgatgagcaacatgatcgaggtgttctactaccggaaccccagcaagatggagagcaagaccagggagtacgtgttcatctacatcggcaccgggctgtacgccgtcgtcgcctacctcgtccagcactacttcttcagcatcatgggcgaaaacctcacaaccagggtgcggaggatgatgctcgccgtgattttgaggaacgatgttgggtggttcgatcaggaggagaacaactcgaaccttgtcgccgctcgcctctccacagacgccgccgatgtgaagtcggccattgccgagcggatatcggtgatcctgcagaacatgacgtccctgctcgtgtccttcgtggtgggcttcatcattgaatggcgggtcgccctcctcatcctcgtcaccttccctctcctcgtgctcgccaactttgcccagcaactgtcgatgaagggcttcgcgggcgacacggccaaggcccacgccaagacgagcatgatcgccggggagggcgtgagcaacatccggacggtggcggcgttcaacgcgcaggacaagatcctgtccctcttctgcagcgagctgcgcgtgccgcagatgcacagcctgcgccgcagccagatctccggcgcgctcttcggcctctcccagctctccctgtacgcgtccgaggcgctcatcctgtggttcggcgcgcacctggtccgcacccacgtgtccaccttctccaaggtcatcaaggtgttcgtggtcctggtgatcacagccaactccgtggccgagaccgtcagcctggcgccggagatcgtgcgcggcggcgagtccatccgctccgtgttctccgtgctcaacagccggacccgcatcgacccggacgacccggacgcggagcaggtggagtcggtgcgcggcgagatcgacttccggcacgtggacttcgcgtacccgacgcggcccgacgtgatggtgttcaaggacctgagcctgaggatccgggccgggcagagccaggcgctggttggggcgagcgggtccggcaagagcaccgtcatcgccctcgtcgagcgcttctacgacccgctcgccgggaaggtgatgatcgacggcaaggacatccggcgcctgaacctcaagtccctgcgcctcaggatcgggctggtgcagcaggagcccgtgctgttcgccaccagcatcctggagaacatcgcctacggcagggacggcgcgacggaggaggaggtcgtggaggcggccaaggtggccaacgtgcacggcttcgtcagcgcgctccccgacgggtacaggacgcccgtgggcgagcgcggggtgcagctgtccggcggccagaagcagcgcatcgccatcgcgcgcgcggtgctcaaggaccccgccgtgctgctgctggacgaggccaccagcgcgctggacgccgagtccgagtgcgtgctgcaggaggcgctggagcgcatcatgaagggccgcaccgccgtgctggtggcgcaccgcctgtccaccatccgcggcgtcgactccatcgccgtggtgcaggacggccgcgtggtggagcagggcagccacggggacctcgtgtcccgccccgacggcgcatactcgcggctgctgcagctgcagctacaccatggctgatcctgcgcctggaatagatactggagggcgcacggccggtgtagatactggagggcggtgttagcgtggcgtggctcaaccgtggccggagaagacgtgttttgatgtgaacgatcaggattgtgccgacaaacaagtgatgccgtattcttcttgcactcctgccggctctgccaatgtttagatcatcccctcctagtaattctcacacctttttttttcttcctttgagaagatcctagtaattctcagatggacccaattgtttgatgtgtaacggtcagaagccagggttcgtctttgctacttgtctaggagttgttgcctctaataattggcttcaaaccttacgaagggatctgcttgaaacagccttgcagttgcagcagccacggagagcgtcactggatctgggtgtccgctgccgccgacatctctagcggagtaacgagaaagcctttggatcgatccataattcgtgcaggctgctttgtaagcacgttatacagcttaaacctctatagtaatatttcgtgcaggtaccttatgttgctacggtttctctatattatatataggtcttttttt

SEQ ID NO: 209643 - DNA, 5277 bp, Zea Mays
cagttggggagttttctgccttttcttctccccttctctgttttccttcaccgcgccaccgggggcgaatcgcggacgccgctcacctcccccatctcctccccaccacgtcgcaaacccatcgtcaccatcaccgcctccggccgcggctcccatcctcgcgtggccgtcgcgatccactacgagcttctctcgtccggtcttccgagtctcggctacctgctcctacgtcgaatcctcgggccctgctgtcgccaccgccgaatcctgctgcactcgccgcagccggggaacgcggacggcctgcgggagcttggcgcctcctccttcgcgttgcgtcgtcacgaggaactaagtcaacagtctttatgggcttcatgctagtagaggataattccagcactgcttttggaggtcctgctattctttctcatatggattggtagaccagatcctggcaaagcaatgctgatggaccctcctgttatgcaaatggactgcaagttgaaaaatgacgtggataaaacatcatcaattgactatgataggaaggtgaccatctcacatgatgattatgggtgggcaggctctgatgtcaaaccaaaagatgatatagtatgtaaccctgtggaggttagtaatgcttgtcaaacaggcataaatgaggtattagattctgcttccaaaaattcacctcttaacttgggtgatttacctcagggtgcagaactaagaaataagaatggtgacagttcctactccaatgtaaaacttcagttgaactcaagtgctggaaataataatggcttgcaaactgatgatgacaactttactaaacaatattttggtaagaaggatatgcatcatcgacaggaagagatgcatccttcttccaacacagtgtcattaccaacttcatgcagactcaatggagatgccacaccttctgaagaggagaaaatagcagaggatcgtgtcaaagtggatggaaatgtagatgctgtaattaaggaagtcgaaactgacttggtaggatgccatgcacatcagaaagaatttcagtgcacgctccaagatctatcagaaatagcctgcagtattgatttagtacataatacatcttctccacaaggagagaataagaagcctgtctcccctttaaatggcatgggccattatgttgataacaatagttgtaatggtgataccaattataaaggggaggagctcaatatgggggatgctggggatgaggatcatgctatagcactttgggtgaagtggagaggaaaatggcaaactggaattcgatgctgtagagtagattgtcctttacctactctaagggcaaaaccaacacatgacaggaagagctatgttgtcgttttcttcccacgaacaaaaacttattcttgggtagacatgctacttgttcttccaatagaggaatgtcctttgccacttgtaaatggaactcatcgtaaatggagaaagctggtgaaggatttgaacattcctcgacgattcaacatgcaaaatcttgccgtttttatgataaatttaattgatgagcttcatatcgaggaacttcgacagtcccttcatgggaacaagcttaaggaattgaggaatgcatcagtgcagcctgaattgatccctgagtggaacagatggaaacaagaattgataaaacagtacttttcattgcatcctgctggtaatgttggaaactttgagaaaaacaattgttatgatgatccagctttagatcaacaaggtagtagaaaacgtccaaaacttgaggtccgaagaggagagatacaaatttcacacatgggtgaggctgactacaggactccaaccgaagacccaaaccaaaataaccttcctggtaactctgtcatgcatgaaaatgtaggggcattaggatcaacagatcaaaataattctgtcacgttgcctggaagttttggcaccaacgaaaacacaatatccagtagtgccaatgcagctttacagaatgctagacttgatttagattcattcaagagttctcggcagtgttctgcacacattgaagcaaaggggaggcaatgtggtaggtgggcaaatgatggtgatatttactgttgtgtgcatcaaagtatgcattttcttgaccattcttcaagggaggacaaggcacttaccattgaagctccgttgtgcagtggtatgactaacatgggtagaaaatgcaagcatcgagctcagtatggttctactttttgtaaaaagcaccggctacagacaaacttggatgcaatgcacccagaaaatttgttggatccatctgaggtactccatatgggtgaagaacctccgaataagtgggtggaagaaatttctaagtcgcaagcaatgtatagcatagacttggaaacagacaagaaagtccaggatgctgtaaaagtgaaattgatgacaattgtgtctatagagaactctggtgaaaaaggcgcaatggagaaagctgatatgtgtgtggcatcaacttctataacaaatactgatgatacttctctttgtattggaattcactctcatgatagtattgttgaatgccaggattatgccatgcaacatactctttattgtgagaagcaccttccaaggttccttaaacgtgccaggaatggtaagagtcgactcgtttctaaagatatcttcgtcaatctactgaagggatgcacatcaagaaaagataagatatgtctgcaccaagcatgtgaatttctttattggttcttgagaaacaacctttctcatcaacacactagtcttgctagtgaacatatgccccagatattggctgaagtgtctaaaaatccagatgttggagagtttttgttaaagttgatatctactgagagagagaaactagcaaatatctggggctttgatacaaatagatctaagcaaatatattctgaaaacaaagaagggtctctagtgttgcataaagagggaactaatctttcatctggtccgaagtgcaaaatctgtgctcaccagttctctgatgatgaagctcttggattacattggacaactgtccacaaaaaggaagcccggtggctgtttagagaagggacaaatggtctgtccctttatgatagccacaacattgaggatgccaatggctctcagaagttcatctgcagattatgtgggctcaaatttgatcttcagccagatcttggccgccaccataaagtcgctcatatggactcagatgttgttggccacagctcactgggccgtgggaagtatcagcttaaccgtggccgacactactattccgctttcaagaaaagtttacgaccaacaagtacattaaagaagaggagtagctctggaatcgagaaaaactttaagtttcagagttctgccctaacatctcaaataattcaatctgaaacatccagctttggtaagttacaggattttcagtgctcagatgttgcgcaaacattattttccaagattcaaaagacaagaccccatccaagcaaccttgatattttatcggttgcccgcactgtatgctgcaagacaagtcttgctgctgcattggaagttaaatatggatctttacctgagaacatatttgtgaaagctgcaaagctatgcagtgacaatggcatccaaattgattggcatcaagaggtatttatatgccctaaaggttgcaaatctagatataattcaaatgctctgcttcctatgcaactcacggcagttgattttcctgaagctccttctgttgatcctcttaatgatgatgaaatgtgggcaatggaagaataccattatgttcttgattcaaagcactttggatggaagcctaaaaatgagagtgtcgttctctatgaagacataagctttggcagggagaaagttccaattgtctgtgtcattgatatggacgcaaaagattctttaggcatgaagcctgaagaacttttgtcacatggcagttctgtgccttggcaaggtttccactatatcacaaagcgtttgatggattcatctcttattaattcagagaactctatgcctgggtgcgcatgttctcatcctgaatgttctcctgagaaatgtggtcacgtgagtctcttcgatggtgtctatgctagtctggtggatatcaatggaacaccaatacatggcagatttgcatatgatgaaaatagtaaaattattttacaggaagggtatccaatatatgagtgcaattcatcatgtacttgtgactcatcctgccggaataaagtattgcagaaaggactgcttgttaagttggaactcttcagaactgagaataagggttgggctattagagctgccgaacctattccacagggtacctttgtctgcgagtatattggtgaagttgtgaaggccgacaagaccatgaaaaatgcagaaaggtcgagtttttatactgatgggatgcatctcattgaattctcatcccatacaattcagtgtgtcatcaaagagtgggtgcaattacttgtttgacattgcttctcagattgatagggaaagacttcggactgtaggggctattgaatacttgattgatgccacaagatctggaaatgtgtcccgctatatcaatcacagttgttccccaaatctcagcacccgattggttttggtagagagcaaagattgccagcttgctcacattggcttgtttgctaatcaagacattgccgtaggagaagaacttgcctatgattaccgacaaaagcttgtagcaggcgatggctgcttctgccattgtgggggtaccaattgccgaggccgtgtctattgacttcgcaggaagacactaactgttcaacgcttggttgcagaactcgaggtttctacagctgtgtaggctgctgagcgatttagcactgcaattttccagagctcgagtgcaggactaggatcccattcttcatgctacaaatagggattgtgatataggactcacagccagaaatgaagtgattcaggctgctttattcgtaggcgagaattctttcagtaaaattccttcattcatattttattgctcatgggcaccatcatcgacgtcaagtaataaactgcttatcccatttttgcgtttgttcatattagacgacggcctgttgtgcagttgtattaattgtgtgatgggtatcagaatgaatcaaaagatagtcttatttctctaaatgcgtgattatgaaattt

SEQ ID NO: 209644 - DNA, 2509 bp, Zea Mays
cccgcgtgcgctctgtctgtctccacgactccacgcatgcttcagcttcacggagacacggttcacgccgcgatccgggatcgctctctctttgggctaccggctccgccgccgctccgccgccctaagccaggtgctgaaggccttcgtcggtcttttcaccggcgacgacgacccactaggaaaagaattttcctggcatatttttgtttccagaaatattcgtgtcaagttggtatgtcagggatcacagcaatttggcgtcggtcatgtccattagctgctagtcagattctaatggagacatattttggcccatctgtatcttctggtgttctgaggtggttcagcagcggcactaagcactcaagaaaacctgaattttctgttgctaaccatatcagggtggtggatttgcattctgcttctgcagttaattatgtgtcaacgatcagaaggttgcccctttcatgccgtatggacactaattggttgattacttcaaagtccagacatggtgcattgccaggattcttaggtgtttcaagcttctatcgtggatactcctcagatactggaatcaagccagaagcttcgcagagtggtgtctctaatcttccttctacagaaagctctgaggttggcactgcaggtgctggtgggggttcatggattgaaatcttggacaatgctcgcaagtctactatagatgctaccactgatgcaggcaagaaagttaaggagctgactgatgcagttgcacctcatgtccagcagctatttgatacatatccaaatcttgaaaaggtagttgttccacttggcggaacaatatttggtacaatgatggcatggttggtcatgcctatcattctaaggaggcttcacaagtacgcatcacaaagtcctatatcagcacttctggggaactccaccaagaatgatgttttgtaccaaactagtctctggtgtgcattagaggatcctgcaaaatatctgatcacgttcatggcattttcagaaatggcaacacttattgcaccaagcgtatcaacttaccttccacaggcatggagaggtgcatttgttctgtcttttgtatggttccttcagaggtggaaaaccaacttcattgctaaagctatgaccaaactagatgcctcaagtgttgatcgcgacaggatatcggcatttgataaggtttcttcattgggactgattggactaggagtaatgggtcttgctgaagcttgtggtatagctgttcaatcaatattaactgttggtggtgtgggaggtgttgctactgcttttgctgctagagatgttcttggtaacattcttagtgggttctccttgcaattttctaagccattctcagttaacgactacataaaggcggggtcaatagaaggcaaggtggttgaaataggactcacttctacttcattgatcaatccagaaaagctccctgtcatagtacccaactctttgttctccagtcagatgatagttaacagatcacgagctaattggcgagctagtgtgacaaagattcctattcgaattgaggatattgagaaggttccttctgcatcagaggagataaagactatgttaaggtctaatcaaaatgtgtcctttgatagtgatgttccttactgctatctctcgagattggaaagttcatatggagagctcatcattggatgcaacctaaaaaacatgaggaaagatgagtggctatctgcccaacaagaaattcttttgggagctgctaggattatcaaatcacatggcattgaactgggaagcaccatgcagtgctgttaattcacgcttccggcacttttaagtaaataccgttagcctgcagaagtgcagaacttcatacagacgctacctagccgttttgttcttcaacgttttatgtcttcagaccatggacacccactaccaatactattctgttactgccgttttctttggaactaaggtcttgtttccttttgtggtcgtcccttttggttggtgcttggatccgtttctgggagcttctttgtctatgtatactggtgaacgtttgcaccgcgcccacgcctgccctgtggatgaaccctgagcgttttattggtcaattctgtgaaatattgggttttatcctcgaaattctagtgttttacgtagtactcgattaactagactaataggtgaccatcttgaagcaattcgtgtttgacactgaacattcctgaggacttggacttgcatgccccaggatagattccaccgctgttttaccatgctgaacctacagtatcgtcttgaatacaaaaccattgtggcgtggttgcagtactcctcaaaagtttgcgtgtcgtaggcaatgtgggacacgcgctggagaaggttttggtgctcgaaggctgcagtttcgatttaaatattgccagctactattgctgacgaacccactgaaaccatgagccagctactattgctgacgaac

SEQ ID NO: 209645 - DNA, 3834 bp, Zea Mays
aggatctgtcaaacaaacagtgtagttcgagaataccatccacatccaggccgaccctgagggatgtgactccgaccgtctgagcgctcacagttctttgtgatcctttttcacgagagagagagagtagagggaacgaaaaaggtcactttttttctgtagcaggaatccaatcgcaatttgcgagggcacaaagctgctctaccatttccgtgccccacgagtacctgtctttccactctcgcatccgctgcttcctcaaaaagaccccctacgaatccgcgccagcatctggttactcttgtcccccactaggagctggaaccaagaaccccgaatgcggcttcgtggcgctcgcctgtggacgtggattgtctccgtccgcttctcgcttggttctggcttcctagttcgcaccacggcaccgcaaagcagatggtagtcgactagggattaaccccagctctgctcgccattccggtccgtcgagtatttcgtcgaacagttggtaggggacctctagaacggatgggcagaggacaggatgagtcggtttcgtgattctcgaaatctagtcatgccttcagctttctcgcggtcaatcaatccatcgctcatccggttgtaattgccgaatgggtagtcaagaaaccagatgagctcttcgggttcctgtatgcgacctctgtcccccgtttcatgctctgcggactacgtataactgaagaatctgttcggacaccaaattaaggtcgttggcaagacgggtactcttttcttggtcctcgggaagatgggctctgctcactttgctgccctgcttctgtgcgcctgcttgttcgtcagtggaaccgtggcagctgaccagaacggtaacctcacaaggccagctgaggtgcgcatcggtgcactgttcacgtttggttcggttatcggaatggcggtgagacctgctatcgagctcgccgttgcggatgtcaatgctgaccctagcttactctgggggacgaaactgagtgttcttatgcaggacaccaattgcagtggctttgttggcaccatagaagcattgcagcttctggctaaagatgtagtcgccgtattaggtccacaatcctcggctgttgctcatgtcatttcccatgctgtcaacgaactccatgtcccacttatctctttcgcggccactgatcctaccctttcttcccttgaatacccgtattttgtgagggctactcagagcgattactaccaaatgggtgctatcgctgccatcattagtcaatatgaatggaaacaagtcattgccatatatgttgatgatgactacggtagaggtggcatcactgcactaggtgatgcccttgcaaaaaggaagtgcaagatatcctacaaagctaagttgccacctggtgctgcaaaaactactatcgaggatatcttgatgcagctgcaaaatctttgggcatgatgagcagtggctatgtatggattgcaacagactggctttctgcagtgatagattcttctgtgcatggtattcctgatgtgatggaacttacacagggtgttcttgtgcttcggcagcatatagctgattctgatatccagcatgcctttttgtccaagtggaataatctaactaggaatggaagctcttactttatgcatgcttatgactctgtatggctagttgctcatgctgttgagcgctttctgagagaagggaatgccatgtctttttctgctgacccaaaattgcaagctaaaaagggaagtagccttcagttagattctctgaggattttcaacagtggagataaactactggagaaagtgtggagtgcaaacttctcaggggtttctggtccagttcaatttactttggaccgagatttggtacacccagcctacgatattctgaatattggtggtacgggattaagaaccattgggtattggtcaaattcttctggtctctcagctgttgctccagaaaacttaagctcatcagcacgggactcttcagccaacaatgtacaactccgtggtgttatatggcctggtcagacttctgagaaacctcgtggttgggtgttttcgcatcacgggatgcctatgaggatcggggtaccactccgaacgagctacaaagaatttgttatgcaagacgatggtcctgacggagtaaaggggttcgcagttgatgtcttcaaagctgcaataagtttgttgccctacccagtctcatgcaagtttgttttgttcggcgatggtttgaagaatcctagctacagtgaacttgttcagaaggtatctgaaaattacttcgacgccgcggtaggggacatagctatagtgacgaatagaacaagacttgttgattttacccaaccatatatagaatcgggtctcatcattgtagctccggcaagggtgattgaatcaaacgcttgggctttcttgaaaccattcacattccagatgtggtgtgttctagttgttatattcctctttgtgggtgcggttgtttggatactcgaacaccgcagtaataccgagttccgtggacctccaagccaacaaatcatgacagtgtgctggtttagtttctccaccatgttctttgcacacagagagaacacagttagcgcgcttggcagatttgtgctgcttatctggctcttcgctgtgctcattattaactcgagctacacggcaaacctgacatcgcttctcacggttcaggagctgacttcagggatacagggcctcgatagcttgatatctagttcgagtgcgattggctaccaagttggatctttctccagaaactacctcgtggacgagctcagtatcgcagagtcccgtctggttgcactaaacagcccatcggattatgcgagagcgctagagctaggttcaggaaacggtggcgtcgccgcaataatcgacgagctcccgtatgtcgagatcttcctgtcgaaatactgcaagttcaagacggttggtcaggttttcacaaaaagcggatggggatttgccttcccaagagactcccctctcgccgaggacttgtcgacggcaatcctggcgctatcggagaacggcaagctccagaagatgcacgacgagtggttgagcgggacggagtgcagtgcagacaacggggctgggccgtcgaactccttgagcctgtcgagcttctggggcctcttcctcatatgcggcctcgcatgcttcctcgccctcgtgattttcttcctccggatattctgccagtacagcagatacagtaaccaggtcgaggcgcagttcgctgagccccgggttctgaacaggccggcgaggctaactaccatcaagtcgctgatctctttcgttgataagaaggaggaggaggtgaagaacgctctcaagaagagacccaatggtaccggtcagcagcatccaagcactcccaacgcggaagaacagcccacattaccaccgtgaggtctacgtaacgtcccgctgcgtaactaatgactgccaaaataatgtggaatcctgctttgaagcgaaagttgtactaacgcacaggcctagttgatgctgctgaaggggtttttcctgtatgtggctttctggctgtggaaacatagcatcggaatcagcttcagactattgtcttcagagaaaatgcaactgcgttaggttaggttgtatttttccaacagcagcgaatctgggcctcctaggccctagcagcaatatctgggagaagtagaattggacttccgtcaatatgtgggcagttgtgcatgtcccttcatattgtctgttaagaagtag

SEQ ID NO: 209646 - DNA, 1732 bp, Zea Mays
atatcaaatttaccagggatctacaatgagaaagtggcctttggttgagagttgagaggccacgaactccaccaagagtccaagacccaatcacaagcatccgcttccttgctcgccttttctttaaggcctccaacggtggagccggaataaactccgtccacttcggcatccgccgggaatttgattcttctcccctaaatactcacgctaccttccacctccccctacttctctccctcatcttcttcgctaccagccagacaggcagctcacgtgtgcaggcagcggccaagatgatggcggaggcgtggacgccggtgccgttcccgccgacggcgccctgcttctggctgcacgacacgcactcggttttctggcggggaggagacgcgtggacggcggcggagaacaaactgttcgagaaggcgctggcgcagatcgaccgtaacgcgcccgacaggtgggagaaggtggcggaggtggtgcgcacgaagacggtcgacgacgtgaggaaccactaccacgacctggagaacgacgtcggcttcatcgaggccgggctcgtgccgttcccgcactacagcggctcggttccgtcgttcgggttcacccacgaggattgggacggagggttcaggcgcggctactgccttaagcgcgcgcgcggctccgacccggagcggaagaagggcgtcccctggacggaggaggagcacaatacgggagaggggactggaggaacatctcgcgcaagtacgtgacgacccggacgccgacgcaggtggccagccacgcgcagaagtacttcatccgcctcaactccggcggcaaggacaagcgccggtccagcatccacgacatcaccaccgtcaacctccccgacgaagaccgcggcaacgcgccgccgtccgcggtcaccaccaccaccaacccctccgtcgccctcgtggacatgaagcccttcgttgcgccgtcgctcggcgtgccgcacccctacggcgacgtgaagctggagcctaagagctcgctggtggccggcctgggcttcaacgactccgtcctcctgatgcactgcggacagttgtaacgggctgttcttgcggcgagaaccgctcccgtcgcaacgtacgccaccaaccaccacctcatctatccccgggcgggcatcagggccggcggcacaagtcgcacgtcgtcgtgctaggcttggatgcagagttgcttcaggtgtactcctaccgatcagatggctggcacgtcccgccgcgtgtgacgaggatgaagagtggaacagtctcgtcgtccagctgccagctcgcggcagctccgagtggctgtgttgtgttcatcgagaacaagaggccatggcccatgggcgtacgcgtgccgttccagcgtccatttcggttcagtgtacaaaattcgacaagtacagagtccaacaacttccacggtaccgaacaataaagcattcgataaaaagcctcttccagcgtcaccggcggcttggattaggatccaggatcagaagatttctgtaccggcttaattgttaatgtatttttggtgtgtgcaacatctcccaccagatggtgttaacacttgtagtgtgtgatgcttgtagtggggtctcgcaaggtttttgtccgccattgttgctttgccagttactagctagtagaagtttagacatgatgttctattaaaaaaatgaaagcttagatgtgct

SEQ ID NO: 209647 - DNA, 1319 bp, Zea Mays
agacgcttccagagctttccacaccattcgctcacgaccacgaggcacgatcacacagcacaagcctcacccggcggaacacctcttccgagttccaactcccaaccgcagcctcagcctcagcctcacacggtcgaagcagaacccgtgaacacctcaaacctcacggctcacgccaccgtcctccagccccgttctccggcgatcctgtcattccagacgcgtctccgcccctctcggtccaccaccccgacgccgccacatgtcgacgcagtccatttcgccggcctctgcgtccgcgcagttcacctacccggcggcagcggccccgtcttacttccccgtgcccttccacctccagaacgcgcaatacaccgcatggaccgcagccgcgccggcggtgcctgtgtacaacgccatctatcccatgccccaagtccagcaggcccaacagttgttccaaaaggactcgaagataattactcctgaagctctagctactgttaaggctgctattgcaaatagtgagaaagacaagaaggttgatgcaacaaaaaaggcagtgcctcgaaaggcagctgggcaaagttgggaggaccctaccttggctgattggcctgaaaatgatttccgtttgttctgcggtgatcttggaaatgaagtgaatgatgatgttcttgcaaaggcattctcaaaatatccatccttcaatatggccagggttatacgggacaagtggactggtaaaactaaaggatatggttttgttagttttgctgatgcgtctgatcttacttctgccttgaaagatatgaatggtaaatatgtaggaaatcggccaatcaaattacggaagagcacatggaagaacaggatagacttagaagctttggagaagggaaagacccaaccacagaagaaaatcaaactgcagaaaagaagtgttcttcacaaatgaatctgaaaaattctgctcgttcatcgtctgtcagtatcgtttgggaaagctgtctgaagcattaacagttttacttaacgtcagatgtgtaggactgatggtcaccaagttcccggtgacactgtatacaatcgcagacgcgatgctatgttggtgattgaacaggtgtagccgaatagttggatccaataacttcacctgtagtgtaatggtccaattttatcatgggaactgtagttctaaatactccagtgaccagtgctattgtggtgaattattctgtgatctttattcataaatattcgtgggtgttggcctgtttgaatcataatgctaatggtagctagctaaaaaaagaaac

SEQ ID NO: 209648 - DNA, 1521 bp, Zea Mays
agacgcttccagagctttccacaccattcgctcacgaccacgaggcacgatcacacagcacaagcctcacccggcggaacacctcttccgagttccaactcccaaccgcagcctcagcctcagcctcacacggtcgaagcagaacccgtgaacacctcaaacctcacggctcacgccaccgtcctccagccccgttctccggcgatcctgtcattccagacgcgtctccgcccctctcggtccaccaccccgacgccgccacatgtcgacgcagtccatttcgccggcctctgcgtccgcgcagttcacctacccggcggcagcggccccgtcttacttccccgtgcccttccacctccagaacgcgcaatacaccgcatggaccgcagccgcgccggcggtgcctgtgtacaacgccatctatcccatgccccaagtccagcaggcccaacagttgttccaaaaggactcgaagataattactcctgaagctctagctactgttaaggctgctattgcaaatagtgagaaagacaagaaggttgatgcaacaaaaaaggcagtgcctcgaaaggcagctgggcaaagttgggaggaccctaccttggctgattggcctgaaactcttattgctcgttgccttgcagacaacaaccatgagaaaatgtcagtcttacaggcaaggtctaatgctctatctattatgctttgatctgaaacaaattgctcttttttccctttctctaaaggtgctcaaggatgtgatgagcccaacagattgccacacgtgatttagatgatttccgtttgttctgcggtgatcttggaaatgaagtgaatgatgatgttcttgcaaaggcattctcaaaatatccatccttcaatatggccagggttatacgggacaagtggactggtaaaactaaaggatatggttttgttagttttgctgatgcgtctgatcttacttctgccttgaaagatatgaatggtaaatatgtaggaaatcggccaatcaaattacggaagagcacatggaagaacaggatagacttagaagctttggagaagggaaagacccaaccacagaagaaaatcaaactgcagaaaagaagtgttcttcacaaatgaatctgaaaaattctgctcgttcatcgtctgtcagtatcgtttgggaaagctgtctgaagcattaacagttttacttaacgtcagatgtgtaggactgatggtcaccaagttcccggtgacactgtatacaatcgcagacgcgatgctatgttggtgattgaacaggtgtagccgaatagttggatccaataacttcacctgtagtgtaatggtccaattttatcatgggaactgtagttctaaatactccagtgaccagtgctattgtggtgaattattctgtgatctttattcataaatattcgtgggtgttggcctgtttgaatcataatgctaatggtagctagctaagtgacaagtgctcgtattctgtgattttgttcagaaatt

SEQ ID NO: 209649 - DNA, 2183 bp, Zea Mays
agacgcttccagagctttccacaccattcgctcacgaccacgaggcacgatcacacagcacaagcctcacccggcggaacacctcttccgagttccaactcccaaccgcagcctcagcctcagcctcacacggtcgaagcagaacccgtgaacacctcaaacctcacggctcacgccaccgtcctccagccccgttctccggcgatcctgtcattccagacgcgtctccgcccctctcggtccaccaccccgacgccgccacatgtcgacgcagtccatttcgccggcctctgcgtccgcgcagttcacctacccggcggcagcggccccgtcttacttccccgtgcccttccacctccagaacgcgcaatacaccgcatggaccgcagccgcgccggcggtgcctgtgtacaacgccatctatcccatgccccaagtccagcaggcccaacagttgttccaaaaggactcgaagataattactcctgaagctctagctactgttaaggctgctattgcaaatagtgagaaagacaagaaggttgatgcaacaaaaaaggcagtgcctcgaaaggcagctgggcaaagttgggaggaccctaccttggctgattggcctgaaaacaacaaccatgagaaaatgtcagtcttacaggcaaggtctaatgctctatctattatgctttgatctgaaacaaattgctcttttttccctttctctaaaggtgctcaaggatgtgatgagcccaacagattgccacacgtgatttaggtgggcttgcagatgattactgaacgttttcaaagtacctaattcctgtttacctgatttgtcacatgtagttgaatattgtttcatgtacctttattaatcttgggcatgcttatgctgttgtatgaaatgctatattcttcttgtgatgtttgatgcaaacgtatgtgtagggtttgaatttctttgtgcattacaggcacacaccccaactgctatgttccctccattacttagttcgccataagaatggcggcatacttgttctgtcaattgttggtttgttggctgtaggaacgttgtcttggctgctttcttcattgctcctcccctcttcaatggttgatttaagtttgaatgatgtccatccacctaccaatatttatgtaatgtccacaatttctaagatgtgccatatatgtctttttcataaaaaatcactattgttaattttgcaccgttttggtcaatgaatttctttaagtatttaatagttattctataattgttttgctagcacttacctgctcggtggccacaacttcaagttttgagttgcactactaattcatttgtgcattgataatgtgattctaccttgtagtcttcctgatgacaattcagttagtttctttaaggatacttcaagtaccctcattcacaattgcttgatctctcgcctacagatgatttccgtttgttctgcggtgatcttggaaatgaagtgaatgatgatgttcttgcaaaggcattctcaaaatatccatccttcaatatggccagggttatacgggacaagtggactggtaaaactaaaggatatggttttgttagttttgctgatgcgtctgatcttacttctgccttgaaagatatgaatggtaaatatgtaggaaatcggccaatcaaattacggaagagcacatggaagaacaggatagacttagaagctttggagaagggaaagacccaaccacagaagaaaatcaaactgcagaaaagaagtgttcttcacaaatgaatctgaaaaattctgctcgttcatcgtctgtcagtatcgtttgggaaagctgtctgaagcattaacagttttacttaacgtcagatgtgtaggactgatggtcaccaagttcccggtgacactgtatacaatcgcagacgcgatgctatgttggtgattgaacaggtgtagccgaatagttggatccaataacttcacctgtagtgtaatggtccaattttatcatgggaactgtagttctaaatactccagtgaccagtgctattgtggtgaattattctgtgatctttattcataaatattcgtgggtgttggcctgtttgaatcataatgctaatggtagctagctaagtgacaagtgctcgtattctgtgattttgttcagaaatt

SEQ ID NO: 209650 - DNA, 1395 bp, Zea Mays
agacgcttccagagctttccacaccattcgctcacgaccacgaggcacgatcacacagcacaagcctcacccggcggaacacctcttccgagttccaactcccaaccgcagcctcagcctcagcctcacacggtcgaagcagaacccgtgaacacctcaaacctcacggctcacgccaccgtcctccagccccgttctccggcgatcctgtcattccagacgcgtctccgcccctctcggtccaccaccccgacgccgccacatgtcgacgcagtccatttcgccggcctctgcgtccgcgcagttcacctacccggcggcagcggccccgtcttacttccccgtgcccttccacctccagaacgcgcaatacaccgcatggaccgcagccgcgccggcggtgcctgtgtacaacgccatctatcccatgccccaagtccagcaggcccaacagttgttccaaaaggactcgaagataattactcctgaagctctagctactgttaaggctgctattgcaaatagtgagaaagacaagaaggttgatgcaacaaaaaaggcagtgcctcgaaaggcagctgggcaaagttgggaggaccctaccttggctgattggcctgaaagtgctcaaggatgtgatgagcccaacagattgccacacgtgatttagatgatttccgtttgttctgcggtgatcttggaaatgaagtgaatgatgatgttcttgcaaaggcattctcaaaatatccatccttcaatatggccagggttatacgggacaagtggactggtaaaactaaaggatatggttttgttagttttgctgatgcgtctgatcttacttctgccttgaaagatatgaatggtaaatatgtaggaaatcggccaatcaaattacggaagagcacatggaagaacaggatagacttagaagctttggagaagggaaagacccaaccacagaagaaaatcaaactgcagaaaagaagtgttcttcacaaatgaatctgaaaaattctgctcgttcatcgtctgtcagtatcgtttgggaaagctgtctgaagcattaacagttttacttaacgtcagatgtgtaggactgatggtcaccaagttcccggtgacactgtatacaatcgcagacgcgatgctatgttggtgattgaacaggtgtagccgaatagttggatccaataacttcacctgtagtgtaatggtccaattttatcatgggaactgtagttctaaatactccagtgaccagtgctattgtggtgaattattctgtgatctttattcataaatattcgtgggtgttggcctgtttgaatcataatgctaatggtagctagctaagtgacaagtgctcgtattctgtgattttgttcagaaatt

SEQ ID NO: 209651 - DNA, 1438 bp, Zea Mays
gttgcctttgccccggtttagagcggcatgcaaaagattttgcgcgcatcttctatggcgcctaaccataactttgttgatcctgagagaattgagcatggtagcccattaaggttacctggccacccagtgaatggtcagccgatggatctggagggctggtcagggattcaaacagaggcttctcagcatatgggggttctacaagcatcatcaatgggctggaatggtgctcctgtacttgctgccactcctgttgtcaagaaagtcatgaggctggatgttccagtagacaagtatcctaactacaactttgttggtcgtttattggggccgcgaggtaactccctgaaaagggttgaagcttcaacccaatgtagagtttacattcgaggacggggttctgtgaaagactctgttaaggaagacaagctgagggataaacctgggtatgaacaccttaatgaacaactgcatgtgcttgtggaagcagagtttccagcagatatggttgatgtgcgtcttaatcaagctgtgtccatcctagaggatcttcttaaaccaattgacgagtccatggactactacaagaagcagcagctgagggagctggcgattctaaatggcacactgagagaggaaagcccaagccctcacctcagccctagtgtgtcccccttcaactccaccgggatgaagcgcgcaaaaacagggcggtaatctctgttccgaaagccttcatccccccaaatcaatcatggttcaatgcccaattattacacaagctactgctggagatgattggtgatgcatatgctgggatcatcagtgatggcctatgcctgtcatgatctgtgcgctttatcgacaagcacacaaacatgcctgtgctgtgcttggacgaatggtctccgggcttgttgtttgactctactattatttattctttgtgcttctgactgcctaagtattattaacattattggtttgggaaagttaacaaggcccggttggccagtcgctgtagaaagcttggggagaggaggggggggggggggggtgtcaatgtgacggacaataataaggtttcgttggtgtacctgagatagttgtaatatgtcatgtgctgatgcttttgtgtggtgctagtacaagacaaccagacagctatagttgaggcaatgattattttgcgttcataaaatgcatatcggtgtgctttcttcatggttcatgtaccggaaccagtgtaaaatagttcctccgtcccaaaatgttttagctcttgatttttatgtctgtatttataatatataacacatacatcaagtctttcgtgaatccactatttgtctaaaatggattttattttggcacacagaggaagtatcctgtttgagctggtctgtgtgccaaatataaaggtgtatggagatgc

SEQ ID NO: 209652 - DNA, 2599 bp, Zea Mays
ccaggcgcaggcgcaggcgcaggcgcaggcgcagggagacctcaatcatctggatttcggcgacatatactactgcagggagagaatccaaagccctccctcctttgggcttgtctctgcctctctctctcctcccttctcccacccacccctctctcttgctgtgggtgtgctgtggagaggagaaaggaagtagagcaagaacaagaactaataacaccaacaagagctgctgccaactcctgcacagcctgggctctcatcactgattgcccacctattaccttcctcttttgcgatttagaatcacccatatatctacctgctctcggtcctctgtgaactctctcgtcttctaggtttcccaggcctcaagataggcctctggaccaaagcttgaaagcagctgctgttcttgcctctttttttaattcttcatttcgtggttcctggatttttgggttcttaggtttcttgtatcttcccccaaccttgcaaaatcttgtggtgaagtttcttgcgttcgctgtttcgggaccatggacgaaaggattccgccgccgtccctcttgcaatactcgcagtcccctgctcattcttccccccatcccctcaattctatgaggtattcttcctctgaaagagaaaggtgagtgttgttcttgatttttttttatttcttttgtcactattgttctccctgttgttcttggtgagttttgttttgtttttgatcctgccctttcggaatccttctgaggagcacgagatttgatgctgcggtggagatttccgcttaattctaaacttccggatgccatgtttccccttgatcaatgctgccgattgttatggaggagtgatctgtaatcgtagggacttcttttgtgatggctcgctgatagatttgttactgctgtcctaaacggagctgtatggttgactcgctgctaatgggtgtaaactttgtgtgtaacaaatcgctcattggcgatagtcacatgtaaattttaatttgatggatcgttctgtatatatcatatcaaagtttccttttacatttcatttctgcgggattatagctgctttagttttagatcctccaaattatgtttcttcttttgtatcacatggataataaatttagcattggctactgttatcctaacgttgattcttgtttggcagatatctggctgagttgcttgcagagaggcagaaattggccccatttgtgcaagttcttcctttctgtaccaggctcttgaaccaagagattttgcgcgcatcttctatggcgcctaaccataactttgttgatcctgagagaattgagcatggtagcccattaaggttacctggccacccagtgaatggtcagccgatggatctggagggctggtcagggattcaaacagagcatatgggggttctacaagcatcatcaatgggctggaatggtgctcctgtacttgctgccactcctgttgtcaagaaagtcatgaggctggatgttccagtagacaagtatcctaactacaactttgttggtcgtttattggggccgcgaggtaactccctgaaaagggttgaagcttcaacccaatgtagagtttacattcgaggacggggttctgtgaaagactctgttaagagtttccagcagatatggttgatgtgcgtcttaatcaagctgtgtccatcctagaggatcttcttaaaccaattgacgagtccatggactactacaagaagcagcagctgagggagctggcgattctaaatggcacactgagagaggaaagcccaagccctcacctcagccctagtgtgtcccccttcaactccaccgggatgaagcgcgcaaaaacagggcggtaatctctgttccgaaagccttcatccccccaaatcaatcatggttcaatgcccaattattacacaagctactgctggagatgattggtgatgcatatgctgggatcatcagtgatggcctatgcctgtcatgatctgtgcgctttatcgacaagcacacaaacatgcctgtgctgtgcttggacgaatggtctccgggcttgttgtttgactctactattatttattctttgtgcttctgactgcctaagtattattaacattattggtttgggaaagttaacaaggcccggttggccagtcgctgtagaaagcttggggagaggaggggggggggggggggtgtcaatgtgacggacaataataaggtttcgttggtgtacctgagatagttgtaatatgtcatgtgctgatgcttttgtgtggtgctagtacaagacaaccagacagctatagttgaggcaatgattattttgcgttcataaaatgcatatcggtgtgctttcttcatggttcatgtaccggaaccagtgtaaaatagttcctccgtcccaaaatgttttagctcttgatttttatgtctgtatttataatatataacacatacatcaagtctttcgtgaatccactatttgtctaaaatggattttattttggcacacagaggaagtatcctgtttgagctggtctgtgtgccaaatataaaggtgtatggagatgc

SEQ ID NO: 209653 - DNA, 2682 bp, Zea Mays
tacagagcaaactccaggcgcaggcgcaggcgcaggcgcaggcgcagggagacctcaatcatctggatttcggcgacatatactactgcagggagagaatccaaagccctccctcctttgggcttgtctctgcctctctctctcctcccttctcccacccacccctctctcttgctgtgggtgtgctgtggagaggagaaaggaagtagagcaagaacaagaactaataacaccaacaagagctgctgccaactcctgcacagcctgggctctcatcactgattgcccacctattaccttcctcttttgcgatttagaatcacccatatatctacctgctctcggtcctctgtgaactctctcgtcttctaggtttcccaggcctcaagataggcctctggaccaaagcttgaaagcagctgctgttcttgcctctttttttaattcttcatttcgtggttcctggatttttgggttcttaggtttcttgtatcttcccccaaccttgcaaaatcttgtggtgaagtttcttgcgttcgctgtttcgggaccatggacgaaaggattccgccgccgtccctcttgcaatactcgcagtcccctgctcattcttccccccatcccctcaattctatgaggtattcttcctctgaaagagaaaggtgagtgttgttcttgatttttttttatttcttttgtcactattgttctccctgttgttcttggtgagttttgttttgtttttgatcctgccctttcggaatccttctgaggagcacgagatttgatgctgcggtggagatttccgcttaattctaaacttccggatgccatgtttccccttgatcaatgctgccgattgttatggaggagtgatctgtaatcgtagggacttcttttgtgatggctcgctgatagatttgttactgctgtcctaaacggagctgtatggttgactcgctgctaatgggtgtaaactttgtgtgtaacaaatcgctcattggcgatagtcacatgtaaattttaatttgatggatcgttctgtatatatcatatcaaagtttccttttacatttcatttctgcgggattatagctgctttagttttagatcctccaaattatgtttcttcttttgtatcacatggataataaatttagcattggctactgttatcctaacgttgattcttgtttggcagatatctggctgagttgcttgcagagaggcagaaattggccccatttgtgcaagttcttcctttctgtaccaggctcttgaaccaagagattttgcgcgcatcttctatggcgcctaaccataactttgttgatcctgagagaattgagcatggtagcccattaaggttacctggccacccagtgaatggtcagccgatggatctggagggctggtcagggattcaaacagagcatatgggggttctacaagcatcatcaatgggctggaatggtgctcctgtacttgctgccactcctgttgtcaagaaagtcatgaggctggatgttccagtagacaagtatcctaactacaactttgttggtcgtttattggggccgcgaggtaactccctgaaaagggttgaagcttcaacccaatgtagagtttacattcgaggacggggttctgtgaaagactctgttaaggaagacaagctgagggataaacctgggtatgaacaccttaatgaacaactgcatgtgcttgtggaagcagagtttccagcagatatggttgatgtgcgtcttaatcaagctgtgtccatcctagaggatcttcttaaaccaattgacgagtccatggactactacaagaagcagcagctgagggagctggcgattctaaatggcacactgagagaggaaagcccaagccctcacctcagccctagtgtgtcccccttcaactccaccgggatgaagcgcgcaaaaacagggcggtaatctctgttccgaaagccttcatccccccaaatcaatcatggttcaatgcccaattattacacaagctactgctggagatgattggtgatgcatatgctgggatcatcagtgatggcctatgcctgtcatgatctgtgcgctttatcgacaagcacacaaacatgcctgtgctgtgcttggacgaatggtctccgggcttgttgtttgactctactattatttattctttgtgcttctgactgcctaagtattattaacattattggtttgggaaagttaacaaggcccggttggccagtcgctgtagaaagcttggggagaggaggggggggggggggggtgtcaatgtgacggacaataataaggtttcgttggtgtacctgagatagttgtaatatgtcatgtgctgatgcttttgtgtggtgctagtacaagacaaccagacagctatagttgaggcaatgattattttgcgttcataaaatgcatatcggtgtgctttcttcatggttcatgtaccggaaccagtgtaaaatagttcctccgtcccaaaatgttttagctcttgatttttatgtctgtatttataatatataacacatacatcaagtctttcgtgaatccactatttgtctaaaatggattttattttggcacacagaggaagtatcctgtttgagctggtctgtgtgccaaatataaaggtgtatggagatgc

SEQ ID NO: 209654 - DNA, 2627 bp, Zea Mays
gaaaattacagagcaaactccaggcgcaggcgcaggcgcaggcgcaggcgcagggagacctcaatcatctggatttcggcgacatatactactgcagggagagaatccaaagccctccctcctttgggcttgtctctgcctctctctctcctcccttctcccacccacccctctctcttgctgtgggtgtgctgtggagaggagaaaggaagtagagcaagaacaagaactaataacaccaacaagagctgctgccaactcctgcacagcctgggctctcatcactgattgcccacctattaccttcctcttttgcgatttagaatcacccatatatctacctgctctcggtcctctgtgaactctctcgtcttctaggtttcccaggcctcaagataggcctctggaccaaagcttgaaagcagctgctgttcttgcctctttttttaattcttcatttcgtggttcctggatttttgggttcttaggtttcttgtatcttcccccaaccttgcaaaatcttgtggtgaagtttcttgcgttcgctgtttcgggaccatggacgaaaggattccgccgccgtccctcttgcaatactcgcagtcccctgctcattcttccccccatcccctcaattctatgaggtattcttcctctgaaagagaaaggtgagtgttgttcttgatttttttttatttcttttgtcactattgttctccctgttgttcttggtgagttttgttttgtttttgatcctgccctttcggaatccttctgaggagcacgagatttgatgctgcggtggagatttccgcttaattctaaacttccggatgccatgtttccccttgatcaatgctgccgattgttatggaggagtgatctgtaatcgtagggacttcttttgtgatggctcgctgatagatttgttactgctgtcctaaacggagctgtatggttgactcgctgctaatgggtgtaaactttgtgtgtaacaaatcgctcattggcgatagtcacatgtaaattttaatttgatggatcgttctgtatatatcatatcaaagtttccttttacatttcatttctgcgggattatagctgctttagttttagatcctccaaattatgtttcttcttttgtatcacatggataataaatttagcattggctactgttatcctaacgttgattcttgtttggcagatatctggctgagttgcttgcagagaggcagaaattggccccatttgtgcaagttcttcctttctgtaccaggctcttgaaccaagagattttgcgcgcatcttctatggcgcctaaccataactttgttgatcctgagagaattgagcatggtagcccattaaggttacctggccacccagtgaatggtcagccgatggatctggagggctggtcagggattcaaacagaggcttctcagcatatgggggttctacaagcatcatcaatgggctggaatggtgctcctgtacttgctgccactcctgttgtcaagaaagtcatgaggctggatgttccagtagacaagtatcctaactacaactttgttggtcgtttattggggccgcgaggtaactccctgaaaagggttgaagcttcaacccaatgtagagtttacattcgaggacggggttctgtgaaagactctgttaagagtttccagcagatatggttgatgtgcgtcttaatcaagctgtgtccatcctagaggatcttcttaaaccaattgacgagtccatggactactacaagaagcagcagctgagggagctggcgattctaaatggcacactgagagaggaaagcccaagccctcacctcagccctagtgtgtcccccttcaactccaccgggatgaagcgcgcaaaaacagggcggtaatctctgttccgaaagccttcatccccccaaatcaatcatggttcaatgcccaattattacacaagctactgctggagatgattggtgatgcatatgctgggatcatcagtgatggcctatgcctgtcatgatctgtgcgctttatcgacaagcacacaaacatgcctgtgctgtgcttggacgaatggtctccgggcttgttgtttgactctactattatttattctttgtgcttctgactgcctaagtattattaacattattggtttgggaaagttaacaaggcccggttggccagtcgctgtagaaagcttggggagaggaggggggggggggggggtgtcaatgtgacggacaataataaggtttcgttggtgtacctgagatagttgtaatatgtcatgtgctgatgcttttgtgtggtgctagtacaagacaaccagacagctatagttgaggcaatgattattttgcgttcataaaatgcatatcggtgtgctttcttcatggttcatgtaccggaaccagtgtaaaatagttcctccgtcccaaaatgttttagctcttgatttttatgtctgtatttataatatataacacatacatcaagtctttcgtgaatccactatttgtctaaaatggattttattttggcacacagaggaagtatcctgtttgagctggtctgtgtgccaaatataaaggtgtatggagatgc

SEQ ID NO: 209655 - DNA, 2720 bp, Zea Mays
cttgaacgaaatgaatgagaggagaaaattacagagcaaactccaggcgcaggcgcaggcgcaggcgcaggcgcagggagacctcaatcatctggatttcggcgacatatactactgcagggagagaatccaaagccctccctcctttgggcttgtctctgcctctctctctcctcccttctcccacccacccctctctcttgctgtgggtgtgctgtggagaggagaaaggaagtagagcaagaacaagaactaataacaccaacaagagctgctgccaactcctgcacagcctgggctctcatcactgattgcccacctattaccttcctcttttgcgatttagaatcacccatatatctacctgctctcggtcctctgtgaactctctcgtcttctaggtttcccaggcctcaagataggcctctggaccaaagcttgaaagcagctgctgttcttgcctctttttttaattcttcatttcgtggttcctggatttttgggttcttaggtttcttgtatcttcccccaaccttgcaaaatcttgtggtgaagtttcttgcgttcgctgtttcgggaccatggacgaaaggattccgccgccgtccctcttgcaatactcgcagtcccctgctcattcttccccccatcccctcaattctatgaggtattcttcctctgaaagagaaaggtgagtgttgttcttgatttttttttatttcttttgtcactattgttctccctgttgttcttggtgagttttgttttgtttttgatcctgccctttcggaatccttctgaggagcacgagatttgatgctgcggtggagatttccgcttaattctaaacttccggatgccatgtttccccttgatcaatgctgccgattgttatggaggagtgatctgtaatcgtagggacttcttttgtgatggctcgctgatagatttgttactgctgtcctaaacggagctgtatggttgactcgctgctaatgggtgtaaactttgtgtgtaacaaatcgctcattggcgatagtcacatgtaaattttaatttgatggatcgttctgtatatatcatatcaaagtttccttttacatttcatttctgcgggattatagctgctttagttttagatcctccaaattatgtttcttcttttgtatcacatggataataaatttagcattggctactgttatcctaacgttgattcttgtttggcagatatctggctgagttgcttgcagagaggcagaaattggccccatttgtgcaagttcttcctttctgtaccaggctcttgaaccaagagattttgcgcgcatcttctatggcgcctaaccataactttgttgatcctgagagaattgagcatggtagcccattaaggttacctggccacccagtgaatggtcagccgatggatctggagggctggtcagggattcaaacagaggcttctcagcatatgggggttctacaagcatcatcaatgggctggaatggtgctcctgtacttgctgccactcctgttgtcaagaaagtcatgaggctggatgttccagtagacaagtatcctaactacaactttgttggtcgtttattggggccgcgaggtaactccctgaaaagggttgaagcttcaacccaatgtagagtttacattcgaggacggggttctgtgaaagactctgttaaggaagacaagctgagggataaacctgggtatgaacaccttaatgaacaactgcatgtgcttgtggaagcagagtttccagcagatatggttgatgtgcgtcttaatcaagctgtgtccatcctagaggatcttcttaaaccaattgacgagtccatggactactacaagaagcagcagctgagggagctggcgattctaaatggcacactgagagaggaaagcccaagccctcacctcagccctagtgtgtcccccttcaactccaccgggatgaagcgcgcaaaaacagggcggtaatctctgttccgaaagccttcatccccccaaatcaatcatggttcaatgcccaattattacacaagctactgctggagatgattggtgatgcatatgctgggatcatcagtgatggcctatgcctgtcatgatctgtgcgctttatcgacaagcacacaaacatgcctgtgctgtgcttggacgaatggtctccgggcttgttgtttgactctactattatttattctttgtgcttctgactgcctaagtattattaacattattggtttgggaaagttaacaaggcccggttggccagtcgctgtagaaagcttggggagaggaggggggggggggggggtgtcaatgtgacggacaataataaggtttcgttggtgtacctgagatagttgtaatatgtcatgtgctgatgcttttgtgtggtgctagtacaagacaaccagacagctatagttgaggcaatgattattttgcgttcataaaatgcatatcggtgtgctttcttcatggttcatgtaccggaaccagtgtaaaatagttcctccgtcccaaaatgttttagctcttgatttttatgtctgtatttataatatataacacatacatcaagtctttcgtgaatccactatttgtctaaaatggattttattttggcacacagaggaagtatcctgtttgagctggtctgtgtgccaaatataaaggtgtatggagatgc

SEQ ID NO: 209656 - DNA, 1477 bp, Zea Mays
attgttcaagaaccgattagaaatgccagtattacacatctatctttattggcaaccctccaagaccatactttcttgatgttgatactggaagcgacttgacgtggatccagtgtgatgcaccatgtacaaactgcgcaaagggaccacatcctctatataagccagcaaaagaaaagattgtccctcctagagacttgttgtgccaagaattgcaaggcaaccagaactactgcgaaacctgcaagcagtgtgactatgaaattgaatacgcagaccaaagctcctctatgggtgtccttgcaagggatgatatgcatatgatcgcaaccaatggtggaagggaaaaattagattttgtctttgggtgtgcatatgatcagcaaggccagcttttatcttcaccagctaagactgatgggatccttggacttagcagtgcggcgataagctttcccagtcagctggctagtcacgggattattgccaacgtttttggccattgtatcactagagagcaaggtggtggaggatatatgtttctgggagatgattatgtacctagatggggagtaacatggacttctattcgaagtggtccagataacttatatcacacacaagcccaccatgtaaaatatggggatcagcaactccggaggcctgaacaggcaggaagcactgttcaagtaatttttgacagtggaagctcctatacgtacctcccaaatgaaatatatgaaaaccttgttgcagcaatcaaatatgcgtctccgggctttgtccaagacacttcagatcggacattacctttatgctggaaagctgatttccctgtgaggtatctggaagatgtcaagcagttcttcgagcccttgaaccttcacttcgggaagaaatggcttttcatgtctaaaacattcactatttctcctgaggattacttgattattagtgataaaggaaatgtctgtcttgggcttctcaacggaacggagattaatcatgggtcaactatcatagtaggagatgtttctctgcgcggcaagttggttgtgtacgacaatcagcggaagcagattggatgggcagattcagactgcaccaaacctcaatcacaaaagggctttcctttcttcctctgacgaagcatcactctctacataatacatgtgtaaagcgtaaatagtgaacgccattgtattgtagaatacattattaagtggagactgcctttgtgtatgggtatatcgttccattggaactgtcagaaatcctccactgtgttgtacccgtctgtaatgtgtatactatgttgtttacttgtatgatgtatgtacactatctcctctacatggagttgtcccctacacatggattttttgtagattagttacattatgaacattttcgacagaagttgggtactttacacatttgatcatccattcaatactgggtgtgtgtgtgttttatc

SEQ ID NO: 209657 - DNA, 920 bp, Zea Mays
ctgtggttctgtgttcttttatgctgagataaatttggaggtgctatggcaattgtaaagagtgatatcggcggcaatatcacaagactggaaaacaagtatacttcagaaccatcaaagtatgaacacttgtacagcatggttcaggaagaagttcaaaacaagaccgcaaaaggttcctcaagctgcacaaatgggcttctgtggctgacgagggccatggacttccttgttgagttgtttcgtaacctgcttgagcatccagactggaccatgggtcaatcttgcactgattcatacaccaagactttgaagaaatttcatggatggcttgccagttctagttttacggtggcaatgaagcttgctcctaatagagagaaatttatggaggtcattagtggaaccggtgacatcaatgcagatattgagaaattttgcacgaccttctctcctttcctcaaagaaaaccacaactttctggcgagcgtcggtcttgatgatctgaaggcttcatagatcaatctccatgctgattacaacaaaataagcatgtcttacgaaactcaaagtgttgccgagggtatacctgtttcccgtagccatctcccccttgaaaaactttaggagatggtaataatttgtcagcatgattgaccatggctacttacgcagagaattgacaccactcaacaaatttagttaccgaactctcgatcctgtgttacagcaaatcctatggttatgtggaactctggtgctgtaattctcttgtatgctacccagtatgccgcaggaaatcataattcggtgttccattgcagcaggaccatcgtgtcacttgtaggctacccatattgactttgtggctcagccagctgcccacttccaacacagttgagcgagaacatctagatgac

SEQ ID NO: 209658 - DNA, 4787 bp, Zea Mays
attctttctctaggtttgcctaggctaaccacaggaactgtctgatgatgatataagggaaacagcttatgaggtccttcttgcttctctatttgtcagtggaaaagtacacttctctgaagaaaaaagagaaaagaagcacaaattcttgaagggacgaagaactaagactgaaggatcaaatccatcacctcaggtggaagatggctatgcccacattcttgatctgacccgagtacaaatggagatttcagaatctatggacatcctgactaaacgagctttaagacatattagtttgaagacggtgaaagaaacgcttgatgtgccccgtatatcactacagctcttaagttctgttggcaaacttgattttccaaccgaaagattgcgtgggcaatggcagaaaagacaggcgaatgttcttgaagaactacttctcttctcagcatctcttgagtatgatacgagcaacacattacggatagttctctctaagctaaaaagtacagaggattgggttgtgactgttcctgagggccgtgtcgaggtcctgactatcattgaaagatacaacacaaaactttgttcactgacgaagaagtttgacattaaagatgagacctaccattggacccataattatcattttaattttaggttatatgagaagttactttgcagtgtgtttgatattctcgaagatgggcaacttgtagaggaggctgatgagatactggaaataacaaagctgacctggcctatattgggcgttactgagaagctgcaccacatattctatgcctgggtgcttttccagaagttttctcaaactggggagattcttctactgaaacatgcaagccttcagatacgggaatttcgattgtaccatgacgttaaagaaatagagttatatacaaacagttttatttgttctgtggatgcctatggtggcaacaaggttctaagtttggttgacagtgtcctactcaaaataaatgtttggtgccgcagacagctaggcaattatcatgcacactatagtaagaataactactcgatctttgaggccacactgaacttggtcttgctattggtgacaaactccagtgaggacgattttgaagaaaccatgttcattgagagcccagtagggagtacaccagaactgaagttgatccatttactcattgtcagatccatccatgctgcttataagcaagcactaatttcatcaaatggccgatcagattcagaatttaagcatccattgacaattcttgcaaatgagctaaaggcagtggcagagaaagagtgcactgacttcagtccaatacttaacaagcactatcctgaagctcaaagagtagctctaatcttcttacacatgctatatggaaaacaattggaacttttcttggaaaggacagataattcggagaactcaaaagagatactggcagcatcaaataattttgagctctttatagctcagaagctttactcagtgtatggggaaactgttgggtcttcattctccaactatttaaagccatacatggtaggtcacttttcttcaccccttgttctccaatggcttcatgctcaacacgagaatgtcttggagtggacaaaacgtactattgagatagaggattggacacctttatcagctcacgagaaacaagcaagatctgtggttgaagtattccggattgtggaggagactgttgatcagttctttaatacgagcctgcccctggaaattgtccacttgcgaagtctactcatcggaatcactaggagtcttgaagtctatttgcttcacatggaaaatcaacaagtgcctggatctactcttctccctagtgctccagtcttgacacgttatgcagaatcaatgaatccatttgcaaagaggaaacttattgagcctacggttcctgaagaaaaggttgctatgaagttgaacaatttggcagtgcccaaattatgtgtgaaactcaacactcttcaattcatcagggatcaacttgatgccatagaagaaggtgtcaaacaatcctgggtctctgtcttgtcagctgtcagattgttggattatttgtcttgtatggctagtggaagagctctttcagaaagtttgacatcatctgatgaatcggttgatgagttgtttacaatatttgatgatgtgcgaatgactgctgtgaagataactgatgtgatcttgaactttattggaacaagggctgtattttgggatatgcgggattcatttattttctctttgtatcgagacagcgttgaaggagcacgcatgcagatatttatccccacaattgaccaagttcttgatcaggtatgtgatttaattgttgatgtgttaagagaccaagttgtactcagaatatttcaagcctgcatggatggactcatttgggtcctactggatggaggcccatcacgtgctttttttgagacagatgtggatttgatgcaacaagatcttgctattctcaaggatctctttatagcagagggtcaaggtttaccaatagatatagttgaaaaggaggctagacaaactcaccagatattggacttatatatgctgaaggccgatgcagttattgatatgctgataaatgcaagtgaccaaatgcctcacgatcctgaagctacaaatgctcgaagaagatatgtacatgatgccaacacccttcttcgagttttgtgtcataagaaggataaaattgcctctacattcttgagaatccagtaccatcttccaaggtgttcagattatgatgatgttcctgtgaaggatgtgtcatctaaagtacctatcttttcagacatgctgaaaagaggtacctcattcaattggtctgagacagggcaacaaagctttagaattatgaagaagaaactgcaagaagctacttggcagtaaagatgggtcttgctaaggaaactctgcttggtttgcagttttttttatatatacaacagcagtgagctgtactcaatcagcaggggaagagcaccccgcgggcattgttttagaagacccccccccccccccccccccacacacacacacaaaataaacagtgcagaccctatagcatcacacccctaaccctggtcactacccacaagaagttgaaatgagtcgttggaggtgctgagtcacaatcactaggctatgaatcctttcaccagtgagctgtactatcgaaggaactctgcacggtcaaggctccatattattcagtataagctcccaaaggtccacaatggtgctcattgtgacggtggccctggttgaattcatgaagtatgactgcaaagcttcatttggagggttttagtttcgaaaatatgaaggacaagcttggtgcagtggtgagaagccttaccagttaccaccgagccaaaggtagttcgacacagcctttctacaaaaatacagggatacggcttgccacgattatttctctcgggccctactcatgtggaagtctgtctttttttttcccctcgaaaataccctggccgatccggtgctagtaccgaactggaggatttattttacctggtccttggcttcagcttgatcagattctctcttatgtacaggttgttagttctagagttccggtacaatgggcgctagtgcgctacatatttggaaacccgatagattaactattcgaaaatccggaagtaacatgactgtttattaagttatttttctcccccctcccaaaacaactggaagctgaagccaacacaggcggtgccaaagtggcctttaatattttcagaagcacgggagcactgtctatgcacaatccgttgcagttaaatgtctaggttggcaatgcgccaatgtagtgactgtcggatacttgtggttactgagctttaccggctcttggaactcgttactacagtaccaaagaagtgaagaagctgaagccaacgcaagctgtgccaacgaggcacgaaatatttgcacaggctcgggactcgggagctcactctgtctatgcactataagttgcagttaaggttcgttctagctgtcacgtcattatcaatcactagtgttagtttttatctacctcaacgatactgttgagaatcactattggtgatcaacaccattacatgtctcaatttcttccttattttcttggtcatctatttttaattctttggacaattctttaatggtcaaatgtggatcattttcatgtcattatttatttggtcggtgttatgattcatcgatttatcgttcaaacaattttatataatttaacttcatgttatctatatagaggtgtttcgctatggccttcttttggtcagaggtctaggtgcgttgcttgcactttgcattgcgctctagccctatcgcgaccaaacagggcgtggtggttcgacactatcggactttggagtcatagtatcgcatgcatcacttcggttagtgacaaagtgcacaatacatgtgctctagccagaaccagtttgtcgggcctgccatggaagtcatcctttgcaacttgaagcagctaggcatcatctaatctgcttggctgggtcgtaggcaagcagttgtggatgttgttgaagagggtgatatttcaattgtttgtggaccatcgatccttgagctcagctacatgatggtacacttgcgagaaggctcagtagtggagttgtatgtggttgtttagcttgtacacaagcatggcactttgatctcc

SEQ ID NO: 209659 - DNA, 5389 bp, Zea Mays
ggccagtctcctcagttttcaccctctccgtctcccgtgagccagccagaagtcctagctccgcgcccaaaccctcggcctcgaccagcacctgcgcgcggtgggccatggatgcggcgtcgatgctggagctgtatcgccgcgaccggcgcaggctcctcagcttcctgctctccgccggcggtggaggcggccgggccctcgatctctcccgcgtcgacctcgacgccgtcagcgccgactacgcgctcgagtgcgtcgcctccggcgcccattttaatgcttcggaagccacgaggaggtacttcgacgagaggaggtaccctatcatgattgggtcgtcatcagggaactcttattttcttctttcgaggccaatgccatctgattcctctccaaaggaagcagcacctagcattgggccacaggcacctgtacaagacaactcaagttcaacaggacaaccaactgaaccaagagatttcttcagggatgctcttagtacctcaggaataggctatgacacggaagatgataaattggcagatatttctcctcagcaagtaaacaaagtggatattctttctctaggtttgcctaggctaaccacagaactgtctgatgatgatataagggaaacagcttatgaggtccttcttgcttctctatttgtcagtggaaaagtacacttctctgaagaaaaaagagaaaagaagcacaaattcttgaagggacgaagaactaagactgaaggatcaaatccatcacctcaggtggaagatggctatgcccacattcttgatctgacccgagtacaaatggagatttcagaatctatggacatcctgactaaacgagctttaagacatattagtttgaagacggtgaaagaaacgcttgatgtgccccgtatatcactacagctcttaagttctgttggcaaacttgattttccaaccgaaagattgcgtgggcaatggcagaaaagacaggcgaatgttcttgaagaactacttctcttctcagcatctcttgagtatgatacgagcaacacattacggatagttctctctaagctaaaaagtacagaggattgggttgtgactgttcctgagggccgtgtcgaggtcctgactatcattgaaagatacaacacaaaactttgttcactgacgaagaagtttgacattaaagatgagacctaccattggacccataattatcattttaattttaggttatatgagaagttactttgcagtgtgtttgatattctcgaagatgggcaacttgtagaggaggctgatgagatactggaaataacaaagctgacctggcctatattgggcgttactgagaagctgcaccacatattctatgcctgggtgcttttccagaagttttctcaaactggggagattcttctactgaaacatgcaagccttcagatacgggaatttcgattgtaccatgacgttaaagaaatagagttatatacaaacagttttatttgttctgtggatgcctatggtggcaacaaggttctaagtttggttgacagtgtcctactcaaaataaatgtttggtgccgcagacagctaggcaattatcatgcacactatagtaagaataactactcgatctttgaggccacactgaacttggtcttgctattggtgacaaactccagtgaggacgattttgaagaaaccatgttcattgagagcccagtagggagtacaccagaactgaagttgatccatttactcattgtcagatccatccatgctgcttataagcaattgacactttaatatgctccattaggcactaatttcatcaaatggccgatcagattcagaatttaagcatccattgacaattcttgcaaatgagctaaaggcagtggcagagaaagagtgcactgacttcagtccaatacttaacaagcactatcctgaagctcaaagagtagctctaatcttcttacacatgctatatggaaaacaattggaacttttcttggaaaggacagataattcggagaactcaaaagagatactggcagcatcaaataattttgagctctttatagctcagaagctttactcagtgtatggggaaactgttgggtcttcattctccaactatttaaagccatacatggtaggtcacttttcttcaccccttgttctccaatggcttcatgctcaacacgagaatgtcttggagtggacaaaacgtactattgagatagaggattggacacctttatcagctcacgagaaacaagcaagatctgtggttgaagtattccggattgtggaggagactgttgatcagttctttaatacgagcctgcccctggaaattgtccacttgcgaagtctactcatcggaatcactaggagtcttgaagtctatttgcttcacatggaaaatcaacaagtgcctggatctactcttctccctagtgctccagtcttgacacgttatgcagaatcaatgaatccatttgcaaagaggaaacttattgagcctacggttcctgaagaaaaggttgctatgaagttgaacaatttggcagtgcccaaattatgtgtgaaactcaacactcttcaattcatcagggatcaacttgatgccatagaagaaggtgtcaaacaatcctgggtctctgtcttgtcagctgtcagattgttggattatttgtcttgtatggctagtggaagagctctttcagaaagtttgacatcatctgatgaatcggttgatgagttgtttacaatatttgatgatgtgcgaatgactgctgtgaagataactgatgtgatcttgaactttattggaacaagggctgtattttgggatatgcgggattcatttattttctctttgtatcgagacagcgttgaaggagcacgcatgcagatatttatccccacaattgaccaagttcttgatcaggtatgtgatttaattgttgatgtgttaagagaccaagttgtactcagaatatttcaagcctgcatggatggactcatttgggtcctactggatggaggcccatcacgtgctttttttgagacagatgtggatttgatgcaacaagatcttgctattctcaaggatctctttatagcagagggtcaaggtttaccaatagatatagttgaaaaggaggctagacaaactcaccagatattggacttatatatgctgaaggccgatgcagttattgatatgctgataaatgcaagtgaccaaatgcctcacgatcctgaagctacaaatgctcgaagaagatatgtacatgatgccaacacccttcttcgagttttgtgtcataagaaggataaaattgcctctacattcttgagaatccagtaccatcttccaaggtgttcagattatgatgatgttcctgtgaaggatgtgtcatctaaagtacctatcttttcagacatgctgaaaagaggtacctcattcaattggtctgagacagggcaacaaagctttagaattatgaagaagaaactgcaagaagctacttggcagtaaagatgggtcttgctaaggaaactctgcttggtttgcagttttttttatatatacaacagcagtgagctgtactcaatcagcaggggaagagcaccccgcgggcattgttttagaagacccccccccccccccccccccacacacacacacaaaataaacagtgcagaccctatagcatcacacccctaaccctggtcactacccacaagaagttgaaatgagtcgttggaggtgctgagtcacaatcactaggctatgaatcctttcaccagtgagctgtactatcgaaggaactctgcacggtcaaggctccatattattcagtataagctcccaaaggtccacaatggtgctcattgtgacggtggccctggttgaattcatgaagtatgactgcaaagcttcatttggagggttttagtttcgaaaatatgaaggacaagcttggtgcagtggtgagaagccttaccagttaccaccgagccaaaggtagttcgacacagcctttctacaaaaatacagggatacggcttgccacgattatttctctcgggccctactcatgtggaagtctgtctttttttttcccctcgaaaataccctggccgatccggtgctagtaccgaactggaggatttattttacctggtccttggcttcagcttgatcagattctctcttatgtacaggttgttagttctagagttccggtacaatgggcgctagtgcgctacatatttggaaacccgatagattaactattcgaaaatccggaagtaacatgactgtttattaagttatttttctcccccctcccaaaacaactggaagctgaagccaacacaggcggtgccaaagtggcctttaatattttcagaagcacgggagcactgtctatgcacaatccgttgcagttaaatgtctaggttggcaatgcgccaatgtagtgactgtcggatacttgtggttactgagctttaccggctcttggaactcgttactacagtaccaaagaagtgaagaagctgaagccaacgcaagctgtgccaacgaggcacgaaatatttgcacaggctcgggactcgggagctcactctgtctatgcactataagttgcagttaaggttcgttctagctgtcacgtcattatcaatcactagtgttagtttttatctacctcaacgatactgttgagaatcactattggtgatcaacaccattacatgtctcaatttcttccttattttcttggtcatctatttttaattctttggacaattctttaatggtcaaatgtggatcattttcatgtcattatttatttggtcggtgttatgattcatcgatttatcgttcaaacaattttatataatttaacttcatgttatctatatagaggtgtttcgctatggccttcttttggtcagaggtctaggtgcgttgcttgcactttgcattgcgctctagccctatcgcgaccaaacagggcgtggtggttcgacactatcggactttggagtcatagtatcgcatgcatcacttcggttagtgacaaagtgcacaatacatgtgctctagccagaaccagtttgtcgggcctgccatggaagtcatcctttgcaacttgaagcagctaggcatcatctaatctgcttggctgggtcgtaggcaagcagttgtggatgttgttgaagagggtgatatttcaattgtttgtggaccatcgatccttgagctcagctacatgatggtacacttgcgagaaggctcagtagtggagttgtatgtggttgtttagcttgtacacaagcatggcactttgatctcc

SEQ ID NO: 209660 - DNA, 1325 bp, Zea Mays
ggccagtctcctcagttttcaccctctccgtctcccgtgagccagccagaagtcctagctccgcgcccaaaccctcggcctcgaccagcacctgcgcgcggtgggccatggatgcggcgtcgatgctggagctgtatcgccgcgaccggcgcaggctcctcagcttcctgctctccgccggcggtggaggcggccgggccctcgatctctcccgcgtcgacctcgacgccgtcagcgccgactacgcgctcgagtgcgtcgcctccggcgcccattttaatgcttcggaagccacgaggaggtacttcgacgagaggaggtaccctatcatgattgggtcgtcatcagggaactcttattttcttctttcgaggccaatgccatctgattcctctccaaaggaagcagcacctagcattgggccacaggcacctgtacaagacaactcaagttcaacaggacaaccaactgaaccaagagatttcttcagggatgctcttagtacctcaggaataggctatgacacggaagatgataaattggcagatatttctcctcagcaagtaaacaaagtggatattctttctctaggtttgcctaggctaaccacagaactgtctgatgatgatataagggaaacagcttatgaggtccttcttgcttctctatttgtcagtggaaaagtacacttctctgaagaaaaaagagaaaagaagcacaaattcttgaagggacgaagaactaagactgaaggatcaaatccatcacctcaggtggaagatggctatgcccacattcttgatctgacccgagtacaaatggagatttcagaatctatggacatcctgactaaacgagctttaagacatattagtttgaagacggtgaaagaaacgcttgatgtgccccgtatatcactacagctcttaagttctgttggcaaacttgattttccaaccgaaagattgcgtgggcaatggcagaaaagacaggcgaatgttcttgaagaactacttctcttctcagcatctcttgagtatgatacgagcaacacattacggatagttctctctaagctaaaaagtacagaggattgggttgtgactgttcctgagggccgtgtcgaggtcctgactatcattgaaagatacaacacaaaactttgttcactgacgaagaagtttgacattaaagatgagacctaccattggacccataattatcattttaattttaggttatatgagaagttactttgcagtgtgtttgatattctcgaagatgggcaacttgtagagtgttccatcacgagttcttgaatgtac

SEQ ID NO: 209661 - DNA, 2010 bp, Zea Mays
gcttgctgcagaagttgaagaacatcattacaaacgagctccctacaaagtatacagactaaaaaaaatagaaaaggaattccgcataaacccctcccagccaaaaaaaaccacccccgccgcggccgccgagcgagcggtaagcagccgccgcaccacgagagcgggatggcgtcggctccggagccggagaacgggagggaactctacgcgctgctccacctctcgccggacgcctccagcgaggaagtccgcagggcgtaccgccagtttgcgcaaatctaccaccccgataaataccaggacccgcagatgaaggatgtagcaactgaaaacttccaacgaatatgtgaagcttatgagatactatcagatgataacaaaagacaggtgtatgacatctatggtatggaaggtttaaattctggcctggaacttggtcccaagctaactaaaccagaagaaatcaaggaacagttagaacgactgcggcggcgcaaggaggaagaaaaacttttcaagcatgctctacccaatggctcaatcattgctaatttctcagtgccacaatatttaaatgacgggagcatcatgagaggaatggcgatgcttagtcaagttgagttgccagtgtccaagcaaaatactgtcgttgttggtgggaatttgattgtaaatggctcagctggatctggagcagcaaccactgtgctgcgacaccagttgtctcctgtttcctctattgagtttatggccacagctggactacgttctgttattggtgggcagatgtttcgcaacttctggacttgctgtttctttgagagatgggtctatcaacttgtcaaatgcctggactcgccaattgtctgacaatactgttggaaatatacagctagtccttggcgatgaatcaagtatttctgttggatggcaaaagaaggatgaaaaacgtactgcaactggagaagtaaagtttggaactaatttttttggtgcatctgctcattatacacatcgcttctcctccaaatctcatgcacgcatcgctggtagagttggaagcacaatccttgattttgaaattggaggagggaggcgaatatcagaatttagtactgtaaggatgatgtataacataggaattcagggcgtatcttggaagtttgagttacatcgtgctggtcaaaagttaatcatcccagtcttgctttcaactgatttaaatccattatttgttaccagtgcatttgctattccttcaacactgtattttctacttcagacatatgttgtaaagccttactaccttaagcgagaaaagcagaaaacactagaaaagatggaaggcttatctacacagctaactgaagccagaaaggcagctgaaaaagctcaaaaattactggaacctgtctccaaccgtaagaagaatagacagctagagaacaacggattggtgataacgaaggctctatatggcagtcgccaaaaaatcaaaatgagcagtgaattgaatgatatacacaatgacatggcttcacaagtatttgatgtgaccatcccactgaacttcctcgttactgaggcaggccagctcaagcttcatgacgggataaagaagtctggaataatgggtttctacgatccttgtcctggagacccgaagctattacttgtcgagtatacgtttcatggtcataaatacaaggtcatggtggatgactatgaggcgctgttgataccacaagatatccatcaattttgaacggttcctgatgtaaaagccacatcaaaacgattttgggtcatcagctccctttctcacattttttgttccttttgtgttgagctatctctgttttcggtcattccttaatgcgcctcgtatttgtatacacatgtcggtttgtgccacctcgaggtcatacacaccaacagcaggtaataaagctgtagccagtagttttccagaaagaaaaaaaataaaaataaaagtaaaactcaatg

SEQ ID NO: 209662 - DNA, 1850 bp, Zea Mays
ctttaatggcataactgtggaatttgatgtactaatggagtctaagggtggcaagaagtctagcagtagtcgttccatgatgtatgaagctccccttggctacagcattgaggacgttcgacctgccggaggcgcgaagaagttccagtctgctgcttactccaactgcgcaaagaagccatcctgatatcccttttggcttcctcgttctagtagtttaggatttcttttctgacacttcgattcttaccaatccccctggcctgctgctttcctgacaatcgaccagttccccagtcttgctccctgcagtcctccctcctccatctccagcgttgtgttctgactcacctgcaccaatggctgttctttctgctgctggtgctcccccggcctcagctatcgggtttgagggctatgagaagcgccttgagatcacattctctgaggcacctgtctttgtggacccccatggcagcggtttgcgtgccctctccaggtcccagattgactctgttctggatcttgcacggtgcacgatcgtgtccgagctctccaacaaggattttgactcctatgttctctccgagtcaagcttgttcatctatcctctgaagattgtcatcaagacctgtggcactaccaagctcctgctcacaattccaaggatcctagagcttgctgaagagctgtctatgcctcttgctgctgtgaagtactcccgcgggacgttcatctttcctggcgcacagccagccccccaccggagcttctccgaggaagttgctgtacttaaccgatactttgggggcctgaagtctggtggcaatgcttatgtgattggagatgcagcaagaccaggacagaagtggcacatctactacgccactgagtacccagagcaaccaatggtcaaccttgagatgtgcatgactggtctggacacgaagaaagcttcagtcttcttcaagactaatgctgatggcaacacaacatgtgccaaggaaatgacgaagctctctggtatctctgaaattatccctgagatggagatctgtgattttgacttcgaaccctgcggctactccatgaatgcaatccatggctctgcgttctccacgatccatgtgacgcctgaggatgggttcagctacgccagttatgaggttatgggcttggatgccactgccctgtcttacggtgaccttgtcaagagggtccttgggtgcttcggcccctcggaattttctgtcgccgtgaccatcttcggcgggcggggccaagctgggacatggggaaaggaacttggtgcggaggcttatgactgcaacaacatggtcgagcaggagctgcctggaggtgggatcctcatctaccagagcttctgtgctgctgaagacgccgttgctagctcgcccaaatccgttcttcgctgctttgatggcgagaatgcagcaccttttgcgaaggactgcaagctggctaatcttgtctgcttggaggaagttggatgctatcgaggagaaggatggagtgcttgatgagtaagacgggtttctggtgtcgatttgcttctgagtttttttctttttatatcgttgcgatctcgtggttgtcgtttggttagcagccaagccaggctattagtacgaagaatgtcgtctataaacatgtgttcctacgttgccacatgctgagtcaatctgtatacagctagctctaggtggtcagctgcgtctaccacaatgagcatacatgtatggataaatcttctgtgaaagcattcgatgaataagggttgttttcgtgattcgttttctgaagtctgaaatgttattatttattctctt

SEQ ID NO: 209663 - DNA, 4037 bp, Zea Mays
cccccccccccccccttcacagcatcttctctctctcctcttcctctctcctgactccgccgcgtcgcgatctccccacctctcctgccgctcccacctccccgcactgccaaacccctcgccccccccccctcctccgctgcgctccgatccagtctgccgcgtccccggcggcgcgccctgagctcgtcgccccgcgcgcacgcgagttgccctgcccaccctgacccgcgcaggcgagcgagcccccattgaagcgcgccgcctcccctgcgcgcggcggcagggctcggtgaacgaggccagcggtccgcgcgcgcctggccgtgatggggcggtgccggcgccggggctgatgcggaggccgctgccatgtcggacgtctcgtcggatctcggcggcatccgggcggggcccgtggagcgtgacatcgagcaggctatcactgctctcaagaaaggagcatacttactgaagtatgggcgtagaggaaagccaaagttttgtccctttaggttatccaatgatgaatctgtactgatatggttctcagggaaagaagagaaacatctaaggttgagccatgtatccaggataattcctgggcaaaggactgcaatttttcagaggtatccacggcctgagaaggaatgccagtctttttctctaatttcacatgataggtcattggatataatatgcaaagataaagatgaagctgaagtatggttcgctgggctgaaaacactgatttcacgttgtcaccaaagaaaatggagaactgaatctagaagtgatatcctttcctctggtgcaactagtccgaggacttacacacgacggagttctcctttgagttcacctttcagcagcaatgacagcatccacaaggatggcagtgacaactaccgactccgtactccatatgggagccctccaaagaatggattggagaaggcattttctgatgtcatgttgtatgcagttcctcccaggggtttctttccatcagattctaatgctggatcagtccattctatgtcttctggacaatcggataacacaaacgggcactcaagaggcgtcccaatggatgctttccgagttagttattcaagtgccgttagttcatctagtcatggttctggtcatgatgatggtgatgctttaggcgatgttttcatatggggagaaggaactggggaaggaattcttggcggtggtggttcaagagtcggaagctcctcaggtgcaaaaatggactgccttgtaccaaaaccattagaatttgccgtgcgacttgatgtgcagaacatatcttgtggaggaaggcatgctgcacttgttactaaacaagccaaacttattgatgctctttctcatatgaacattgagcttgtagcatgtggagaataccacacttgtgctgttacactatctggagatctttacacatggggggatggcacatttaaatttgggcttttgggtcatggaaatgatgtcagtcactgggtacccaagcatgtgaatggaccattagagggtatacatgtttcgtcaatttcatgtggaccttggcatacagccctagtaacttccgctggacagcttttcacatttggtgatggatcttttggggtcctgggccatggagatcgtgagagtatctcggtccccagggaagttgaatctctcaaagggttacgtacggtgcgggcagcttgtggtgtttggcacactgctgcagttgtagaagtaatgtctgtgaattcaaattctagcaattgttcttctggtaagatatttacatggggtgatggtgataaaggtcgcttaggtcatggtgacaaggaaccaaaacttgtcccaacttgtgtggctgctttggtggagcccaatttttgtcaggttgcttgtgggcattgcttgacagtagccctaacaacttctgggcatgtgtatacaatgggcagtgctgtctatggtcaacttgggaatgcacaagctgatggcatgcttcctgtgcgtgttgaaggcaagctatacaaaaactttgtggaggagatttcatgtggtgcttatcatgtggctgtattgacttctaggactgaggtgtacacatggggaaaaggtgcaaatggccggttaggtcatggcgatactgaggataagaatactcctacattggttgaagcactgaaagataaacaagtcagaaatgttgtttgtggaattaatttcactgcagcaatatgcattcacaaatgggtatctggagttgatcaatcaatgtgctcaggttgccgtcagccattcaacttgaggagaaaacgccataattgctacaactgtgctctagtattttgtcattcctgcagcagtaaaaaatctctgaaggcttcattagcgcctaatggaaacaagccttaccgtgtctgcgatacctgctacagcaaactgacaaagggacttgagacagatatgcatttttcagcgaaacgggctgctaccgtaccaggattcagtgatacaattgaggaggatctggaaacaaggtcaaatgctcaactatcaaggttgtcgtcaatggaatcttttaagcatttggatagcagatattccaagaaaaacaagaagtttgaatttaatagcacccgtgtttcccctgtgcccaatgggagttcacattggagtggactaaacatttcaagatctttcaatcctgtatttggatcttcaaagaagtttttctcagcatcagttcctggatcaagaattgtttctagggcaacatcacctatttcaagaagaacaagccctccacgatctacaacaccaacacctactctgggtggcctaacgtctcccagagttcccactgacggcaagccaacaaatgatgcattaagccaagaggttctgaatttgagatctcaggtggagagtcttaccaggaagtctcaactcctggagttggagctggaaagaactaccaaacaattgaaggaagctatttccattgccggcgaggaaactgcaaagtgcaaggcggcaaaggaagtaatcaagtcactcactgcacagttgaaggggatggcagagagattacctggaggagcagccaagaacactaagttgccacctcttcctggaatttccattccaagtgacatctcgtctttggctatggagagtgtgggcagcccaagcagctccggagaacaaatcataaatggtcataatggattgcttgcgtctaatggaccaagttctgttaggaataagacaagccatccagaagtgggtaagaatggaagtaggccgcctgatgctgaatcttgccatgatgctgaatgggtagagcaagatgaaccaggtgtttacattactctcaccgcgttgcctggaggcgccagagatctcaagcgggttcggttcagccggaagagattcagcgagacacaagcagaacagtggtggcaggagaaccgggcgagggtataccagcagtacaatgtccgcgtggttgacaaatcaacggccagtgccgacaatgacattgcagctaactgacactagactgacctggagaaacatacctgattacaagtggagctgaggccatgtaccctacctacgtgaaggctctctagtcagtcaagctgggttgctaacgtggctaccattttacctaggtggttttcgctcccaggaaaacaggaggtttttttaatccggttttacataattctttctcttactcccttctcttttctccttgtgtggaaagtagagtgcttgagcagaggtaatgtaaatgcttagtagaagcaggctaatctaccttgtaaatgcataagcaagcatcgattttagaatgtcttggaaattttctgatatggttgcaaatggcaaatctgggctaagtggtgatggtccctggcggttgtagtagaacctgtatgcatgaatctgaagcaatcacgagggctcaacacttgagtccgatcccatctgattggcttagactgtat

SEQ ID NO: 209664 - DNA, 3997 bp, Zea Mays
cccccccccccccccttcacagcatcttctctctctcctcttcctctctcctgactccgccgcgtcgcgatctccccacctctcctgccgctcccacctccccgcactgccaaacccctcgccccccccccctcctccgctgcgctccgatccagtctgccgcgtccccggcggcgcgccctgagctcgtcgccccgcgcgcacgcgagttgccctgcccaccctgacccgcgcaggcgagcgagcccccattgaagcgcgccgcctcccctgcgcgcggcggcagggctcggtgaacgaggccagcggtccgcgcgcgcctggccgtgatggggcggtgccggcgccggggctgatgcggaggccgctgccatgtcggacgtctcgtcggatctcggcggcatccgggcggggcccgtggagcgtgacatcgagcaggctatcactgctctcaagaaaggagcatacttactgaagtatgggcgtagaggaaagccaaagttttgtccctttaggttatccaatgatgaatctgtactgatatggttctcagggaaagaagagaaacatctaaggcaatttttcagaggtatccacggcctgagaaggaatgccagtctttttctctaatttcacatgataggtcattggatataatatgcaaagataaagatgaagctgaagtatggttcgctgggctgaaaacactgatttcacgttgtcaccaaagaaaatggagaactgaatctagaagtgatatcctttcctctggtgcaactagtccgaggacttacacacgacggagttctcctttgagttcacctttcagcagcaatgacagcatccacaaggatggcagtgacaactaccgactccgtactccatatgggagccctccaaagaatggattggagaaggcattttctgatgtcatgttgtatgcagttcctcccaggggtttctttccatcagattctaatgctggatcagtccattctatgtcttctggacaatcggataacacaaacgggcactcaagaggcgtcccaatggatgctttccgagttagttattcaagtgccgttagttcatctagtcatggttctggtcatgatgatggtgatgctttaggcgatgttttcatatggggagaaggaactggggaaggaattcttggcggtggtggttcaagagtcggaagctcctcaggtgcaaaaatggactgccttgtaccaaaaccattagaatttgccgtgcgacttgatgtgcagaacatatcttgtggaggaaggcatgctgcacttgttactaaacaagccaaacttattgatgctctttctcatatgaacattgagcttgtagcatgtggagaataccacacttgtgctgttacactatctggagatctttacacatggggggatggcacatttaaatttgggcttttgggtcatggaaatgatgtcagtcactgggtacccaagcatgtgaatggaccattagagggtatacatgtttcgtcaatttcatgtggaccttggcatacagccctagtaacttccgctggacagcttttcacatttggtgatggatcttttggggtcctgggccatggagatcgtgagagtatctcggtccccagggaagttgaatctctcaaagggttacgtacggtgcgggcagcttgtggtgtttggcacactgctgcagttgtagaagtaatgtctgtgaattcaaattctagcaattgttcttctggtaagatatttacatggggtgatggtgataaaggtcgcttaggtcatggtgacaaggaaccaaaacttgtcccaacttgtgtggctgctttggtggagcccaatttttgtcaggttgcttgtgggcattgcttgacagtagccctaacaacttctgggcatgtgtatacaatgggcagtgctgtctatggtcaacttgggaatgcacaagctgatggcatgcttcctgtgcgtgttgaaggcaagctatacaaaaactttgtggaggagatttcatgtggtgcttatcatgtggctgtattgacttctaggactgaggtgtacacatggggaaaaggtgcaaatggccggttaggtcatggcgatactgaggataagaatactcctacattggttgaagcactgaaagataaacaagtcagaaatgttgtttgtggaattaatttcactgcagcaatatgcattcacaaatgggtatctggagttgatcaatcaatgtgctcaggttgccgtcagccattcaacttgaggagaaaacgccataattgctacaactgtgctctagtattttgtcattcctgcagcagtaaaaaatctctgaaggcttcattagcgcctaatggaaacaagccttaccgtgtctgcgatacctgctacagcaaactgacaaagggacttgagacagatatgcatttttcagcgaaacgggctgctaccgtaccaggattcagtgatacaattgaggaggatctggaaacaaggtcaaatgctcaactatcaaggttgtcgtcaatggaatcttttaagcatttggatagcagatattccaagaaaaacaagaagtttgaatttaatagcacccgtgtttcccctgtgcccaatgggagttcacattggagtggactaaacatttcaagatctttcaatcctgtatttggatcttcaaagaagtttttctcagcatcagttcctggatcaagaattgtttctagggcaacatcacctatttcaagaagaacaagccctccacgatctacaacaccaacacctactctgggtggcctaacgtctcccagagttcccactgacggcaagccaacaaatgatgcattaagccaagaggttctgaatttgagatctcaggtggagagtcttaccaggaagtctcaactcctggagttggagctggaaagaactaccaaacaattgaaggaagctatttccattgccggcgaggaaactgcaaagtgcaaggcggcaaaggaagtaatcaagtcactcactgcacagttgaaggggatggcagagagattacctggaggagcagccaagaacactaagttgccacctcttcctggaatttccattccaagtgacatctcgtctttggctatggagagtgtgggcagcccaagcagctccggagaacaaatcataaatggtcataatggattgcttgcgtctaatggaccaagttctgttaggaataagacaagccatccagaagtgggtaagaatggaagtaggccgcctgatgctgaatcttgccatgatgctgaatgggtagagcaagatgaaccaggtgtttacattactctcaccgcgttgcctggaggcgccagagatctcaagcgggttcggttcagccggaagagattcagcgagacacaagcagaacagtggtggcaggagaaccgggcgagggtataccagcagtacaatgtccgcgtggttgacaaatcaacggccagtgccgacaatgacattgcagctaactgacactagactgacctggagaaacatacctgattacaagtggagctgaggccatgtaccctacctacgtgaaggctctctagtcagtcaagctgggttgctaacgtggctaccattttacctaggtggttttcgctcccaggaaaacaggaggtttttttaatccggttttacataattctttctcttactcccttctcttttctccttgtgtggaaagtagagtgcttgagcagaggtaatgtaaatgcttagtagaagcaggctaatctaccttgtaaatgcataagcaagcatcgattttagaatgtcttggaaattttctgatatggttgcaaatggcaaatctgggctaagtggtgatggtccctggcggttgtagtagaacctgtatgcatgaatctgaagcaatcacgagggctcaacacttgagtccgatcccatctgattggcttagactgtat

SEQ ID NO: 209665 - DNA, 400 bp, Zea Mays
ccgtgcttctctcgtggccttgggctccaccacctacaagcccgcgtcatctcgcaacccaaatctgcaaagctgccacgccccagcttcgcaccaccaacccgactcctcgacgcggagagcagattcgcgtgcaaaactccccgcgcgtccgccgccgaaagcccacgccccgacccgcaggtggctaacggctaaccccgaccacaccgacaactcagcgtcgagcggacttcactagctgagctaattctgcgcttgatttgcagggtgagaccgggccgaagggtggattctggaccaagtgtatggtggagaccgcggaggccgaggttcagggttagggaccggaaaaaagctcaacctcgacgaccgaggtcgagccctgtctgggagcggc

SEQ ID NO: 209666 - DNA, 1395 bp, Zea Mays
agtttaggaactatattaaatttgcaaaacaactgctaagtcaaatgaggtggatctgtttggcccaaacttgatggacgatttaattgatgcatctgcagcaactccagctacagacaatgctgcagaaccacaggttgatctgtttgctgatgcagattttcaatcggcaaccgcaagtacagagacagctgcaaatacagatgtcaaggcatcttttcctgcagcatttccaccacaggctgggtttattccaccaccaagtgccgggacatcttctgaagtaaatacttccgtatccaagaaggcagctccggaaccttttgatccttttggcgctattcctttgaacaattttgatggacctgacccatttggtggcttcagctcaaatgctggatcatctaccgcagcagcacccacccacggttctactggaaatatcagcacatcgaaccagaaccttcatgctgcatccgactttgctgcctttgtatcaaacaacgagggagcagcgaaagacccatttgatctttcttcgagtgccaatgttggaaaaacacctttggcagctcccaagatcgacgcatctgatttcggtgcatttgtatctagcaccgaggaagcagccaaggaccctctcgatctttcttcgggtagcaaccttggaaagacaggccaagcacccgcggcagcctccaagcctagcgcaaagaaagacaattttcaggtcaagtccggcatatgggcagactcgctgagccggggattgattgatctgaacataactgcaccgaagaaggtgaacctagctgatattggcatcgtcggtggccttggcgatgggtccgatgagaaggccctgccctcttggaccatgggcgccggatccggcctaggaatgtctggtattccaccgtcaacacaacaagctggtggcatcgagagcttggccaactacaacaagcatcatttcggcttcaaataggcctcgatctttcatactggaaaatacccgtcatctgcggtttcctcctctgtcggcctgcttcttacacgtgctgccctattgatttaatcacttttttgtttttggttttggtgatcacattacatggtgtcgaccaatcttggccccgtcttgtcacacgtgtatgttatttgtcgggtttgtgggtaagcatgcaactacatacacatcacaccccctgtgttccagctcgatgataggtggtatgttggccatgcagtttgtgtaaattccgtggcctgccttttctacttgatacagtactctacgcagcgatttgcagtgcttgagtttatattcaataataagagaacctatgccctttatgtcttgaattgtggctgatgctgtttgatgtatcactg

SEQ ID NO: 209667 - DNA, 1503 bp, Zea Mays
tattcactaagtagagcaaaaacagagttcaagggagatcacatgagtccctgggcttgtccttccacccaggaccttgttagtttaggaactatattaaatttgcaaaacaactgctaagtcaaatgaggtggatctgtttggcccaaacttgatggacgatttaattgatgcatctgcagcaactccagctacagacaatgctgcagaaccacaggttgatctgtttgctgatgcagattttcaatcggcaaccgcaagtacagagacagctgcaaatacagatgtcaaggtcaatgttgacctttttgcggaaaaggcatcttttcctgcagcatttccaccacaggctgggtttattccaccaccaagtgccgggacatcttctgaagtaaatacttccgtatccaagaaggcagctccggaaccttttgatccttttggcgctattcctttgaacaattttgatggacctgacccatttggtggcttcagctcaaatgctggatcatctaccgcagcagcacccacccacggttctactggaaatatcagcacatcgaaccagaaccttcatgctgcatccgactttgctgcctttgtatcaaacaacgagggagcagcgaaagacccatttgatctttcttcgagtgccaatgttggaaaaacacctttggcagctcccaagatcgacgcatctgatttcggtgcatttgtatctagcaccgaggaagcagccaaggaccctctcgatctttcttcgggtagcaaccttggaaagacaggccaagcacccgcggcagcctccaagcctagcgcaaagaaagacaattttcaggtcaagtccggcatatgggcagactcgctgagccggggattgattgatctgaacataactgcaccgaagaaggtgaacctagctgatattggcatcgtcggtggccttggcgatgggtccgatgagaaggccctgccctcttggaccatgggcgccggatccggcctaggaatgtctggtattccaccgtcaacacaacaagctggtggcatcgagagcttggccaactacaacaagcatcatttcggcttcaaataggcctcgatctttcatactggaaaatacccgtcatctgcggtttcctcctctgtcggcctgcttcttacacgtgctgccctattgatttaatcacttttttgtttttggttttggtgatcacattacatggtgtcgaccaatcttggccccgtcttgtcacacgtgtatgttatttgtcgggtttgtgggtaagcatgcaactacatacacatcacaccccctgtgttccagctcgatgataggtggtatgttggccatgcagtttgtgtaaattccgtggcctgccttttctacttgatacagtactctacgcagcgatttgcagtgcttgagtttatattcaataataagagaacctatgccctttatgtcttgaattgtggctgatgctgtttgatgtatcactg

SEQ ID NO: 209668 - DNA, 1873 bp, Zea Mays
gatctgttctttcaagttttgagtatgttgagcctaatggtaaagacgctggaataaatgtgaggaaaaaagtagaaaccattgtgggcatcataaatgacaaggagaaaataaaggccgtgagagataaagcagccagtaatcgtgataagtacattggactatcatccacaggcataacatataaatcaagctcagcctcatttggtagcaactgcagttcaggcgaacgttatgggagtatcagtggtacaaaggaagctgactcatacggtgatagttacagggacaaagaatctgttaaaacttccacaagcaatagcggcagtcggaaatttggcagcaagctgaggaaggatgcgaagcctgataggaggaatgaggattatagttcacccagctctttgagacccccatctaatacaaataacactgaggacgactttgatgacttcgatcctcgtggatcaaatggcaaaacaactgctaagtcaaatgaggtggatctgtttggcccaaacttgatggacgatttaattgatgcatctgcagcaactccagctacagacaatgctgcagaaccacaggttgatctgtttgctgatgcagattttcaatcggcaaccgcaagtacagagacagctgcaaatacagatgtcaaggtcaatgttgacctttttgcggaaaaggcatcttttcctgcagcatttccaccacaggctgggtttattccaccaccaagtgccgggacatcttctgaagtaaatacttccgtatccaagaaggcagctccggaaccttttgatccttttggcgctattcctttgaacaattttgatggacctgacccatttggtggcttcagctcaaatgctggatcatctaccgcagcagcacccacccacggttctactggaaatatcagcacatcgaaccagaaccttcatgctgcatccgactttgctgcctttgtatcaaacaacgagggagcagcgaaagacccatttgatctttcttcgagtgccaatgttggaaaaacacctttggcagctcccaagatcgacgcatctgatttcggtgcatttgtatctagcaccgaggaagcagccaaggaccctctcgatctttcttcgggtagcaaccttggaaagacaggccaagcacccgcggcagcctccaagcctagcgcaaagaaagacaattttcaggtcaagtccggcatatgggcagactcgctgagccggggattgattgatctgaacataactgcaccgaagaaggtgaacctagctgatattggcatcgtcggtggccttggcgatgggtccgatgagaaggccctgccctcttggaccatgggcgccggatccggcctaggaatgtctggtattccaccgtcaacacaacaagctggtggcatcgagagcttggccaactacaacaagcatcatttcggcttcaaataggcctcgatctttcatactggaaaatacccgtcatctgcggtttcctcctctgtcggcctgcttcttacacgtgctgccctattgatttaatcacttttttgtttttggttttggtgatcacattacatggtgtcgaccaatcttggccccgtcttgtcacacgtgtatgttatttgtcgggtttgtgggtaagcatgcaactacatacacatcacaccccctgtgttccagctcgatgataggtggtatgttggccatgcagtttgtgtaaattccgtggcctgccttttctacttgatacagtactctacgcagcgatttgcagtgcttgagtttatattcaataataagagaacctatgccctttatgtcttgaattgtggctgatgctgtttgatgtatcactg

SEQ ID NO: 209669 - DNA, 2565 bp, Zea Mays
gtatcctctcctctccggaactcctctctgctcacgagtaaagcctgccgctagcccgcgctctggacgtcgcctcctcccccaccccaccggctgtcgccgcccccgccgacgttacctccttacccgccgcaccccccccccccctgcccccccgtccttgccttggcggatctgcctgcctgtgccgcctggcgctgcctcttatcccgccggccgccgctgcctcacgttagctcctcccccatcgtatccggacctccgcgccgcccccacgcctccctgacttggtggatctgtccaccattcaccggaaacagttggtcgctgcctagcttgctgcagccactcctcgccggcgatggatttcatgaaggttttcgatcagactgtgcgtgaaataaagagggaggtcaatctgaaggtactcaaggtccccgagatcgagcagaaggtacttgatgcaacaagtgatgaaccgtggggcccccatggaagtgctctttcagaacttgcacacgctaccaagaagttcgctgagtgccagatggtaatgaatgtcctatggactaggttgtctgagagaggcgcgaattggcgtcatgtgtataaggcattaactattatcgagtactttatagccaatggttctgagagggcagttgatgacattcttgatcattattctaagatctcggttctttcaagttttgagtatgttgagcctaatggtaaagacgctggaataaatgtgaggaaaaaagtagaaaccattgtgggcatcataaatgacaaggagaaaataaaggccgtgagagataaagcagccagtaatcgtgataagtacattggactatcatccacaggcataacatataaatcaagctcagcctcatttggtagcaactgcagttcaggcgaacgttatgggagtatcagtggtacaaaggaagctgactcatacggtgatagttacagggacaaagaatctgttaaaacttccacaagcaatagcggcagtcggaaatttggcagcaagctgaggaaggatgcgaagcctgataggaggaatgaggattatagttcacccagctctttgagacccccatctaatacaaataacactgaggacgactttgatgacttcgatcctcgtggatcaaatggcaaaacaactgctaagtcaaatgaggtggatctgtttggcccaaacttgatggacgatttaattgatgcatctgcagcaactccagctacagacaatgctgcagaaccacaggttgatctgtttgctgatgcagattttcaatcggcaaccgcaagtacagagacagctgcaaatacagatgtcaaggtcaatgttgacctttttgcggaaaaggcatcttttcctgcagcatttccaccacaggctgggtttattccaccaccaagtgccgggacatcttctgaagtaaatacttccgtatccaagaaggcagctccggaaccttttgatccttttggcgctattcctttgaacaattttgatggacctgacccatttggtggcttcagctcaaatgctggatcatctaccgcagcagcacccacccacggttctactggaaatatcagcacatcgaaccagaaccttcatgctgcatccgactttgctgcctttgtatcaaacaacgagggagcagcgaaagacccatttgatctttcttcgagtgccaatgttggaaaaacacctttggcagctcccaagatcgacgcatctgatttcggtgcatttgtatctagcaccgaggaagcagccaaggaccctctcgatctttcttcgggtagcaaccttggaaagacaggccaagcacccgcggcagcctccaagcctagcgcaaagaaagacaattttcaggtcaagtccggcatatgggcagactcgctgagccggggattgattgatctgaacataactgcaccgaagaaggtgaacctagctgatattggcatcgtcggtggccttggcgatgggtccgatgagaaggccctgccctcttggaccatgggcgccggatccggcctaggaatgtctggtattccaccgtcaacacaacaagctggtggcatcgagagcttggccaactacaacaagcatcatttcggcttcaaataggcctcgatctttcatactggaaaatacccgtcatctgcggtttcctcctctgtcggcctgcttcttacacgtgctgccctattgatttaatcacttttttgtttttggttttggtgatcacattacatggtgtcgaccaatcttggccccgtcttgtcacacgtgtatgttatttgtcgggtttgtgggtaagcatgcaactacatacacatcacaccccctgtgttccagctcgatgataggtggtatgttggccatgcagtttgtgtaaattccgtggcctgccttttctacttgatacagtactctacgcagcgatttgcagtgcttgagtttatattcaataataagagaacctatgccctttatgtcttgaattgtggctgatgctgtttgatgtatcactg

SEQ ID NO: 209670 - DNA, 2174 bp, Zea Mays
cccggccagcgtctctctccgatccagctggtcagtagtgatcagtactagctagctactaccaccgcccccaaaaccattccacctctcaagaacagcgctctggcagcgctggtagtgtagcatcgcgcgttcatcactacgctactaggaatcatatatcatcatcggtcgagagagagagagagcaagcaagtttcctccggcggccggagggtacgtaatcgatcgccggccgccacagcaggatgagcaggatgggcggcaaggactgcgtgccccccgtcgccatggtgctcgtgcagctgggcttcgccgtcatgaacatcgtgtcgaagctggcgctggacgcgggcatgagcccctacgtgctcatcgcctaccgcaacctcatcgccgccgccgtcatctcccccatcgcctacttgcttgagaggtgtttcagttcatcgggtgcgtgcacgtcagttcattccagtgcgagcccacacacacgcacacacttgatcaggcaggcctactacgtacgtttcttcagtgcctttgcttgtgagataaggctgtgtgctttccattctgtttcgacaaaaaaagaggtttcttgaattcagcccgtcgacgtcgaccgactgttttgccaagtggaaaattttaatccattgctaataagctagctaattaacctcgccgtatagaaatttatagctgtggccgctcaataatcgatcgaaagaagcggggcgacgatcacaaagaaggtgctcctgcagatcttctgctcctccatcttcggggcaacgctgaaccaggtgctgttcgtcgtggggctcaagtccaccagcgcgaccgtggcgtgcgcgctcaccaacacgctgccggcgctgaccttcgtgatggcggcggcgctcaagatggagccggtgcggccgggcacggcggcggggcaggccaagctggtgggcacggcggtgtgcgtgggcggatccatgctcatacccttctacaagggccccgtcctcagggtgtgggcgtccccgatccactggcgcttcgcggagcacgcgtcgccccccgccgccgccgccgcggcaggcgcccacacgggccccgccgcggtgctcggggacgtcctcgtcatcgccagctgcgtcgcctgggccgtctggttcattctccacaccaagatctcccaggggttctccgcgccctacaccagcaccgccatcatgtgcctcatggcgggcgtgcagtgcgcgggcgtcagcgccgccctggaccggagcctcgccgtctggaagctcgggttcgacatcaggctctactccgtgctctacatcgggatcgttggctccggggccgggttcacgctcatgtcgtggtgcatccaggtgcgcggcccgctgtacgtgtccatgttcagcccgctgctgctcgtcatcgtcgccgtcgtcggctgggccatcctcggcgacaagatacgcctgggaagtgctatcggctccgtgctcatcgttgccgggctatacatggtgctctggggcaaaggaagggagatggacagaccgggcctcgacaacgacaaaggcgacgaggagaccgccgccgcattgggccttgcggtcgcaagcagcaagggtggtgcggtcgtcgtaagcagccgtgtcgacgccgtcagcagcctgccggtgttctccacaacaactagccccaagaggcagcaactcattcacggatgaaatagctagtgggtcggagttggaggaactggccggggcgaagacggcggcgaagattggattggaggggcataactacagacttgtgcacggttggttgcattgcagttgcatgcagcagcgtcagagtcgtgtggtctgttacaaagaggaagcaaacaaacaggagtgtgatgtggctgtactagtgcctagtggaagctggaagggttgcttgctaccttggatgatttcgtgctactgtcgttgggcttctctgtgtgcgctgcacttcacttgaatgatctgatttggttcctccaaaaagtctcaccataccattaattatcttcatcttcatgacattaagtacagtttctctttttactccttttttttttgcttgccacaggatcggttcacggaaaagaacagagggtacatttatttattctttgc

SEQ ID NO: 209671 - DNA, 1875 bp, Zea Mays
ccagcgtctctctccgatccagctggtcagtagtgatcagtactagctagctactaccaccgcccccaaaaccattccacctctcaagaacagcgctctggcagcgctggtagtgtagcatcgcgcgttcatcactacgctactaggaatcatatatcatcatcggtcgagagagagagagagcaagcaagtttcctccggcggccggagggtacgtaatcgatcgccggccgccacagcaggatgagcaggatgggcggcaaggactgcgtgccccccgtcgccatggtgctcgtgcagctgggcttcgccgtcatgaacatcgtgtcgaagctggcgctggacgcgggcatgagcccctacgtgctcatcgcctaccgcaacctcatcgccgccgccgtcatctcccccatcgcctacttgcttgagagaagaagcggggcgacgatcacaaagaaggtgctcctgcagatcttctgctcctccatcttcggggcaacgctgaaccaggtgctgttcgtcgtggggctcaagtccaccagcgcgaccgtggcgtgcgcgctcaccaacacgctgccggcgctgaccttcgtgatggcggcggcgctcaagatggagccggtgcggccgggcacggcggcggggcaggccaagctggtgggcacggcggtgtgcgtgggcggatccatgctcatacccttctacaagggccccgtcctcagggtgtgggcgtccccgatccactggcgcttcgcggagcacgcgtcgccccccgccgccgccgccgcggcaggcgcccacacgggccccgccgcggtgctcggggacgtcctcgtcatcgccagctgcgtcgcctgggccgtctggttcattctccacaccaagatctcccaggggttctccgcgccctacaccagcaccgccatcatgtgcctcatggcgggcgtgcagtgcgcgggcgtcagcgccgccctggaccggagcctcgccgtctggaagctcgggttcgacatcaggctctactccgtgctctacatcgggatcgttggctccggggccgggttcacgctcatgtcgtggtgcatccaggtgcgcggcccgctgtacgtgtccatgttcagcccgctgctgctcgtcatcgtcgccgtcgtcggctgggccatcctcggcgacaagatacgcctgggaagtgctatcggctccgtgctcatcgttgccgggctatacatggtgctctggggcaaaggaagggagatggacagaccgggcctcgacaacgacaaaggcgacgaggagaccgccgccgcattgggccttgcggtcgcaagcagcaagggtggtgcggtcgtcgtaagcagccgtgtcgacgccgtcagcagcctgccggtgttctccacaacaactagccccaagaggcagcaactcattcacggatgaaatagctagtgggtcggagttggaggaactggccggggcgaagacggcggcgaagattggattggaggggcataactacagacttgtgcacggttggttgcattgcagttgcatgcagcagcgtcagagtcgtgtggtctgttacaaagaggaagcaaacaaacaggagtgtgatgtggctgtactagtgcctagtggaagctggaagggttgcttgctaccttggatgatttcgtgctactgtcgttgggcttctctgtgtgcgctgcacttcacttgaatgatctgatttggttcctccaaaaagtctcaccataccattaattatcttcatcttcatgacattaagtacagtttctctttttactccttttttttttgcttgccacaggatcggttcacggaaaagaacagagggtacatttatttattctttgc

SEQ ID NO: 209672 - DNA, 1901 bp, Zea Mays
cgtctctctccgatccagctggtcagtagtgatcagtactagctagctactaccaccgcccccaaaaccattccacctctcaagaacagcgctctggcagcgctggtagtgtagcatcgcgcgttcatcactacgctactaggaatcatatatcatcatcggtcgagagagagagagagcaagcaagtttcctccggcggccggagggtacgtaatcgatcgccggccgccacagcaggatgagcaggatgggcggcaaggactgcgtgccccccgtcgccatggtgctcgtgcagctgggcttcgccgtcatgaacatcgtgtcgaagctggcgctggacgcgggcatgagcccctacgtgctcatcgcctaccgcaacctcatcgccgccgccgtcatctcccccatcgcctacttgcttgagagaagaagcggggcgacgatcacaaagaaggtgctcctgcagatcttctgctcctccatcttcggatacgcgtctggctgcatgcatggatgcagggcaacgctgaaccaggtgctgttcgtcgtggggctcaagtccaccagcgcgaccgtggcgtgcgcgctcaccaacacgctgccggcgctgaccttcgtgatggcggcggcgctcaagatggagccggtgcggccgggcacggcggcggggcaggccaagctggtgggcacggcggtgtgcgtgggcggatccatgctcatacccttctacaagggccccgtcctcagggtgtgggcgtccccgatccactggcgcttcgcggagcacgcgtcgccccccgccgccgccgccgcggcaggcgcccacacgggccccgccgcggtgctcggggacgtcctcgtcatcgccagctgcgtcgcctgggccgtctggttcattctccacaccaagatctcccaggggttctccgcgccctacaccagcaccgccatcatgtgcctcatggcgggcgtgcagtgcgcgggcgtcagcgccgccctggaccggagcctcgccgtctggaagctcgggttcgacatcaggctctactccgtgctctacatcgggatcgttggctccggggccgggttcacgctcatgtcgtggtgcatccaggtgcgcggcccgctgtacgtgtccatgttcagcccgctgctgctcgtcatcgtcgccgtcgtcggctgggccatcctcggcgacaagatacgcctgggaagtgctatcggctccgtgctcatcgttgccgggctatacatggtgctctggggcaaaggaagggagatggacagaccgggcctcgacaacgacaaaggcgacgaggagaccgccgccgcattgggccttgcggtcgcaagcagcaagggtggtgcggtcgtcgtaagcagccgtgtcgacgccgtcagcagcctgccggtgttctccacaacaactagccccaagaggcagcaactcattcacggatgaaatagctagtgggtcggagttggaggaactggccggggcgaagacggcggcgaagattggattggaggggcataactacagacttgtgcacggttggttgcattgcagttgcatgcagcagcgtcagagtcgtgtggtctgttacaaagaggaagcaaacaaacaggagtgtgatgtggctgtactagtgcctagtggaagctggaagggttgcttgctaccttggatgatttcgtgctactgtcgttgggcttctctgtgtgcgctgcacttcacttgaatgatctgatttggttcctccaaaaagtctcaccataccattaattatcttcatcttcatgacattaagtacagtttctctttttactccttttttttttgcttgccacaggatcggttcacggaaaagaacagagggtacatttatttattctttgc

SEQ ID NO: 209673 - DNA, 1946 bp, Zea Mays
cgtctctctccgatccagctggtcagtagtgatcagtactagctagctactaccaccgcccccaaaaccattccacctctcaagaacagcgctctggcagcgctggtagtgtagcatcgcgcgttcatcactacgctactaggaatcatatatcatcatcggtcgagagagagagagagcaagcaagtttcctccggcggccggagggtacgtaatcgatcgccggccgccacagcaggatgagcaggatgggcggcaaggactgcgtgccccccgtcgccatggtgctcgtgcagctgggcttcgccgtcatgaacatcgtgtcgaagctggcgctggacgcgggcatgagcccctacgtgctcatcgcctaccgcaacctcatcgccgccgccgtcatctcccccatcgcctacttgcttgagaggtgtttcagttcatcgggtgcgtgcacgtcagttcattccagtgcgagcccacacacacgcacacacttgatcagaagaagcggggcgacgatcacaaagaaggtgctcctgcagatcttctgctcctccatcttcggggcaacgctgaaccaggtgctgttcgtcgtggggctcaagtccaccagcgcgaccgtggcgtgcgcgctcaccaacacgctgccggcgctgaccttcgtgatggcggcggcgctcaagatggagccggtgcggccgggcacggcggcggggcaggccaagctggtgggcacggcggtgtgcgtgggcggatccatgctcatacccttctacaagggccccgtcctcagggtgtgggcgtccccgatccactggcgcttcgcggagcacgcgtcgccccccgccgccgccgccgcggcaggcgcccacacgggccccgccgcggtgctcggggacgtcctcgtcatcgccagctgcgtcgcctgggccgtctggttcattctccacaccaagatctcccaggggttctccgcgccctacaccagcaccgccatcatgtgcctcatggcgggcgtgcagtgcgcgggcgtcagcgccgccctggaccggagcctcgccgtctggaagctcgggttcgacatcaggctctactccgtgctctacatcgggatcgttggctccggggccgggttcacgctcatgtcgtggtgcatccaggtgcgcggcccgctgtacgtgtccatgttcagcccgctgctgctcgtcatcgtcgccgtcgtcggctgggccatcctcggcgacaagatacgcctgggaagtgctatcggctccgtgctcatcgttgccgggctatacatggtgctctggggcaaaggaagggagatggacagaccgggcctcgacaacgacaaaggcgacgaggagaccgccgccgcattgggccttgcggtcgcaagcagcaagggtggtgcggtcgtcgtaagcagccgtgtcgacgccgtcagcagcctgccggtgttctccacaacaactagccccaagaggcagcaactcattcacggatgaaatagctagtgggtcggagttggaggaactggccggggcgaagacggcggcgaagattggattggaggggcataactacagacttgtgcacggttggttgcattgcagttgcatgcagcagcgtcagagtcgtgtggtctgttacaaagaggaagcaaacaaacaggagtgtgatgtggctgtactagtgcctagtggaagctggaagggttgcttgctaccttggatgatttcgtgctactgtcgttgggcttctctgtgtgcgctgcacttcacttgaatgatctgatttggttcctccaaaaagtctcaccataccattaattatcttcatcttcatgacattaagtacagtttctctttttactccttttttttttgcttgccacaggatcggttcacggaaaagaacagagggtacatttatttattctttgc

SEQ ID NO: 209674 - DNA, 864 bp, Zea Mays
gtctagaagcttactcatgtacgctccttctcatgcaagaagacgtactcaatttctactctcttctatcagtctcctcactcctgtctctcatgtctccttttcctcccaccgttcctgtcacccacgcagcacgccggagcagctgtagcagtcgagctcggcatcagctcccttgctgctcactttgcagcacctcgccagctccctggtaacactctgcacctgccgtcgaactctctcaggttcggtcatccctgctcccttccaaatcaacgcccctccactcgactctactactgtgtcgtgcgcgcgcttcctcctgcttccgtcgctgggtgcgtgctcatcttccgtcgcgtgccacctggtcgatagaatgagcagtttggtcgtccccatctcgccgtggttcgtcctcaccatgttttcagatgtgtttgggctgagatgccattcgaaatcgatgatctgttcgtcgccaccggccgcaagcaccagttttgttgaacgccctagatacgtgattgaagatcctttgtggtgatgaaggtgaaatcagcatagcactcgccaagcattctacagaagagccctcaacagaaggagtgaagattcaagatgaagtggtagctgaagaggagtttgctctagtgcctgttcatcaagtggatgtagccatctaactgatcatcatggtagaagtatctagaacctcttctctgcaacaaaggcaagccccggtgcatttgccccttccttgtgttttaaatgctttatcaccttaaatgatgcattaggtgataggagttgtgtgatgaacaattgatgcattaccattccttggaatttgaatactatacc

SEQ ID NO: 209675 - DNA, 1403 bp, Zea Mays
cagacagcgaggctctcctcgcgccttccgcgtttccgttccgctccaaaacctggtggccttgggctggccgcgcccgcgacatatgcctcctactggcgaaccccatccacacgacacgacactgctcagccgccggcctgggttgacttgactcaggcggggacacgcacacgttcgttcttacgtgcttccgccggcgcgggttggcgtggcagtcgggctcggccctcagatcctccaaagattggattttggaggagtgcgctgttgtgttggtggcggagcttcctggcgttgactccgaccttgctgttcctagcagctcccacccaagaggcatcgcggcgaccggatcggtcgatgtgtcgccggtagattggccggcgtcagcggagggtggagatggggaactgcatggacaaagcggtgccggtggacaacacctcctatcaatcgaaagcagggagcaaatcaatttcatcgtccaacccttcgacggtcaagactggttcgactcggtcgacatggactgtagcctcatacaaagatagtcgagagcttcctactcctaggacagaaggggaaatcttgtcatcaccaaatttgaaggcattctcgtttggtgatctcagaactgcgtcgaggaacttcagatcagacagtcttcttggggaaggaggatttggctatgtgttcaaaggctggattgatgagcaaactcttgccccttcaaagccaggaagcggtatggttgttgccatcaagaagctaaaaccagaaggttttcagggccacaaggagtggctgacagaggttgactaccttggccaacttcaccaccagaatcttgtcaaactcattggttattgcacagatggtgatcaccgacttctggtgtatgagtacatgcctaaaggaagtttggaaaatcatctattcagacgaggtgcggatcctttatcctggggaacaagactcaaagttgcaattggggctgctaagggtttatcatttctgcatgatgctgagaaccaagtcatatatcgtgatttcaaggcatcaaacattctccttgactcggagttcaatgcaaagctttcagactttggcttggcaaaagcaggtccaactggggacaggacccatgtttctacacaggtcatgggcacaagaggttatgcagctccagaatatgttgcaacaggtagtgtttggttccggagccagttgggatggagcggctctgagccaaggagcgtctccatccggaagattttagggagccagatggttaaacatttgagcataatattctttttagagccactctatcttacatgaaaccaattgaaacaacaacaaattggaagcggagcgactccgttccactagactctgga

SEQ ID NO: 209676 - DNA, 2519 bp, Zea Mays
gtgactgcaaggcggccagagagagagagaggccgcacgaaatccaaagcagctaggccagatcggcgaagggagtgagtgacgccactcagagcttgctcgagccaccaaagaggccaagagcttagcttttacctaaagcagctgaggtacctcaccatcaccaccaccgacaccaactgcgccgaggccggaggcggagtagagccagaccagaatggtattggggggaggccctctaggcgccatcattggccgctacccctcctcctccgccgccgccggtgacgatgaacaaggggacccgggacccggaggaggcgtcattcgccatgaccgcaagtgccgggactggcccttcctcgtcctcttcgccgccttctgggttgccatgattgtcaactccagcttcggattcaaccagggcaacccactcaggctgacatacggactggactacaaagggaacatatgtggcagcaggcatgccgatcctgatttgtatcagttagatgttcgctattgggtgaaccccaaccaggtctaccaaagtggcctcaaaaccagtcacatcgagctacctgatgctaaaaccatctgcctgatggaatgcccacttcctgccgaagatggcttgaattttgtttgtgattatccagaaggtgacatacgcctctctgtcgacgactggattgacagggactacgattacttcgagtacctcacaccagacatgaggaatagttctcttcagctgcagggtccatgttaccctgtcatatttccaagtgtaaatgtctactggagctgccagtttattgcacgggcatccaatgcctctttaaagcattggaaggacatgggtggtgtcaccatcgacgaaaacatgctaatagacagaacaattcatgatgcaattaatagcaaatctgccgtcatgaaggagataaatcaccttcatgctgcttccgtcttgatgacagtgataatgatacttgctttcctgacttcaatagctatcgctcggcgcattatgaaagcaacatcagtcctaaaggttgctgcaaaggtcgttggcgaagtgcaggcacttattatttttccagtcgtgccatacttgatcctcgctatcttttacactttctggttttcagcagcacttcatcttttcagcgccggtcaagttatacaaaatgattgcaatacagattgctgttcctacgatctgaaacttggcaaagtaaattgtgacagatgttgtggctacactatccattacaccccacatattggcatcgccattcttttccatctttttggctgttactgggcaacacagtttttcatcgggtgttcttcgactataattgccggatcggttgcttcatactactgggcacgcggtgaaatatcgcacgatatccctttccataccgtggtatcttccctgaagcgcttgttgcgctatagcctgggatctgtggctctgggctcactgatagtgtccatcgtagagtgggtgcgattcatactagaatcactacgccgcaggctgaaatttgttgactctgcccgcggaagccggttcgggaagacggtatcatcctcatcccagtgctgcttaggctgcatcgattggaccctgaaatcggtgaatcgaaatgcctatgtcatgattgccatcacagggaaaggattctgcaaggcttccgtgctagcgactgggctgatcatgaacaacgtgttgcgcgtcgggaaggtgaatgtcattggggatgtgatcctcctgttgggcaaactttgtgttagcctgttgtgtgcgctgtttgccttccttatgctggacgagcacaagtacagatctgggcataacaagatctcatcaccgctggtccccgtgctgctgtcgtgggcgctgggctatatagttgcgaagcttttcttcgcagtggtggaggtgtcgatcgacacaatggtcctgtcattctgccaggactcggaagagcatcaggggaacgcgcggtatgctcccccgctgctgatggagacattggacgaggagagcgagttgcgaaggctgacacaggggccatgatcgatcttccaaataggagacactgaactgaatggctgtgatgttggttgcatgtcttttttatatgaatcatcactggggttgatggatggagctataggtgcaagcatgtctttttatatgtatcagctaaatacgaggaatagaatagaatagggcttagtgctggaattgaaacccaccgtctgtaatgtatgttcggctttatttgatatgtcttttttgtttatatattgttagactatgtgtgtggaccgacaccactgttgggctgccgacccattagggttagggttgtgagtctatatattgcactctatcttatatcaatacatcaaccaatttaggacttgttcggttagctctcaatccatgtggattgagtgagattcatggattgagtgggattggatgtgtttaaatc

SEQ ID NO: 209677 - DNA, 2684 bp, Zea Mays
cgagcctgcggccactaaatgtcctcgaaactgaaccaccacgaactgtctatctgcatccatctcttggccacacccactgaccgcgccacaccacacctgtggctctccgcctcgagatgctttacacggtgtagctggcaagaagccaggaaccttccctgttccctcccgggcgcaaaggggctcacttttaatttcctcgagaggggactgcctcctttctccggcggcaagccttctcctgccttgttgcctgccactcgggctgtcctccttcttgattcttggcaccgtcggtttaatttcgcgaaatggcggcaggggtgtcgctcaagatggccggcttctgcgtcgtctgggcgctattctggctcgccggctccgccaccgtgagcacgagcaccaccgccttcgccggcggcgaggcggtggtcatggacgcgcggtccgtcgtcgccgtcaccgacaacgacttcgtttgcgccacattggactggtggctgccggagaagtaggactacgacacctgcagctgggggctggcctccctgctcaacctgcgttctcccccttgaagctccgcctgggcggctctctgcaagacatgtacgacaccggcgacgctcgccagccctcctgcgccccgttcgcgaagaacgcgtcggccatgttcggtttctcgcaaggctgcctgccgctgcgtagatgggacgagctcaacgccttcttccagagaaccggggcaaagattgttttcgggctgaatgctctgaatggccgggtccccatgcctgatggctctctaggggggccatggaactgaactaccacgaacgcggcttctttcattggctacaccgtgagcagaggatacgatgtacatggatgggagctcggaaacgaactgagcggcagcggagtcggagctcgggtcgacgcagaccagtacgcagcagacgtgatcgcgctgaaacgcatcatcgacagcacctaccaccagagcagcagcccggcaaagcctctggtgctcgcgccaggaggcttcttcgacgcggcctggttcacggagctcgtcggcaagacgaagccggagcagatggacgtgatcactcaccacatctacaatctaggccccggggtcgacgatcatctggtccagaagatccttgacccttcttacctcgacggcgaggccagcacgttcagcgatcttgaggggatactgaggtctgcaggtacgtccaccgtcgcctgggttggcgaggccggaggggcttacaacagcggtcgccaccttccacatgattggttggtgtactaagaagcgtatggcgcgagccagcctcgtcgagcagagaagctcgctctctggatctccacgtatgcaggctgaaggtgagaaatataactgagttgtatgtgtgtgtacgaactcgggtcattacatgcaggtaatcaatcacaagcacatacggcgtgattggttgctttctcgaagcagcctgcccgctcgggccagcttccgttgagcctggccgcccagagacggaaatgaatcatgtttcccacgggcctggctcggagcgttctgctgcatctctcgggccaaatcagcacacttacccaccaaccaaacagacgtactttggatacgtagatgcagcagatggtcaacgcatctggtgagtctggacgcgcagcaaccaaacacgcggcttgtgactgatgcgtttgtgttcagcttctggtacctggatcagcttgggatgtcgtccaagtacggtacgaagagttactgcagacagaccttggttggagggaactatggcctgctcaacacgactacgtttgaaccgaaccctgactactacaagtggactagccatgcataacgctctactgtggcaccgcctcatgggcaccaaggtcctctctgcgacgttcaacggcacgaacaagatccgcgcctacgcacactgcgcgaagagatcgggaagggtcctctgctcctgatcaaccttgacggcaacagcacgaaccgcatccacgtcacgagccaaggcgcacaggcacagagtgcgcggagggagagagcggggggacgcctggtcgcttccctttccctgcgcttggcggagcagccgagctgctcgcaacaagagaggagtaccacctcgctcccaaggacggcgatctgcagagccagcaggtgctgctgaacggccatgttctggcaactgacgccgacggggacatcccagagctggagcccgtgcgggtggatggaacgcagccggtaaccgtggtccgtgggcccttactcgatcgtgttcgctcacatccccggcttctacgctcctgcctgtagctagaatttttacaccccagccttttccttcctggtgtgtatcataggttcggataaatccgggcgaacggcgaagcttgttcgcctgtccgtgcgtgaagtaaagctgcgaggctgaaaggtgtgcgatttgtcattgtttgggaaacaagtgttcggataatgtgtgagcaaaggggaggaaagtggagatgaaaataataaaaggaaaaaaaaggtttcgaatttttctctatgtctctgtcgttttggttgagaaagcagaaaaggcgacagttgcctcgcaaattcgcaatggaagccatgcctgatg

SEQ ID NO: 209678 - DNA, 2823 bp, Zea Mays
ctcgaaactgaaccaccacgaactgtctatctgcatccatctcttggccacacccactgaccgcgccacaccacacctgtggctctccgcctcgagatgctttacacggtgtagctggcaagaagccaggaaccttccctgttccctcccgggcgcaaaggggctcacttttaatttcctcgagaggggactgcctcctttctccggcggcaagccttctcctgccttgttgcctgccactcgggctgtcctccttcttgattcttggcaccgtcggtttaatttcgcgaaatggcggcaggggtgtcgctcaagatggccggcttctgcgtcgtctgggcgctattctggctcgccggctccgccaccgtgagcacgagcaccaccgccttcgccggcggcgaggcggtggtcatggacgcgcggtccgtcgtcgccgtcaccgacaacgacttcgtttgcgccacattggactggtggctgccggagaagtaggactacgacacctgcagctgggggctggcctccctgctcaacctgcgttctcccccttgaagctccgcctgggcggctctctgcaagacatgtacgacaccggcgacgctcgccagccctcctgcgccccgttcgcgaagaacgcgtcggccatgttcggtttctcgcaaggctgcctgccgctgcgtagatgggacgagctcaacgccttcttccagagaaccggggcaaagattgttttcgggctgaatgctctgaatggccgggtccccatgcctgatggctctctaggggggccatggaactgaactaccacgaacgcggcttctttcattggctacaccgtgagcagaggatacgatgtacatggatgggagctcggaaacgaactgagcggcagcggagtcggagctcgggtcgacgcagaccagtacgcagcagacgtgatcgcgctgaaacgcatcatcgacagcacctaccaccagagcagcagcccggcaaagcctctggtgctcgcgccaggaggcttcttcgacgcggcctggttcacggagctcgtcggcaagacgaagccggagcagatggacgtgatcactcaccacatctacaatctaggccccggggtcgacgatcatctggtccagaagatccttgacccttcttacctcgacggcgaggccagcacgttcagcgatcttgaggggatactgaggtctgcaggtacgtccaccgtcgcctgggttggcgaggccggaggggcttacaacagcggtcgccaccttccacatgattggttggtgtactaagaagcgtatggcgcgagccagcctcgtcgagcagagaagctcgctctctggatctccacgtatgcaggctgaagggtcaacgcatctggtgagtctggacgcgcagcaaccaaacacgcggcttgtgactgatgcgtttgtgttcagcttctggtaagccacagccacccaagagtttatcatccgaggaagaagaagaagcgtgtaactatcgactggtgtctggtggtgctgcaggtacctggatcagcttgggatgtcgtccaagtacggtacgaagagttactgcagacagaccttggttggagggaactatggcctgctcaacacgactacgtttgaaccgaaccctgactactacaagtggactagccatgcataagtttctctctctcttctctcacaaagctgggatactgagtgataagagagggagaaattgtgtgctcaatcccgccatgaaaacctagcatctttctgctttagggggtttttggttagggggactaaagattagtctctagtttttagtctcatttagtccattttttgccaaacactatgactaaaatatagactaaaatgatttagtctttagtccttcacatatgtgctaaaagagattaaatcatattaatttcacttttacccctcatttagttcaattgtactaatagtaggagaatgttaaaggtcattttagtcttcttacgagtcatttagtatattcttactatttttatcccatagaatcaaaaatgttagggactaaactttagtcccctaactaaactttagtccctagactaaagaaaccaaacatgaccttaattttctctgtagcgctctactgtggcaccgcctcatgggcaccaaggtcctctctgcgacgttcaacggcacgaacaagatccgcgcctacgcacactgcgcgaagagatcgggaagggtcctctgctcctgatcaaccttgacggcaacagcacgaaccgcatccacgtcacgagccaaggcgcacaggcacagagtgcgcggagggagagagcggggggacgcctggtcgcttccctttccctgcgcttggcggagcagccgagctgctcgcaacaagagaggagtaccacctcgctcccaaggacggcgatctgcagagccagcaggtgctgctgaacggccatgttctggcaactgacgccgacggggacatcccagagctggagcccgtgcgggtggatggaacgcagccggtaaccgtggttcggataaatccgggcgaacggcgaagcttgttcgcctgtccgtgcgtgaagtaaagctgcgaggctgaaaggtgtgcgatttgtcattgtttgggaaacaagtgttcggataatgtgtgagcaaaggggaggaaagtggagatgaaaataataaaaggaaaaaaaaggtttcgaatttttctctatgtctctgtcgttttggttgagaaagcagaaaaggcgacagttgcctcgcaaattcgcaatggaagccatgcctgatg

SEQ ID NO: 209679 - DNA, 2693 bp, Zea Mays
acagaatcttggtgaataccgtcaaagcgttctcccccttgaagctccgcctgggcggctctctgcaagacatgtacgacaccggcgacgctcgccagccctcctgcgccccgttcgcgaagaacgcgtcggccatgttcggtttctcgcaaggctgcctgccgctgcgtagatgggacgagctcaacgccttcttccagagaaccggggcaaagattgttttcgggctgaatgctctgaatggccgggtccccatgcctgatggctctctaggggggccatggaactgaactaccacgaacgcggcttctttcattggctacaccgtgagcagaggatacgatgtacatggatgggagctcggaaacgaactgagcggcagcggagtcggagctcgggtcgacgcagaccagtacgcagcagacgtgatcgcgctgaaacgcatcatcgacagcacctaccaccagagcagcagcccggcaaagcctctggtgctcgcgccaggaggcttcttcgacgcggcctggttcacggagctcgtcggcaagacgaagccggagcagatggacgtgatcactcaccacatctacaatctaggccccggggtcgacgatcatctggtccagaagatccttgacccttcttacctcgacggcgaggccagcacgttcagcgatcttgaggggatactgaggtctgcaggtacgtccaccgtcgcctgggttggcgaggccggaggggcttacaacagcggtcgccaccttccacatgattggttggtgtactaagaagcgtatggcgcgagccagcctcgtcgagcagagaagctcgctctctggatctccacgtatgcaggctgaaggtgagaaatataactgagttgtatgtgtgtgtacgaactcgggtcattacatgcaggtaatcaatcacaagcacatacggcgtgattggttgctttctcgaagcagcctgcccgctcgggccagcttccgttgagcctggccgcccagagacggaaatgaatcatgtttcccacgggcctggctcggagcgttctgctgcatctctcgggccaaatcagcacacttacccaccaaccaaacagacgtactttggatacgtagatgcagcagatggtcaacgcatctggtgagtctggacgcgcagcaaccaaacacgcggcttgtgactgatgcgtttgtgttcagcttctggtaagccacagccacccaagagtttatcatccgaggaagaagaagaagcgtgtaactatcgactggtgtctggtggtgctgcaggtacctggatcagcttgggatgtcgtccaagtacggtacgaagagttactgcagacagaccttggttggagggaactatggcctgctcaacacgactacgtttgaaccgaaccctgactactacaagtggactagccatgcataagtttctctctctcttctctcacaaagctgggatactgagtgataagagagggagaaattgtgtgctcaatcccgccatgaaaacctagcatctttctgctttagggggtttttggttagggggactaaagattagtctctagtttttagtctcatttagtccattttttgccaaacactatgactaaaatatagactaaaatgatttagtctttagtccttcacatatgtgctaaaagagattaaatcatattaatttcacttttacccctcatttagttcaattgtactaatagtaggagaatgttaaaggtcattttagtcttcttacgagtcatttagtatattcttactatttttatcccatagaatcaaaaatgttagggactaaactttagtcccctaactaaactttagtccctagactaaagaaaccaaacatgaccttaattttctctgtagcgctctactgtggcaccgcctcatgggcaccaaggtcctctctgcgacgttcaacggcacgaacaagatccgcgcctacgcacactgcgcgaagagatcgggaagggtcctctgctcctgatcaaccttgacggcaacagcacgaaccgcatccacgtcacgagccaaggcgcacaggcacagagtgcgcggagggagagagcggggggacgcctggtcgcttccctttccctgcgcttggcggagcagccgagctgctcgcaacaagagaggagtaccacctcgctcccaaggacggcgatctgcagagccagcaggtgctgctgaacggccatgttctggcaactgacgccgacggggacatcccagagctggagcccgtgcgggtggatggaacgcagccggtaaccgtggtccgtgggcccttactcgatcgtgttcgctcacatccccggcttctacgctcctgcctgtagctagaatttttacaccccagccttttccttcctggtgtgtatcataggttcggataaatccgggcgaacggcgaagcttgttcgcctgtccgtgcgtgaagtaaagctgcgaggctgaaaggtgtgcgatttgtcattgtttgggaaacaagtgttcggataatgtgtgagcaaaggggaggaaagtggagatgaaaataataaaaggaaaaaaaaggtttcgaatttttctctatgtctctgtcgttttggttgagaaagcagaaaaggcgacagttgcctcgcaaattcgcaatggaagccatgcctgatg

SEQ ID NO: 209680 - DNA, 1650 bp, Zea Mays
cagaatcttggtgaataccgtcaaagcgttctcccccttgaagctccgcctgggcggctctctgcaagacatgtacgacaccggcgacgctcgccagccctcctgcgccccgttcgcgaagaacgcgtcggccatgttcggtttctcgcaaggctgcctgccgctgcgtagatgggacgagctcaacgccttcttccagagaaccggggcaaagattgttttcgggctgaatgctctgaatggccgggtccccatgcctgatggctctctaggggggccatggaactgaactaccacgaacgcggcttctttcattggctacaccgtgagcagaggatacgatgtacatggatgggagctcggaaacgaactgagcggcagcggagtcggagctcgggtcgacgcagaccagtacgcagcagacgtgatcgcgctgaaacgcatcatcgacagcacctaccaccagagcagcagcccggcaaagcctctggtgctcgcgccaggaggcttcttcgacgcggcctggttcacggagctcgtcggcaagacgaagccggagcagatggacgtgatcactcaccacatctacaatctaggccccggggtcgacgatcatctggtccagaagatccttgacccttcttacctcgacggcgaggccagcacgttcagcgatcttgaggggatactgaggtctgcaggtacgtccaccgtcgcctgggttggcgaggccggaggggcttacaacagcggtcgccaccttccacatgattggttggtgtactaagaagcgtatggcgcgagccagcctcgtcgagcagagaagctcgctctctggatctccacgtatgcaggctgaagcgctctactgtggcaccgcctcatgggcaccaaggtcctctctgcgacgttcaacggcacgaacaagatccgcgcctacgcacactgcgcgaagagatcgggaagggtcctctgctcctgatcaaccttgacggcaacagcacgaaccgcatccacgtcacgagccaaggcgcacaggcacagagtgcgcggagggagagagcggggggacgcctggtcgcttccctttccctgcgcttggcggagcagccgagctgctcgcaacaagagaggagtaccacctcgctcccaaggacggcgatctgcagagccagcaggtgctgctgaacggccatgttctggcaactgacgccgacggggacatcccagagctggagcccgtgcgggtggatggaacgcagccggtaaccgtggtccgtgggcccttactcgatcgtgttcgctcacatccccggcttctacgctcctgcctgtagctagaatttttacaccccagccttttccttcctggtgtgtatcataggttcggataaatccgggcgaacggcgaagcttgttcgcctgtccgtgcgtgaagtaaagctgcgaggctgaaaggtgtgcgatttgtcattgtttgggaaacaagtgttcggataatgtgtgagcaaaggggaggaaagtggagatgaaaataataaaaggaaaaaaaaggtttcgaatttttctctatgtctctgtcgttttggttgagaaagcagaaaaggcgacagttgcctcgcaaattcgcaatggaagccatgcctgatg

SEQ ID NO: 209681 - DNA, 591 bp, Zea Mays
caaagctctgccaggacaaacggtaggttgctccgtatggttgatgggttgaacttcaaggatttcgttgcgtttctttctacattcagtgcaaaagccagccttcgtcagaagatcgagtttatattcaaggtttatgacatcgatggcaagggaaaaattaccttcaaggatctgctagaggttttacgggacctaacagggtcattcatgtccgaggaacaaagagagcaagtggtaactgaagttctggaagaagcagggtacacgagggattacgcattctcgcttgaagattttatccagatcatcgaccatcctggccttaagatggaggtggaagtgccaatcgactagtgaaatgtggaaaacaagcttccggttttgtctgcagaacatggttagtgtcgtgtagcagggcaatatgaccgttcactttcgtcatcttctttgtttccggtccacttgcctaaacttttgtaacctttgttgacttggccttttcgaatatatcaaaaacaaaacaaattttgccctgctacttggagtgaacgatctttgtcgttttataggaagttttcttggtcctgg

SEQ ID NO: 209682 - DNA, 849 bp, Zea Mays
ctccggcaaccgggaattttggcatgagaatatgcggccgtggcgtggcgtcgtctgtgactgtcgtcccgtgccctcgcgtccctttcccttcttcccatccacgccagccaagttcaccgccgcgctcttcggcggcaactactgttggatcgtagggcgaaggaaggaaggaaggggagccatgggaaacgcgtcgtccatgctgacccagtacgacatcgaggaggtgcaggagcactgcagctacctcttctcgcagcaggagatcgtgtcgctgtacgagcgcttctgccagttggaccgcagcgccaagggcttcatctccgaggacgagttcctctccatccccgagttctccctcaacccgctctccaagttatattcaaggtttatgacatcgatggcaagggaaaaattaccttcaaggatctgctagaggttttacgggacctaacagggtcattcatgtccgaggaacaaagagagcaagtggtaactgaagttctggaagaagcagggtacacgagggattacgcattctcgcttgaagattttatccagatcatcgaccatcctggccttaagatggaggtggaagtgccaatcgactagtgaaatgtggaaaacaagcttccggttttgtctgcagaacatggttagtgtcgtgtagcagggcaatatgaccgttcactttcgtcatcttctttgtttccggtccacttgcctaaacttttgtaacctttgttgacttggccttttcgaatatatcaaaaacaaaacaaattttgccctgctacttggagtgaacgatctttgtcgttttataggaagttttcttggtcctgg

SEQ ID NO: 209683 - DNA, 919 bp, Zea Mays
cagaggctcggtgtctccggcaaccgggaattttggcatgagaatatgcggccgtggcgtggcgtcgtctgtgactgtcgtcccgtgccctcgcgtccctttcccttcttcccatccacgccagccaagttcaccgccgcgctcttcggcggcaactactgttggatcgtagggcgaaggaaggaaggaaggggagccatgggaaacgcgtcgtccatgctgacccatctcgcagcaggagatcgtgtcgctgtacgagcgcttctgccagttggaccgcagcgccaagggcttcatctccgaggacgagttcctctccatccccgagttctccctcaacccgctctccaagaggttgctccgtatggttgatgggttgaacttcaaggatttcgttgcgtttctttctacattcagtgcaaaagccagccttcgtcagaagatcgagtttatattcaaggtttatgacatcgatggcaagggaaaaattaccttcaaggatctgctagaggttttacgggacctaacagggtcattcatgtccgaggaacaaagagagcaagtggtaactgaagttctggaagaagcagggtacacgagggattacgcattctcgcttgaagattttatccagatcatcgaccatcctggccttaagatggaggtggaagtgccaatcgactagtgaaatgtggaaaacaagcttccggttttgtctgcagaacatggttagtgtcgtgtagcagggcaatatgaccgttcactttcgtcatcttctttgtttccggtccacttgcctaaacttttgtaacctttgttgacttggccttttcgaatatatcaaaaacaaaacaaattttgccctgctacttggagtgaacgatctttgtcgttttataggaagttttcttggtcctgg

SEQ ID NO: 209684 - DNA, 1355 bp, Zea Mays
ccaattcccagcggaaaacccccagccccctagcctcctagcaccttctcctgtccttctaaccctagccgcccaagcccaccagccgccgctagctgctgccgttctccactctccacggaccatggctccacggccagccgccaaccaccaggccacggccgagcagggcgccaagcacctaggccggccgagcggtgcgccgagcgcccgagcacccaggccaccgcccgccgcaccagagcggccaacggggcgccgagccgagcagagtttcaacagtgttcctgaccgtgtgttcttgatccaggtggctgccagcaagacgaagatctacatggtgcttgagctcgtcaacggcggcgagctgctggacaggattctatactacgtgtctgattcccctcctgtcgcttcccttttgctgcaacggcaactgaccagcaggcggccagtgagggaaagctcccggagcaggaggcaaggaggctcttccagcacctgattgtactttacttggagctttatgcaagctgtgtggagtacatcacgccgctaagagacagcatgtcatcagtgtttccctcagcacatttagcttttgccagcatcgacctgaatgcacacactgtctttgcgatcacaacggccttggcaattctccaaacagtctgtctcaggaacctcagtctcctctcgtatctttctgctgacggtgtgatggcgacaattgcagtcatcctctgcctgttctgggttgcctgttctgggttgtgagaaacactttcacctaaactcgtgcactgtactttcctttggccaacccaactgaacaagttgcttgatggtttacaggctctgatactcccatgtgcgtgctacctctccatcaagaagggcgcagtgccattgtgggagatcatcctgtgcatagtcatcataatgatcggcgtcgtatgtgcatgcgtgggatcatacacctcagtcagccagatgattagcagcaccaaatagcgcacgctagctgatatttatctagtgtctacggatccttccaaatgctttgacagagttggaactggcagcttttcgtagctaagtttatttgttccttctttatggcagaaatttggtaagagagagtttagttgtgggaggacaggcggcgaaggagtaatctgagtttagtgtggtgcttttgtgactgatcatctctggagcttttgtgaatgatctagctagctatctgtaaatgatctagttgtgaatgatattataattgtgatgcttttgtgaatatataattgtggtgcttttgtatttatgtgatggatctatgactgtggtatactgat

SEQ ID NO: 209685 - DNA, 1169 bp, Zea Mays
gcatccccaattcccagcggaaaacccccagccccctagcctcctagcaccttctcctgtccttctaaccctagccgcccaagcccaccagccgccgctagctgctgccgttctccactctccacggaccatggctccacggccagccgccaaccaccaggccacggccgagcagggcgccaagcacctaggccggccgagcggtggctgccagcaagacgaagatctacatggtgcttgagctcgtcaacggcggcgagctgctggacaggattcaggcggccagtgagggaaagctcccggagcaggaggcaaggaggctcttccagcacctggtcctttcctctactctactctactcactcactcatcactcccaggcggccaaacagctccccagattgtactttacttggagctttatgcaagctgtgtggagtacatcacgccgctaagagacagcatgtcatcagtgtttccctcagcacatttagcttttgccagcatcgacctgaatgcacacactgtctttgcgatcacaacggccttggcaattctccaaacagtctgtctcaggaacctcagtctcctctcgtatctttctgctgacggtgtgatggcgacaattgcagtcatcctctgcctgttctgggttgcctgttctgggttgctctgatactcccatgtgcgtgctacctctccatcaagaagggcgcagtgccattgtgggagatcatcctgtgcatagtcatcataatgatcggcgtcgtatgtgcatgcgtgggatcatacacctcagtcagccagatgattagcagcaccaaatagcgcacgctagctgatatttatctagtgtctacggatccttccaaatgctttgacagagttggaactggcagcttttcgtagctaagtttatttgttccttctttatggcagaaatttggtaagagagagtttagttgtgggaggacaggcggcgaaggagtaatctgagtttagtgtggtgcttttgtgactgatcatctctggagcttttgtgaatgatctagctagctatctgtaaatgatctagttgtgaatgatattataattgtgatgcttttgtgaatatataattgtggtgcttttgtatttatgtgatggatctatgactgtggtatactgat

SEQ ID NO: 209686 - DNA, 1167 bp, Zea Mays
cacgggccacctagcatcccgctcccacggtccccgcatccccaattcccagcggaaaacccccagccccctagcctcctagcaccttctcctgtccttctaaccctagccgcccaagcccaccagccgccgctagctgctgccgttctccactctccacggaccatggctccacggccagccgccaaccaccaggccacggccgagcagggcgccaagcacctaggccggccgagcggtggctgccagcaagacgaagatctacatggtgcttgagctcgtcaacggcggcgagctgctggacaggattcaggcggccagtgagggaaagctcccggagcaggagctccccaggtgctaattccttatgccgaatgcctgcaggttctgcagaacagaggattgtactttacttggagctttatgcaagctgtgtggagtacatcacgccgctaagagacagcatgtcatcagtgtttccctcagcacatttagcttttgccagcatcgacctgaatgcacacactgtctttgcgatcacaacggccttggcaattctccaaacagtctgtctcaggaacctcagtctcctctcgtatctttctgctgacggtgtgatggcgacaattgcagtcatcctctgcctgttctgggttgcctgttctgggctctgatactcccatgtgcgtgctacctctccatcaagaagggcgcagtgccattgtgggagatcatcctgtgcatagtcatcataatgatcggcgtcgtatgtgcatgcgtgggatcatacacctcagtcagccagatgattagcagcaccaaatagcgcacgctagctgatatttatctagtgtctacggatccttccaaatgctttgacagagttggaactggcagcttttcgtagctaagtttatttgttccttctttatggcagaaatttggtaagagagagtttagttgtgggaggacaggcggcgaaggagtaatctgagtttagtgtggtgcttttgtgactgatcatctctggagcttttgtgaatgatctagctagctatctgtaaatgatctagttgtgaatgatattataattgtgatgcttttgtgaatatataattgtggtgcttttgtatttatgtgatggatctatgactgtggtatactgat

SEQ ID NO: 209687 - DNA, 1838 bp, Zea Mays
ccacgggccacctagcatcccgctcccacggtccccgcatccccaattcccagcggaaaacccccagccccctagcctcctagcaccttctcctgtccttctaaccctagccgcccaagcccaccagccgccgctagctgctgccgttctccactctccacggaccatggctccacggccagccgccaaccaccaggccacggccgagcagggcgccaagcacctaggccggccgagcggtggctgccagcaagacgaagatctacatggtgcttgagctcgtcaacggcggcgagctgctggacaggattcaggcggccagtgagggaaagctcccggagcaggagctccccaggtgctaattccttatgccgaatgcctgcaggttctgcagaacagagggtacgacggctgaaatacacacaatttagttgaatttaagttatgcctagtgtgctatggccactagtttgaatttaagttagatttaaaggttacacacaatttactagttttattatctgaatggttgaattggtctcgtactactgtacataatgacagctgaaatacatcatgtctctaccactttagcctttcgttttttatacactaatactgatctacatggactgcaatagtattcacaccacagtgaatgttgagcgtttattcagtaacactaatataggcaagaggtatatgtatttcataggcaaaagtaacactgaagacataggcaagaagtataggcaacaataacactgatatacttagagggaaaagggtatatgtatttctagcccttttataacagtcatttctagcagttttagcaaatgactggttcagtgtgtatttatatagcagtttcagttttatagcagttttagttctagcacttttagcaaatgtatatatatatatatatatatttcatagcagtttcatagcccagccgccgcggcctccggctgggcacgaggcccagttgcccgacaggccgtccagggcgtgcctgagaatacagatttgtcttcgaaaatcatctcacctgttttcttttttgcagattgtactttacttggagctttatgcaagctgtgtggagtacatcacgccgctaagagacagcatgtcatcagtgtttccctcagcacatttagcttttgccagcatcgacctgaatgcacacactgtctttgcgatcacaacggccttggcaattctccaaacagtctgtctcaggaacctcagtctcctctcgtatctttctgctgacggtgtgatggcgacaattgcagtcatcctctgcctgttctgggttgcctgttctgggctctgatactcccatgtgcgtgctacctctccatcaagaagggcgcagtgccattgtgggagatcatcctgtgcatagtcatcataatgatcggcgtcgtatgtgcatgcgtgggatcatacacctcagtcagccagatgattagcagcaccaaatagcgcacgctagctgatatttatctagtgtctacggatccttccaaatgctttgacagagttggaactggcagcttttcgtagctaagtttatttgttccttctttatggcagaaatttggtaagagagagtttagttgtgggaggacaggcggcgaaggagtaatctgagtttagtgtggtgcttttgtgactgatcatctctggagcttttgtgaatgatctagctagctatctgtaaatgatctagttgtgaatgatattataattgtgatgcttttgtgaatatataattgtggtgcttttgtatttatgtgatggatctatgactgtggtatactgat

SEQ ID NO: 209688 - DNA, 1951 bp, Zea Mays
ccacgggccacctagcatcccgctcccacggtccccgcatccccaattcccagcggaaaacccccagccccctagcctcctagcaccttctcctgtccttctaaccctagccgcccaagcccaccagccgccgctagctgctgccgttctccactctccacggaccatggctccacggccagccgccaaccaccaggccacggccgagcagggcgccaagcacctaggccggccgagcggtgcgccgagcgcccgagcacccaggccaccgcccgccgcaccagagcggccaacggggcgccgagccgagcagagtttcaacagtgttcctgaccgtgtgttcttgatccaggtggctgccagcaagacgaagatctacatggtgcttgagctcgtcaacggcggcgagctgctggacaggattgcggccagtgagggaaagctcccggagcaggagctccccaggtgctaattccttatgccgaatgcctgcaggttctgcagaacagagggtacgacggctgaaatacacacaatttagttgaatttaagttatgcctagtgtgctatggccactagtttgaatttaagttagatttaaaggttacacacaatttactagttttattatctgaatggttgaattggtctcgtactactgtacataatgacagctgaaatacatcatgtctctaccactttagcctttcgttttttatacactaatactgatctacatggactgcaatagtattcacaccacagtgaatgttgagcgtttattcagtaacactaatataggcaagaggtatatgtatttcataggcaaaagtaacactgaagacataggcaagaagtataggcaacaataacactgatatacttagagggaaaagggtatatgtatttctagcccttttataacagtcatttctagcagttttagcaaatgactggttcagtgtgtatttatatagcagtttcagttttatagcagttttagttctagcacttttagcaaatgtatatatatatatatatatatttcatagcagtttcatagcccagccgccgcggcctccggctgggcacgaggcccagttgcccgacaggccgtccagggcgtgcctgagaatacagatttgtcttcgaaaatcatctcacctgttttcttttttgcagattgtactttacttggagctttatgcaagctgtgtggagtacatcacgccgctaagagacagcatgtcatcagtgtttccctcagcacatttagcttttgccagcatcgacctgaatgcacacactgtctttgcgatcacaacggccttggcaattctccaaacagtctgtctcaggaacctcagtctcctctcgtatctttctgctgacggtgtgatggcgacaattgcagtcatcctctgcctgttctgggttgcctgttctgggttgctctgatactcccatgtgcgtgctacctctccatcaagaagggcgcagtgccattgtgggagatcatcctgtgcatagtcatcataatgatcggcgtcgtatgtgcatgcgtgggatcatacacctcagtcagccagatgattagcagcaccaaatagcgcacgctagctgatatttatctagtgtctacggatccttccaaatgctttgacagagttggaactggcagcttttcgtagctaagtttatttgttccttctttatggcagaaatttggtaagagagagtttagttgtgggaggacaggcggcgaaggagtaatctgagtttagtgtggtgcttttgtgactgatcatctctggagcttttgtgaatgatctagctagctatctgtaaatgatctagttgtgaatgatattataattgtgatgcttttgtgaatatataattgtggtgcttttgtatttatgtgatggatctatgactgtggtatactgat

SEQ ID NO: 209689 - DNA, 829 bp, Zea Mays
gaaagagtactagcttcatactgcttttcatattactcggttagcatgtatgctgctgcaataggctacaaactttttcctttacaattttgagaccttgtgctcttttctgttcttttttttggctatatatatatatatatatatataaatcaacccactgctgcgttcaacacgcttcacctacagtacactctgcatgttgacatttttttttgtgtgtgtctgatcttgccacatgatataccttgagatcctttagcaactattttatgctgcaaaccatgtggatacataggacagaagcctgcatacatattataaaaaagagaaatctgtgctatctatttaggtcttcgtgttcccaaattttgattttactggtatcagaagttgggttctttagcccaatacattgcctggtttaagacaccaaacgaaatcttgttcatcgctgtatggtacacctctagtcatatgcaggctgacatgtgaaccatttcgcttcagatttctgagattatgagccgatttgagagaaaaggctataagcttgttgccatcaagctgattgttccatccaaagaatttgctgagaagcactaccatgatctcaaggaaaggcctttcttcagtgggttgtgtgattttctcagctctggccctgtgcttgcaatggtttgggaaggagagggtgtcatcaagtatgggagaaaactaattggtgccacagacccacagaaatctgaaccaggaaccatcaggggcgatcttgccattgttgttggaagaattcctttgtactcacatgccaccgcttgaacaccag

SEQ ID NO: 209690 - DNA, 345 bp, Zea Mays
tgatgacctgaaatttatgtttggctacttattcttagttagccttcgagagaaagctttggcatcattttctgctctttcaagttgcttttattagtcaatcacaggggcaccttcattgtatcagtgaattggttaaaggtagcgatttcagcttccctggtctatccatctgggttctcgaggactacgactcagtagagtgggttctgaagcatagtctgagcttttagcagctggtcgaaggaatcgatgctccattttttactataatattgttggctttcatttagattgcaatctaatttattttgttcattgctcagactagaaactgagatcata

SEQ ID NO: 209691 - DNA, 1884 bp, Zea Mays
catctatctcatcaccatatgtatatatatatatatatatctatctatctatctacagagatgagacctagcagcgcatcttctcctcgacctgtatcgacacgttcagtccaccaccatcatatccttaagggaagagatcatcatattctcaagggaagggaagagatggagcagctacctgacgatatgcttgtggaaatcctgagccgcctcccgcccagcagcctagcggcgtcacgctgcgtctccaagcacttgtgctccatcgtggacgcccgacgtctcctgcgcaccggccacctccttcctctccgcctcgacgccttctactgcatcagcctggcctcggtcgatcgggagacatatcttttcgcacggccatcggtagcgcgtcggatccccggcgcctgccttgacttcagggtagatcttgaggttgtggatcactgcaacggtctactgttgctgtgtgacatggttttcaggttgctgaaccctgccacacggcaatcggcagccctgcctaaagccccggatccatccattgagaacatgcttggggtcgccacagtttgggccgggacagcgccgcaccgccccccattttacttgtttacagactttaatcttgtgtacgaccccatggccgagtcgccggagcatttcgaggtatttctgatccccgtgttattgtgcggccatagtggtttgatgtccgacaatatcaccatcaaccttgaggagcaagaatggccgccatcgacatacagaacccacgtcttctcgtcgaggagctggaggtgggaggagaggtcctgggtccgccaaggggagcctacggggaccatggccgatatgctgcgatctgagcatggttggaatcacaaggctgtttattttcgaggagcactctatgtgcattattcaaatgaatctgtcatgaggatatccatatccaaggacaggaatacgtatcaaatgatgagacttccagcaatacggagcaaacagatagttaagcgtgctaccttttacttgggaaaatctgagaaaggagtatattgtgcgttgttttattgggcccaggatgacagcgacccccagtttcgagtctggtctcttatggaggaagagatgaatggacgtgatggacaaattcatatgaagtggttgataaagactagcatcagccttaaacccctgctggcacaacttcatcattgtggtcacgacttgactccagatgaatggaggatcatctataaccgccatgaccgtgaccttgttggttcgtctgcacaagatgatattgatgatgaatgggactttgaaaatgctcatgagattgtccttgaagcacctaacaatgttaatgactggtgtcttgctcgacaaagcacgacgagagcaagccatgccatcaggtggccggcacatccattgctgttgccggtgcccaacaacataccaccaccaagctgctctggctgctctgggctgagaaggagtacacgagcccggaccgataacgaagatcatcgctactctgttaacaaagatcatactgtcgtagatcgcccttcactctgcgattaattagtctttgttcgcgacgcgactgttcgtgagtctgtgtgttcacaaccatcaccaacgactagccagtcaacctcctcgatcagtgtcgtagatgccacagtggcaagagcaaggcgcgccctcgagcgcctattccgggtgctcgacaataggaggtgtcaccatctctcaagtgaccaattaataactttttatcaccgtcatttgcggttcttctccctagcttcatgccttgacctcacctcatgtagtcatttccatcttgttgtgtgggattggatt

SEQ ID NO: 209692 - DNA, 1201 bp, Zea Mays
cctccctgcgttcccccaccaccacggcggcagccactggttggcagcggttgtccttctccggtgtccatggcgccgccgctcgcgacacgcggcctccccctcgcctcccgcggcccgccttcttgcgcggcctcctgctcctcgtgcctgccctcgtatctccagctcggtcgccggccaagccgccggttccgctgctcctcgccacaggtcgatgcagcggcggtgccgccggggaagggcggggagtaccggccctctttcgcggacgacctcctcctcgccttcttccggagcaagatggtgaaggaggttggatgggattctgaaaagcctgggtatgctggactaatggaggtagcaaaccgtctcatggtcaagggaaagagtgctttggagactgagcaggctgctgtccgagtactacagtcactgtttccacctctcttgcttgttctttacaaagctcttttagcgccaattgctaatggccaactagccgctatgatgcttgggcgacagcaatttcatgtcaatggttgatgggctcatgctcagttaattcagtcactctgcctgatggaaaatcatggtcaagtggggtgttcgttgagaaatgcaagtacctggaagagagcaagtgccttggcatttgcatcaacacatgcaaactgccaactcagactttcttcaaagatcacatgggtgttgatttgtacatggagccaaattttgaagactatagctgccagttcaacttcggggtgccgcctccacctcttgatactgacaaagccctcaaggaaccgtgcttggacatctgcacaaacgcaaggcggcgtagagagctcggaagaaatagcagcccagatgagctcagttgcccccaagtttgatatgctccctgtaaaagactgcacatcatagattattgcgcgttgggcttgggcatggtgtgccttgcttgcatttgtcagtcttcgtgcaacgatgtcaagtaatttcggtaataccatttctatgttgcagacacacacgttttcgattggatcaacatgactacatgagtaaataactctcagtctgatccatcagatcaacacccaatgaaacatcacagtgatctggatacaagttcactgggtatacaaaggaacatatacatagcaaatctgccattttacagggcaaacttaaa

SEQ ID NO: 209693 - DNA, 961 bp, Zea Mays
ctcgtacatatgaatactgcgtcatcctgctcccgatcgccatcaccttctacacgacatggtggttcatccgcttcgtcgacggcttcttctcgcccatctacgtccatctcgggatacacctcttcggcctcgggtttgtcacctccatcaccttcatcttcctcgtcggcgtgttcatgtcgtcgtggctgggcgcctcgctcctcggcctcggcgagttcttcatcaagaggatgccgctcgtgcgccacatctactcggcttccaagcagatcagcgccgcgatatcgccagaccagagctcaagagccttcaaggaggtggtgatcatccggcaccccaggatcggcgagtacgcgctgggcttcatcacgtcgacggtggcgctgcgaggcgccggcgtccgcggcgaccaggacctcgcctgcgtctacgtgcccaccaacaacctctacctcggcgacatcttcctcatgagccgcgccgacgtcatcgtcccggacctctccgtccgggaggccatcgaaatcatcctctcgggcggcatgtcggtgccaaagatcatatcggcggtggagggggctgtcggcctcggcgactatgaccgggcagtgaaggactcctagctcacgcttctttcttctctttatcacaatcttaggttgctcttcgaggttctgcatgttctagattgcaggttttaggcaacgttctccacttttcatcagttataggaaaatatattttggtatctagcaaacttgtgctaagtttgctatataaattctttcatgcgagttctggtatgaactgacaaagcattgtttcgataggtaaacagtttaagtttacatttatacttacgacctgtatgtttagttcaagaattgtaacgtaaataacaacagtaatgattcatgctcgagtgacagcggtaacaaatttaaatagatcaata

SEQ ID NO: 209694 - DNA, 1402 bp, Zea Mays
acccgcacagattcggctcaacaggcaacagcaccagcgctcgaacgccgcgtccaggcaacccatccttccgaccccgagcgatcccgccgcctcccgcgtctagccgtcgacgagcaccgcagcctgacacagccgcgggcgaaccatcgcgtgcggcctcgcccgggatggcgaccatggagagcctgatcgggctggtgaaccgtatccagcgcgcgtgcaccgtcctcggcgaccacggcggcggcggcggcgagggctccctctgggaggcactcccctccgtcgctgtcgttggtgggcagagttccgggaagtcgtcggtgctcgagagcatagtggggagggacttcctgccccgtggatctggcattgtcacgaggcggcctttagtgctgcagctccacaagacagatggtgggcacgagtatgctgagttcctccacgccccgcggaagcgtttcaccgactttgctgctgtgaggaaagagattgctgatgaaacagatcgcataactgggaaaactaaagctatttcaaacgttcccatccatttgagtatatattcaccacatgttgttaacttgacacttatcgatcttcctggactgacaaaggtcgctgtagaggggcaaccggaatctattgttcaagatattgaaaacatggttcgagcttatgttgacaagccaaattgcatcatcttggctatctccccagctaaccaagatattgcaacgtcagatgctatcaagcttgctagggatgttgatccttcagagaaagcagctgataagaacactccagtgagtgataggtatcaggacaatcatctcagaagaatcggatcgaatgtgtcatcttatattaacatggtctgtgagactctaaggaacacggttccgaaagccatcgtgcattgccaagtgaaagaagcaaaaagaaatttgcttaaccgtttctatgctcatgtgggaagcaaggagaagaaacagctgagcgcgatgttggatgaggaccccgctttgatggagaagagggatgccttggtcaagaggctagagctgtacaaatctgcaaggaatgagatcgactcggtcgcatggaaatgattggcttgtgacagctacatctggaatgtatgtaaaatgtacaaccgcagcagcacacgtgtgattgcagtagaatgttcaattcttttttacatttgaatttactctggaggccttgtacgcagttttcactcgagtctttgccggacatgcttatttggccgtcttggccttaacacgattgtgttatgcgtggatgatctggtctccggttgatataagagtgtatatgtattcttttgttgattttattactgccttgatgatatcaatagtttttaccacaa

SEQ ID NO: 209695 - DNA, 2434 bp, Zea Mays
tattgggccctcataccgggccccggtgccattctcaccgttctcgaaaccccgtgtacacgtagcagggccacgggccacctccctacggaggagacgaccccccatcccagaggtcgagggctcctctctctctaccatctccgttcgatcccatcgccccgccgccgccatggcgtttctcgcgcgggcgctgcggcagtccaactggcgcctgtcgtcgcgctgccccgccgtggctgcctcctgccgttggatctccccgaccgccgccgcgggttcgccggaggccggcgcagcggtggcgcctgccgacctggagctgcctccgccgcgggagcccgttggaggcgcccgcgtggagcttcctcccaacccggaggacgcgctcgaggtattcgtggatggccatgcggtgcggatccccaaggggttcaccgtgctccaggcctgcgaggtcgccggcgtcgacatcccgcgcttctgctaccatagccgactctccatcgctggaaactgccgcatgtgtctcgtcgaggtcgagaagtcgcccaagcccgtcgcttcctgtgccatgcccgcgctcccagggatgaagattaagacaaacaccccagtggcaaagaaggcaagggagggtgtcatggagttcttgctgatgaaccatccactcgactgcccaatctgtgatcagggcggcgagtgcgacctccaggatcagtctatggcatttggtgctgaccgcggtcggttcactgagatgaagcgttcagttgtggacaagaatttgggtcccttggttaagacagtgatgactcgttgcatccaatgtacaaggtgtgtaaggtttgctactgaggttgctggagttcaagaccttggtatgttaggtcgtggcagtggtgaagaaattggaacatatgttgagaaacttatgacaagtgagctatctggaaatgtcattgatatctgccctgttggtgctcttacatccaagccatttgcatttaaagctcggaactgggaacttaagggcacagagactattgatgttactgatgcagtgggatccaacataagaattgacagcagaggacctgaagttatgcgcgttgttccacgtctcaatgaggacattaatgaggaatggatatcggataagacacgattttgttatgatggtttgaagaggcaaagactaaatgaccctatgatccgtggtcctgatggcaggtttaaggctgtgacgtggcgtgatgctcttgcagttattgctgaggttttgcatcaagttaagccggaagaaataactggagttgctggaaaactttctgatgcagaatccatgatggcactgaaagattttgttaacagaatgggttccgataaggttctctgtgagggaaatggtcccaatcctccagcagacctgcgatctaactacctaatgaataccagcattgctgggcttgaaaaggctgatgtgttccttttggttggcactcagccaagggtggaagctgctatggttaatgccaggattcggaagactgttaaagcaacacaagcaaaggtgggctacattggtcctccagctgacttcaactatgatcatgagcatcttggcacaggaccacagacccttgttgagattgcagagggtagtcaccctttctgctcagtactgcaatccgctaagaaccctgtcatcattgctggagctggattatttgaacgagaagaccaagttgccctattctcaacgattgagactgtagccaagaagttcaatgtgatgagaccagactggaatggccttaatgtcttgttgctccatgctgcacaggcggcagctcttgatcttgggcttgttgctaatcctgccgagagcatcaagtcagcgaagttcctgtatctgatgggagctgatgatataagcctggaaaagcttccagatgacgcatttgttgtttatcaaggacaccatggtgacaagggtgtctatagggccaatgttatcctgccatcttcagcattcagtgagaaggaaggcacctacgagaatactgaaggatgcacccagtggaccatcccagctgttccgacggttggtgatgctagggatgactggaagatcatccgcgctctttctgaggttgctggggctcagctgccttatgacagcctctcagctgtgagggaccggatcagtacggttgcaccaaatctagtacatgtagacgagagggagacgcccacaatctctgcggaggttaagccgcctgtgaagcaacaagtcagctcgacaccattcaaagctgttgtggagaacttctacatgactgatgcaatcacccgagcttcaaagatcatggcccagtgcagtgcaaccttgctgaagaaggcttctcgtcaaacttgagcgcgggaacgg

SEQ ID NO: 209696 - DNA, 1758 bp, Zea Mays
cggttctaccgtcaacgcgccgcggattccccgccctcctccccgtctgctccccgccatcaacgcgcacgcgacctctgctctccgccatcaacgctcactgcatgcctcaccctctccccgccatcaacgcgccgcagatcccccaccctctccccgccatcaacgcgcaagcggatgccacggatccgcctatccgccataaacgccgatccatagatccacgctcgccctgcctcctacgacaccaaccgaaccctcaacctctcctacgacaccttctccagcccgctccccgacgacatcgagcgcctggctttcacagcggcgggacatggaggatgaacgagcaccgggagagagtcggttagatctaaatttccgtggaggtgagcttggacgaggtcagtgcaatcgcaggttcaaacaggcatatctctgaacaccttgggttctctaggctatgagatagatcatggatcgagatggagaatagcagtgtgtcattctaaactgggtgatcagccgaaaagatcccatggataatcattaatgattatgtgccaggttgtttctaatttaacagagggagggaaccaacaaaggcactccatgggggaatggttgtggccaggtttgttaatggtgttgcggctgcaagcgtcgtgtggcatctgtcgcgaccaagcattacgagacagtctcctccagcgctttgcactgctcctatcaaggtcactcttattggcagtctagaaatgccaaaggatgacatatggcttgtcacagctatcctatctggtctcattgaataatgtgcgaagatataagtcacatctttcttggcctcctatcttcgcctccagctgggatgagtctgtctcattacgatggggtgatcttgggctttctgtttcacatatcttcaggcctgtgcctggatgctgtaccatgcttggtcctatgaatattgaagtaaagcaacggaaagttgtagctgttggtaggaaacggactgcacggccaacagaaaatacctgtcctgaagaggcgaaagaagagcgcaaaattggaaaaccttgtgttgaataggctttcatttgcccaaacagttgaaaatgtttttgcactatctttcttagtgaaagatggtagggtggaaataactgtagatgatagcgggcatatagtacggccaaggaatgcacctgctgctagcgctatagcctcaggagaagtctcatacagtcattttgtttttagatttgacttgaaggactggaagcttatgaaagaagttgttacagagggagaagagctgttgccacataggacttcccagagcaatctttgcaacgaagaaaacgaccaaccaaatctggagttccaggccccgttgcagctgggagtggttttatactcgctgatgacatcaagtcttaggtgcttccattgatcaatgactcagggaaatatggagggatcatgatgtggttcaagtactatgatgatcaagatggctacaattcttgagtgaagagtgatgtttaggttgttgtctgtggtgtgtgacaatatctgtgtgttacttgtgtgtatgtgagaaattatgtgactctggagtctggatagtgcaataagtattactcaagtatatgattgaatcttatgtcatactattcaaattatgtcatatgtatcttttaaggtatgtaaacatccacttttagcgatgttaacaaaagaatagaacaataa

SEQ ID NO: 209697 - DNA, 1790 bp, Zea Mays
cggttctaccgtcaacgcgccgcggattccccgccctcctccccgtctgctccccgccatcaacgcgcacgcgacctctgctctccgccatcaacgctcactgcatgcctcaccctctccccgccatcaacgcgccgcagatcccccaccctctccccgccatcaacgcgcaagcggatgccacggatccgcctatccgccataaacgccgatccatagatccacgctcgccctgcctcctacgacaccaaccgaaccctcaacctctcctacgacaccttctccagcccgctccccgacgacatcgagcgcctggctttcacagcggcgggacatggaggatgaacgagcaccgggagagagtcggttagatctaaatttccgtggaggtgagcttggacgaggtcaggttcaaacaggcatatctctgaacaccttgggttctctaggctatgagatagatcatggatcgagatggagaatagcagtgtgtcattctaaactgggtgatcagccgaaaagatcccatggataatcattaatgattatgtgcttgatcaaacgagaggtactgtcatatccagccaggttgtttctaatttaacagagggagggaaccaacaaaggcactccatgggggaatggttgtggccaggtttgttaatggtgttgcggctgcaagcgtcgtgtggcatctgtcgcgaccaagcattacgagacagtctcctccagcgctttgcactgctcctatcaaggtcactcttattggcagtctagaaatgccaaaggatgacatatggcttgtcacagctatcctatctggtctcattgaataatgtgcgaagatataagtcactggctatcaatttctgtgaatcagatctttcttggcctcctatcttcgcctccagctgggatgagtctgtctcattacgatggggtgatcttgggctttctgtttcacatatcttcaggcctgtgcctggatgctgtaccatgcttggtcctatgaatattgaagtaaagcaacggaaagttgtagctgttggtaggaaacggactgcacggccaacagaaaatacctgtcctgaagagcttgctgagtcttcagaggaagtaaagacagacactgacaggaatgtcttagttatgtttgatatcctcaggcgaaagaagagcgcaaaattggaaaaccttgtgttgaataggctttcatttgcccaaacagttgaaaatgtttttgcactatctttcttagtgaaagatggtagggtggaaataactgtagatgatagcgggcatatagtacggccaaggaatgcacctgctgctagcgctatagcctcaggagaagtctcatacagtcattttgtttttagatttgacttgaaggactggaagcttatgaaagaagttgttacagagggagaagagctgttgccacataggacttcccagagcaatctttgcaacgaagaaaacgaccaaccaaatctggagggaaatatggagggatcatgatgtggttcaagtactatgatgatcaagatggctacaattcttgagtgaagagtgatgtttaggttgttgtctgtggtgtgtgacaatatctgtgtgttacttgtgtgtatgtgagaaattatgtgactctggagtctggatagtgcaataagtattactcaagtatatgattgaatcttatgtcatactattcaaattatgtcatatgtatcttttaaggtatgtaaacatccacttttagcgatgttaacaaaagaatagaacaataa

SEQ ID NO: 209698 - DNA, 1795 bp, Zea Mays
cggttctaccgtcaacgcgccgcggattccccgccctcctccccgtctgctccccgccatcaacgcgcacgcgacctctgctctccgccatcaacgctcactgcatgcctcaccctctccccgccatcaacgcgccgcagatcccccaccctctccccgccatcaacgcgcaagcggatgccacggatccgcctatccgccataaacgccgatccatagatccacgctcgccctgcctcctacgacaccaaccgaaccctcaacctctcctacgacaccttctccagcccgctccccgacgacatcgagcgcctggctttcacagcggcgggacatggaggatgaacgagcaccgggagagagtcggttagatctaaatttccgtggaggtgagcttggacgaggtcaggttcaaacaggcatatctctgaacaccttgggttctctaggctatgagatagatcatggatcgagatggagaatagcagtgtgtcattctaaactgggtgatcagccgaaaagatcccatggataatcattaatgattatgtgcttgatcaaacgagaggtactgtcatatccagccaggttgtttctaatttaacagagggagggaaccaacaaaggcactccatgggggaatggttgtggccaggtttgttaatggtgttgcggctgcaagcgtcgtgtggcatctgtcgcgaccaagcattacgagacagtctcctccagcgctttgcactgctcctatcaaggtcactcttattggcagtctagaaatgccaaaggatgacatatggcttgtcacagctatcctatctggtctcattgaataatgtgcgaagatataagtcacatctttcttggcctcctatcttcgcctccagctgggatgagtctgtctcattacgatggggtgatcttgggctttctgtttcacatatcttcaggcctgtgcctggatgctgtaccatgcttggtcctatgaatattgaagtaaagcaacggaaagttgtagctgttggtaggaaacggactgcacggccaacagaaaatacctgtcctgaagagcttgctgagtcttcagaggaagtaaagacagacactgacaggaatgtcttagttatgtttgatatcctcaggcgaaagaagagcgcaaaattggaaaaccttgtgttgaataggctttcatttgcccaaacagttgaaaatgtttttgcactatctttcttagtgaaagatggtagggtggaaataactgtagatgatagcgggcatataggccaaggaatgcacctgctgctagcgctatagcctcaggagaagtctcatacagtcattttgtttttagatttgacttgaaggactggaagcttatgaaagaagttgttacagagggagaagagctgttgccacataggacttcccagagcaatctttgcaacgaagaaaacgaccaaccaaatctggaggtacgtgcacaaataatgcctatcaggaagaagagctcgtgcttatctgaacttccagttgtgccagcggagtagggctgtaattataaattgtttgaagttctggtcacatcttgcaactacagaatggtgtttgtagggctgagtgtaactagctagcttggctcgtgttgggtcattaagggtgtgtttggttggatgtatatggagggatggaaagggacgaccacatattctatagtgtttggattagagtcgcgtggggcgagataaacatcggagtaattttttggtggcggtgtgattcaaaaatttgactactt

SEQ ID NO: 209699 - DNA, 1768 bp, Zea Mays
cttttctgtcccagaatttcccagaaaaaatcccattgtcatctctgctatagacattgtagcgaggaaaaataggggagcagagcaaggtgatgtgctgaagagtttctttatgcgggttgctatgacggatcaaacatcaaatatgaaaaagcaagcattaaataagataatttgctactgaagttcaaaatgactggtagccaaccaaaaacagtacttatttttaaaaaaggaaccagctaaaagcaaactctgaggcaacacgttacaccagtgcggcgcggtgacgaatatacgagtgggatccatttcatacagcagggcgcaccagactcatcttcaggaattggagccagtgctactgttatttctgcttataaccttatcatggcagttcatgtattggttcacaatgagccggtaacgcctgacgtaccatgtcgaacttccccagaaacttctttttttttttggaaaaatttcccaaaaaaacttagaagcacttcatgtggacaatgcccggaccagtttcgtcatactctcccttggagatccacatctgccaacacatgctgagagaagccaaaatagagccaccgatccagacactgtacttcctttcaggtggcgcaatcactttaaccttcatgctgctaggagccagggacgtgatctccttgctcatacgatcggcaatcccagggaacatggtagatcccccactgaggacaacgttaccatacaaatccttcctgatatcaacatcacacttcatgatggagttgtacgtggcctcatggacgccaggcgattccatgccaacaagggatggttggaacagcacctcggggcacctaaacctttctgacccaatggtgatgacctgaccatcaggcatctcgtagctcttctcgacagaggagctgctcctggcagtctccagctcctgttcataatcaagggcaacgtaggcaagcttctcctttatgtccctgacaatctcccgctcagcgctcgtagtgagggagtaccctctctctgtgaggatcttcattaggtggtcggtgaggtcacgccccgcaagatccaaacggagaatagcatgaggaagtgtgtatccttcatagattggaaccgtgtggctcacaccatcaccggaatccatcacaatacattgctgggcattcgaaggtttcaaacataatctgcgtcattttctctctgttggccttggggttgagaggggcctcggtcagcagcacagggtgatcttcaggcgaaacacggagctcgttgtagaaggtgtgatgccagattttctccatgtcatcccagttgttgacaatgccatgctcaatcgggtacttcagtgtcaggatgcctctcttggcctgagcctcatcacctacgtaggcatccttttggcccatgccgaccatgacaccggtgtggcgtggtcttcccacaatgctggggaagacagctcttggcgcatcatcaccagcgaaaccggcctgtaaatattgaggagttgagcaacaattaggtcacaggagtagagttgctttgttggaaaagacttctgaacgagataacaaccttgaccattccagtgccattgtcacatacgataggctggatatcctcgtcagccattctcaactattctgtaacagaccaaagttcagcgttcagtacacattcatagaaaaatgcagttatgcagcctggtcggggaatcaaaatacactttctgctcatggtt

SEQ ID NO: 209700 - DNA, 1571 bp, Zea Mays
cagtgatccagtccgtggccgtggcgtgctggaccggcggctaggcgggcacgtcagccgccagctaagcgaccaactcttcaaaaccccggtctctccctcgagcagtcgagctcctccggtctctgccatgaacagcaaatgagcagagctcccaagccgttcaatctccagatcatttccctctcgtcctgctccaatccactcgccggccatctccacaggctcgcctcggctgctgcagctgggttttgctccctgagccgccggatttcgacaggggtcgggtcggccgtccgatggggagcagggtgaaggaggacgagaggaacgagaagatcatccggggtctgctcaagctccctggcaaccgccggtgcatcaactgcaacagcctggggccacaatatgtatgcacaagcttctctactttcatctgtactaattgcagcgggatacaccgagagttcagtcatcgtgtaaaatcagtatcgatggctaaattcacttcccaagaagtttcggcacttcaggaagggggcaatgagcgtgctaaggaaatctatttcaagcattgggacttgcaaggccctgttattgacagtagtgatgtacatagactcagaaatttcatcaagaatgtatatgttgaacggagatattcagaccaaagaattggcgaacatttagcgcaagcaaagaaaccatcatcttcgaggaccgacgatcccagccctgcaacattcaaagatgctaaattatatatgtcaaaaaatctgattgacttcgattcagatctggaacctcctcaaggtgttgctcagactgatattcagaagggctcttcacctcaaacagatgttggttgggcaacttttgatgatgctacatccaaaaaaactacaaccatgccttcaacttccagtactaattttttggagggtccaatgctacagatcgccgatttgacatcagcaccacaaattagattttcaaatgccaagtccttgtcttttgccccgtcaaatcgtggaaaccaactgaaccaacagaatttctctcctgtgaatactacacagtacagcaatactctgttgaacagagctactagtgctccagtgcatagccaggatatttttgcaatgagctatcgtccagtatcttcagcctggaactggcaaccaaatcccagtgtaaacatgcagtacggacaacatcgcacgcattatcctgttgggattgtaaatacaactcaacttgcccatccatatccagtgaatcctgttagcttggcaggagggcctgcatcggctcatgcctccaccaggtttccttctttaacttctatgcaagaagcattaccaaatctgggcagtaccgcagtgctgtcgcgtgctccagttcatcagtacatggttcagcaacatacagttcaagtaccgaattatactttcccctccggatatgaaggaaccagagggatcgccgcaactgccagcacatacggattacctccaatggatcagcgtttggctgcgcagaatctgcaggtgtcgattgctccatctccg

SEQ ID NO: 209701 - DNA, 1230 bp, Zea Mays
gaaaactttacacaatacttgctctgttgtttattgagggtattaaggatgtactccgtagttatcgcagtagtttcctccctacccctaattaaattatccaatagaaatgaagtggctgaattattgcttttggtagggaaaccatcatcttcgaggaccgacgatcccagccctgcaacattcaaagatgctaaattatatatgtcaaaaaatctgattgacttcgattcagatctggaacctcctcaaggtgttgctcagactgatattcagaagggctcttcacctcaaacagatgttggttgggcaacttttgatgatgctacatccaaaaaaactacaaccatgccttcaacttccagtactaattttttggagggtccaatgctacagatcgccgatttgacatcagcaccacaaattagattttcaaatgccaagtccttgtcttttgccccgtcaaatcgtggaaaccaactgaaccaacagaatttctctcctgtgaatactacacagtacagcaatactctgttgaacagagctactagtgctccagtgcatagccaggatatttttgcaatgagctatcgtccagtatcttcagcctggaactggcaaccaaatcccagtgtaaacatgcagtacggacaacatcgcacgcattatcctgttgggattgtaaatacaactcaacttgcccatccatatccagtgaatcctgttagcttggcaggagggcctgcatcggctcatgcctccaccaggtttccttctttaacttctatgcaagaagcattaccaaatctgggcagtaccgcagtgctgtcgcgtgctccagttcatcagtacatggttcagcaacatacagttcaagtaccgaattatactttcccctccggatatgaaggaaccagagggatcgccgcaactgccagcacatacggattacctccaatggatcagcgtttggctgcgcagaatctgcaggtcatgaaccacggttctttaccccgagttggtgggaacccgtttgcttagtgttgttacttcggtcacctcagttcggtcgtttgtgtatagttttagcatttgatgatacggttttgtcgtgagaagatgcgagtggaataatgtagctgatcaagcagagtggcaacaagtgcctgacaggttttgtgtatatgatttttattttcgctatggaaggtgtcgattgctccatctccg

SEQ ID NO: 209702 - DNA, 1327 bp, Zea Mays
tcatgttgagttcactggttgtaaagccattccgaagggcatagccatggatcgccaaagcgaggatgttaactacgaagaggagtttgtcgtgaatccccggggcaacaagctgttcgtttgcagctggacaccacagcaggatcgccagccaaaagctctgatcttcatctgtcacggaattgcagcggagtgcagcatatcgatgagggacacggcggctcgattggtgcgggcaggatatggcgtttacgggatagatcacgagggacacggcagatcatctgggagcaggtgctacgtgccaaacttcggcaacatcgtcgcggattgctccagtcatttcacaagcatctgcgagaaaccacagaacagagggaagaggaggttcctgtacggcatctccatgggcggaagcgtggcccttctcctccaccggaaggcaccgggctactgggacggcgccatcttgctcgctccgatgtgcaaggtctggggacagagcaagatcgagatgatctctgatgacatgaggcctcacccgatcgtggtcagcgctctgacgatggtttgtgctgttgcgcctggttggaaggtcatacccacacctgatatcattgacaaagtctgcaaagatccagagatgagaaaagaggttcgttccaatccgtatatatacagaggaaagctccccctgaaaacttgccatgagctcctgatggtcagccttgatatcgagaagaacttggatcaggtgacgatgccgttcctggtcctgcacggcggggatgacgtcgtgaccgacccttcagtcagcaagctgctattcgagaaggcaccgagcaaggacaaaaccttcaagctgtaccccgggatgtggcatgcgctgacagccgaactccctgacgacgttgagcgtgtgtatgcggacattatcacttggctagaggaaagagcggtcatttgtgcagctagcgtttctagtgccacaccacgtgtctgaactcagaaagatgttaaatatgccatggcagatacgtatacggtgtggtattcaaacccatgtacgagggcaagcatgacaatatgttagatttagattcaacggtatgtcgtatttaacagttaagcccttccaccaccacctcgtatagctttataaataaaactcataataaaccacaattgtatctacggttatcggttagatctaaatctacggatcaagaggtttgcttacacctaatgactgcttgtattttagtcgttagaaccctccatgtgcaataatataaatatgaaagcttaaatacgacagacatacaaa

SEQ ID NO: 209703 - DNA, 1531 bp, Zea Mays
aacaaaaggacttggagttggggattctcagggttccttagctctaaaagcaacctttcacctacctgtacccgcgggtaaccgatttctgtgttccatgggcattataaatgttatctgaagtgaaggtacctgtgtcatgttgagttcactggttgtaaagccattccgaagggcatagccatggatcgccaaagcgaggatgttaactacgaagaggagtttgtcgtgaatccccggggcaacaagctgttcgtttgcagctggacaccacagcaggatcgccagccaaaagctctgatcttcatctgtcacggaattgcagcggagtgcagcatatcgatgagggctgcacaaatatccagacacggcggctcgattggtgcgggcaggatatggcgtttacgggatagatcacgagggacacggcagatcatctgggagcaggtgctacgtgccaaacttcggcaacatcgtcgcggattgctccagtcatttcacaagcatctgcggtacgaaacggacatccaaaacataagatacagatatactgaaccatgacgacacacacacacggcacctggtttcagagaaaccacagaacagagggaagaggaggttcctgtacggcatctccatgggcggaagcgtggcccttctcctccaccggaaggcaccgggctactgggacggcgccatcttgctcgctccgatgtgcaagatctctgatgacatgaggcctcacccgatcgtggtcagcgctctgacgatggtttgtgctgttgcgcctggttggaaggtcatacccacacctgatatcattgacaaagtctgcaaagatccagagatgagaaaagaggttcgttccaatccgtatatatacagaggaaagctccccctgaaaacttgccatgagctcctgatggtcagccttgatatcgagaagaacttggatcaggtgacgatgccgttcctggtcctgcacggcggggatgacgtcgtgaccgacccttcagtcagcaagctgctattcgagaaggcaccgagcaaggacaaaaccttcaagctgtaccccgggatgtggcatgcgctgacagccgaactccctgacgacgttgagcgtgtgtatgcggacattatcacttggctagaggaaagagcggtcatttgtgcagctagcgtttctagtgccacaccacgtgtctgaactcagaaagatgttaaatatgccatggcagatacgtatacggtgtggtattcaaacccatgtacgagggcaagcatgacaatatgttagatttagattcaacggtatgtcgtatttaacagttaagcccttccaccaccacctcgtatagctttataaataaaactcataataaaccacaattgtatctacggttatcggttagatctaaatctacggatcaagaggtttgcttacacctaatgactgcttgtattttagtcgttagaaccctccatgtgcaataatataaatatgaaagcttaaatacgacagacatacaaa

SEQ ID NO: 209704 - DNA, 1184 bp, Zea Mays
ctggctcctagcagccgccgccatcccttctccctctccctcctctcctctagcttctctccctcgcttccctcccctgcagcttcctcacgccatgcttccggacccgcgccaagccttggccacgcagcgagcgcccaacccgacgcagccgcgacaccgaccctgcccctccctgcactcgacgcgcctggagccccgccagccgagtactgtgaagcgcgccaccgaccggcatccagacccgcgtcgagccccagcccgacaccccggcttccccgcgtctacgcagcagcgccctgctcatccgcaagaactggcagcgaagcttgtcgttaagggatccaaaaacagataaacaaaattgttttgggctgattccaaaatgacccaaatctgaacttttgcaagacattaaggagttcttttccttttcaggagatattaatcatgtggagatgcagaggtttgtaaaacctgtccaactaggctgccccttctgttttcatgtccatactaattaaatttgtaccgcaggattgacggagaggaagcaaaaaatgactgtatgggagaatatgcagaaagctgaagcagaagcagccatacaaaaccttgtgataaaacttgaaaagaaaaggccatactcgctagagaggattttcaacacccttaggtctggctctcggaagacacaggtggtacgcagtacatcaaccgcaaatcagaatcagcatatttccagaactatcaaaacggcgccaaacctcagcaagaacggtcaaatgagttcattgagtggatgcttcagacaagatctatagcatggatcataatctggattgtccttaagtttttattgtgctaggggaacataagaaagtatgtagagcaaaatgagaggagctgttgttaccctcaattctttgtgattattgtgctagagtgatgtagttgtttggctttttgaacaatagctggagtgatatgaaacattagtgatctagttgtgaatgatattataattgtgatggttttgtgaatatataattgtggtgcttttgtgtttatgtgatggatctatgactgtggtatactgattaactgtgtatgtctttatgatttgtgtataaaaatctgtgatttatggtgcttaattaaatgtatattattattaataaaaa

SEQ ID NO: 209705 - DNA, 3175 bp, Zea Mays
ctggctcctagcagccgccgccatcccttctccctctccctcctctcctctagcttctctccctcgcttccctcccctgcagcttcctcacgccatgcttccggacccgcgccaagccttggccacgcagcgagcgcccaacccgacgcagccgcgacaccgaccctgcccctccctgcactcgacgcgcctggagccccgccagccgagtactgtgaagcgcgccaccgaccggcatccagacccgcgtcgagccccagcccgacaccccggcttccccgcgtctacgcagcagcgccctgctcatccgcaagaactggcagcgaagcttgtcgttaaggtaattcaggatttagctgtattactgcaaaatatttttgccagccgtgccaccacagccgcatcacaggtgggccaccgcttaactctatccattttgcatcaacttttgcccacttctgttatctacaacgagtccttcccttacccatgttggttcactgtcatacgccatccaaccacagttacaaagccccagctagacatagggagttaggagcttaaaacaccatgaactccagctctccaaactgaattcgaacagactgaaccacggtttcaggcacctagactgaacctctactgttatcctaccaaaatctcactacttcaagtggtaacaaagggatcaactttaacaccaattgtttaccatattatcctctaactaattgttgtaggggctgtaggccataacaccatgaatcagtcacaaaacagctccaaagaccgaataaaactcattgcacccacgtcaactgaacaaagttcagttctctgaatctaaaccttaggccacactgcatccttcctgttaatcctcattttctcacaaatttcaatgacaccagaccaacccagttggccaaaaatgctccccaaccatagcactatcaggttactacaacaatccaagtctagctcacacagaacaaaagttacaaatgctcaaagtgaacccaatccactgaatatcgttttcagttaactgaaaacaagaacctgacggaaagcactttggaatagatttactcccaactttgtgtagcaccaagctaagcacctctaagtaaagttgttcactaatacttggtctttaaccttgctacacaaggcatgtctcacaactgcatagaatagtcccaaaggaagttcaaagttgaggcaacatgactgaaattcagtctggattactgaacaacatgcaatgctcttttgcctgacagcacaaatttgtgcagtttgagcatgccgaccccctcccccttgctgtccaaactgaaacaaattcagccccacacgcccagttactggattggcttggattcccctttcaactaccagccttccgcatcttaaagcacagcttcaattcactaaaacaatgggcgaatggttgcagcgtgcagagctttctgctcccaaaaactgaatccagtttccagtcacttgaaacagaattcagcactaatcaactgaagacctacctttaacccctttgatcctcactagtgcaagcaatacatgccaatcttagttaacaaagattgttcccaacacatagatttaaatgtttgcagcagcagccttaggtcaaacattcatggatcaaaagttatggtgctccaaaatggtgtgaaaatacaagaattcaggttcagctagctgaaacaaaaactgaaatcaacaccagacagagagagtttgggcacaatttactccaaatttggtgcagcaccaaatcaaacttatttaaggaaacttgttcactaacttatgatctccaatgtttctatataattcatagtttaagacctaatggaatggccacacaagtgctctaaacagggcaccaatcgctgaaattcagttgtctgttaactgaacaaaatttagtccatgtaaacactgacagcccacttttgagtaacttttactccatgttctgggtcagatcaggcctaatgcacataacgaaatttgttcactgacatatgctcttcaactctcctatagcaaccatggtccaaagctgcctagaacaggcaacacacagccccaaaatggcactaaaaacactgatttcagaattaggcaactattcgaagtctgaaaatccagaagtctgacagtcccactttgaacacctttttctcctagttgcatatggttttagggctgctacatttcataaacattgttctcctatagttactctacaggtttgttatagcaactgtttccaaaatactcatggattaaatgttacagggatccaaaaacagataaacaaaattgttttgggctgattccaaaatgacccaaatctgaacttttgcaagacattaaggagttcttttccttttcaggagatattaatcatgtggagatgcagaggtttgtaaaacctgtccaactaggctgccccttctgttttcatgtccatactaattaaatttgtaccgcaggattgacggagaggaagcaaaaaatgactgtatgggagaatatgcagaaagctgaagcagaagcagccatacaaaaccttgtgataaaacttgaaaagaaaaggccatactcgctagagaggattttcaacacccttaggtctggctctcggaagacacaggtggtacgcagtacatcaaccgcaaatcagaatcagcatatttccagaactatcaaaacggcgccaaacctcagcaagaacggtcaaatgagttcattgagtggatgcttcagacaagatctatagcatggatcataatctggattgtccttaagtttttattgtgctaggggaacataagaaagtatgtagagcaaaatgagaggagctgttgttaccctcaattctttgtgattattgtgctagagtgatgtagttgtttggctttttgaacaatagctggagtgatatgaaacattagtgatctagttgtgaatgatattataattgtgatggttttgtgaatatataattgtggtgcttttgtgtttatgtgatggatctatgactgtggtatactgattaactgtgtatgtctttatgatttgtgtataaaaatctgtgatttatggtgcttaattaaatgtatattattattaataaaaa

SEQ ID NO: 209706 - DNA, 925 bp, Zea Mays
ttagaagcttgtttcttgaaatatgtaaatttgatttggtgttcttccagaatggaatgctggatccatggtttaagatcaagggcctagtgggtgcaaaccaggtgttggcctacttcgctgtatcaaaggttggagagccaccagtcgatgggattactgataccaacccagaggggttgactgctgcatttggcagctgggctcctgcagtggctgcccgcctgcaaaatggtggacttacctgcaaggtgcttgaaaaggaagcctttcagaagcagatgctagagaagttgatatggatttcagctttcatgcttgttggtgctcggcatccaggggctactgttggtgtggtggaaaagaattaccgatctgaggttgcgagcctgatagctgaattagcatcggctgcggctgcagaggagcagctcacattcgccgaaggcatggaggatcggctctgtgcttactccagggctgtggcacacttccctacagctgtgaaagagttcaagtggaggaatggctggttttactccctcaccgagaaggcgcttgcagcaggaaagccagatccttgcccactacacacagcttggctcaaggagattagggtcatataaattgttttcatgtacatgagcttcgttagaagcatgaaacagttgcatgttgcctatatagagaaaattgcttttgccacgttaaccttttggtatcgtgtgtcaaaacaaaatgcctgaaaggtttgctgccatccgtgtcgaaaggtcgaatcaaactgggactacacatgtattaaaccacatcatagaggccatgtaagagtatctccatgtaacacctcgttcaatctcggaccggcgatatttacttctggcagccctttaagatcatatattgtccctcataaactaacata

SEQ ID NO: 209707 - DNA, 1861 bp, Zea Mays
cccagcatgtcagagagagcggccggacggacacgcgcggcgcggtgctttcagttcgtgctccagcttttccgtctagtttaatggtttttcctagtcgtcctccgtcctcctcagctctggctgccaaccccaagaagagaacagccttgcctagtcactaggccctagtgtgcccattgcctagggaaggaggaacccaaggagaggtgcgcggctggtggcatgcgagtggcagcggtgccgcgggactcttctcctcgctggccgtgcgcgccgtgccccgacggaatccaggtgacaccctgatattgatgtgaagttttgtggaacctcctgcatccttatatggtattaacaataatttaattgtctgggtgatccatttgagcaaatggaaggcaacgacctaccccctggaaacatgttgcaaggggctccctatgatagtttagacttacatggcgactctatggcaaaacatgccccaaactcaggaaaacagatcttcagcagctcccagatgccggggactttcacaatgtctatgaccagggctacagaacctgatgactttcctgggtttcagttcaaagaacatggaaagagtgatgaccaccaccaccaccaataccatagtcatcaccaaaagaactgcatgagtgatggtgaagaacatgatatggctgaagatgctactgataccccaagtggaaaaggcaagaagggctctgcatggcatcggatgaagtggacagattcaatggtaaaacttttgattacagcagtgtcttacactggagatgatcatggtgctgattctggtggtggcaggaggaacattgcaataacgcagaagaagggcaaatggaaggcgatatcgaaggttatgggagagagaggttgccatgtgtcaccgcaacagtgcgaggacaagttcaatgaccttaacaagagatacaaaaggctgatagacatccttggcatgggcactgcttgcaatgttgtggctaatccagcacttcttgatagcatgaatcatctttctgataagatgaaagacaatgcaaaaaagatacttagctcaaagcacttattttatgaggagatgtgttcctaccacaacaacaaccgtgcaaatttgcctgaagatcatgcacttcagcattcactactgcttgcccttagatgtaaagaggagcatgatcttcggagagcaagtggagatgctgatgaagacgatcgaagtgcggattctgattatggggagaatgatgaagagcaatatcctgtgcatacacgcatgagggagccctcaaccaccaaaaggaagcgccacagagatgtggctttggtcacatcaaactctcatgaaggcagtgagaggtctgatccccatgatgtaacagtggacatcaacaaggctttcacagatgcaaccaacatggttttgttgcaacaggacttggcttcacaagccatagagattcagaaacgtcgcttgcagattgaagcaaaggaactggaactcacaaagcaacgtcacaagtgggagcggttcaggaagaagaaggacagggagatagaaagaatggcactggagaatgaacatatggtgattgagaacaaacgcttggaacttgagctgagacataaggagttagagctagagcttaagctgaaaggcaaggggaaccatccataacttaattcttgatcaacactacaatatttaagatggtaaacaagtcacggttgagcttctggaagataaaggtggtagattagagcagaacctgacaaccatttcttaggcacacgtggatcatcaatcaaatgaaaagcaagaccatgacctcgc

SEQ ID NO: 209708 - DNA, 2046 bp, Zea Mays
gttcgtgctccagcttttccgtctagtttaatggtttttcctagtcgtcctccgtcctcctcagctctggctgccaaccccaagaagagaacagccttgcctagtcactaggccctagtgtgcccattgcctagggaaggaggaacccaaggagaggtgcgcggctggtggcatgcgagtggcagcggtgccgcgggactcttctcctcgctggccgtgcgcgccgtgccccgacggaagatttgctgagctgaatggtctcactcgtataccactctgcaaaattatctctagagaaatatggaatccaggtgacaccctgatattgatgtgaagttttgtggaacctcctgcatccttatatggtattaacaataatttaattgtctgggtgatccatttgagcaaatggaaggcaacgacctaccccctggaaacatgttgcaaggggctccctatgatagtttagacttacatggcgactctatggcaaaacatgccccaaactcaggaaaacagatcttcagcagctcccagatgccggggactttcacaatgtctatgaccagggctacagaacctgatgactttcctgggtttcagttcaaagaacatggaaagagtgatgaccaccaccaccaccaataccatagtcatcaccaaaagaactgcatgagtgatggtgaagaacatgatatggctgaagatgctactgataccccaagtggaaaaggcaagaagggctctgcatggcatcggatgaagtggacagattcaatggtaaaacttttgattacagcagtgtcttacactggagatgatcatggtgctgattctggtggtggcaggaggaacattgcaataacgcagaagaagggcaaatggaaggcgatatcgaaggttatgggagagagaggttgccatgtgtcaccgcaacagtgcgaggacaagttcaatgaccttaacaagagatacaaaaggctgatagacatccttggcatgggcactgcttgcaatgttgtggctaatccagcacttcttgatagcatgaatcatctttctgataagatgaaagacaatgcaaaaaagatacttagctcaaagcacttattttatgaggagatgtgttcctaccacaacaacaaccgtgcaaatttgcctgaagatcatgcacttcagcattcactactgcttgcccttagatgtaaagaggagcatgatcttcggagagcaagtggagatgctgatgaagacgatcgaagtgcggattctgattatggggagaatgatgaagagcaatatcctgtgcatacacgcatgagggagccctcaaccaccaaaaggaagcgccacagagatgtggctttggtcacatcaaactctcatgaaggcagtgagaggtctgatccccatgatgtaacagtggacatcaacaaggctttcacagatgcaaccaacatggttttgttgcaacaggacttggcttcacaagccatagagattcagaaacgtcgcttgcagattgaagcaaaggaactggaactcacaaagcaacgtcacaagtgggagcggttcaggaagaagaaggacagggagatagaaagaatggcactggagaatgaacatatggtgattgagaacaaacgcttggaacttgagctgagacataaggagttagagctagagcttaagctgaaaggcaaggggaaccatccataacttaattcttgatcaacactacaatatttaagatggtaaacaagtcacggttgagcttctggaagataaaggtggtagattagagcagaacctgacaaccatttctgtgcgtatgacttttgttctgtgtttttctgccctgtgtcatgtactggttgggcctcctgcatgtttaccctttctgcggcagtagtattgggcttgatgtgatctgtaagactgttacttccatcttgcccagtgtttcaatttttttcgtcagcatgtatatcgaggtgatgcgatgatgtgaaggtagtggaaggtctgctgatccacattggcttc

SEQ ID NO: 209709 - DNA, 866 bp, Zea Mays
gtctccacagatgagctacgagctgcctgatggccaggtgatcaccattggggcggagaggttccgatgccccgaggtcctcttccagccttccttcattggtatggaagctcctggcatccatgagaccacctacaactccatcatgaaatgcgacgtggatatcaggaaggacttgtatggtaacattgttctcagtggtggcacaaccatgttccctggcatcgctgaccgtatgagcaaggagatcaccgcccttgccccgagcagcatgaaaatcaaggtggtggctccacccgagaggaaatacagtgtctggataggagggtccatccttgcctccctgagcaccttccaacagatgtggatctcaaaggctgagtacgatgagtcaggaccagcgattgttcaccggaagtgcttctaagctcaagggcccccttcgtccccattctatgtattcctttccttgagtgcttttcttataagctactatgtttgagattgccggcctttgagcaggcaatgttgttggatctgtatcttgtggatcactacaatgcatgcgttgctccatcttcttttcatgccaagtttgctgtcatacttgctagtggggaaaacaacaatgacaacagtggtgagaacagcaaccacaaaaaaagagaggatggaaattattgaagttcctaggatcgtattgtaactgtacttgtgcgagtaacattattggttctctttgtatatccatctctgagacatgcaattctttttgattggtttgctacttctgtgaatgatttctgggcactagtggagcttttgaatggcaacttcccagggactacctttgtgagtccccactg

SEQ ID NO: 209710 - DNA, 1751 bp, Zea Mays
cgcacagtagatcagatccgatttgttactgcggcattccgattgctgagctctggttgccgattagttatcaacataagccgcggccaagcagttcttacggggtcacaagaagaagatgaacagtttgtccatcttgcctcgcaaggataaccgcccgctacatcatcagtaacaaatggctgacggtgaggacattcagccccttgtttgtgacaatggaactggcatggtcaaggctggttttgctggtgacgatgcgccaagggctgttttcccaagcattgtcggacgcccccgtcacactggtgtgatggttggcatggggcagaaggatgcgtatgttggtgacgaggcccagtccaagaggggtatcctgactttgaagtaccccatcgaacatggtattgttagcaattgggatgacatggagaagatctggcaccacaccttctataatgaactccgtgtggcgcctgaagagcaccctgtgctgctgacggaagccccactcaaccccaaagctaacagggagaagatgacccaaatcatgtttgagaccttcaatgttcctgccatgtatgtcgccatccaggctgtgctttccctgtacgccagtgggcgtacaactggtattgtgttggactctggtgatggtgtcagccacaccgtgccaatctacgaaggttatgcccttcctcatgccatcctgcgtcttgaccttgctgggcgtgacctgactgacagcctgatgaagatcctcaccgagagaggttactccttcaccaccacggccgaacgggaaatcgtacgggacatcaaggaaaagcttgcatacgtggctcttgactatgatcaggagctggagaacgccaagagcagctcatctgtggagaagagctacgagctgcctgatggccaggtgatcaccattggggcggagaggttccgatgccccgaggtcctcttccagccttccttcattggtatggaagctcctggcatccatgagaccacctacaactccatcatgaaatgcgacgtggatatcaggaaggacttgtatggtaacattgttctcagtggtggcacaaccatgttccctggcatcgctgaccgtatgagcaaggagatcaccgcccttgccccgagcagcatgaaaatcaaggtggtggctccacccgagaggaaatacagtgtctggataggagggtccatccttgcctccctgagcaccttccaacagatgtggatctcaaaggctgagtacgatgagtcaggaccagcgattgttcaccggaagtgcttctaagctcaagggcccccttcgtccccattctatgtattcctttccttgagtgcttttcttataagctactatgtttgagattgccggcctttgagcaggcaatgttgttggatctgtatcttgtggatcactacaatgcatgcgttgctccatcttcttttcatgccaagtttgctgtcatacttgctagtggggaaaacaacaatgacaacagtggtgagaacagcaaccacaaaaaaagagaggatggaaattattgaagttcctaggatcgtattgtaactgtacttgtgcgagtaacattattggttctctttgtatatccatctctgagacatgcaattctttttgattggtttgctacttctgtgaatgatttctgggcactagtggagcttttgaatggcaacttcccagggactacctttgtgagtccccactg

SEQ ID NO: 209711 - DNA, 1248 bp, Zea Mays
ggaggacatatccggtgcaatcactcattttggtgcaagcgtacaatcaaactatccagagcatccaatctagatccaacggtttcatacggaagtggttaaatgtaaaatagacactaggttttaggaggaaggggttaaatgtaaaataacagttaccattaaatctaaatcggatgcaccagatcgcttgattgcatgcttgcactaggataagtgattgcataggatattttcccactaagggttgagacatattttttagcgaatacaacttgagggatgagattgccgatgattgtcacttgactgggagtctggatctcaagcaaccagccccaagaactgttctgctccccagttgtatatacgatcgaagaaaaaaaaaagatcccaaaccctagcatctctcatggacgacggcgacggcggactgagcttcgacttcgagggcggcctcgactctgccccggcggccgggggccccgtgccgtcctccactgaccctggcgcgggaggcggcgacgggccgggtatgcacgggcgcggccgaggtcgcgggagctaccgccagacggtgtgccgccactggcttcggggcctatgcatgaagggcgaggcgtgcgggttcctgcaccagttcgacaaggcccgcatgcccgtctgccgtttcttccgcgacttcggcgagtgccgcgagcccgactgcgcgtacaagcactcgtacgacgacgtcaaggagtgcaacatgtacaagatggggttttgtcccaatggtcctaattgccggtacaagcatatcaagctacctgggccaccgccttctgttgaggaagttcttcagaagattttgcagatgcgctcttttaacagatacagtcagaatagaaatagtaattataatcagcaaggggagaggccacaacatccacagggttctgcgttgcctaaccaaaactcagcagaaaatgctactgctgcagctccaccagctggtggacaacaagcacaaacgctgaatcaacagccaccacagcagcagcagaagccaaatacaaatgaccaggcccaaggtgtttcaaatggccatcaggccactagaatcgccacaccccttccacaaggaccatctagacgcccaaaagatccaaggtgttcccgtcacctaggtaagaatcagcaagagggtagagggcagaggggaaggaggaggaggggcgtcgaatcagggcagcgcagctgactcgg

SEQ ID NO: 209712 - DNA, 478 bp, Zea Mays
gggccatactttgcagcagccattactatgtagagagcgcagagggccgtcacctggtccgctcgccgttgtgtccattcggggcaaacacagagacctcgggagcctgccgcacctccatcgagcggaacggaagaatggtgggagaacagagaaactccaccgccatggcccggcgccgcgcctcctctggtgcactggtaccgctgccatgtgccgtgcagtgcgttggtgggatcctgtcgtcgtggtgggaatccagcggccctgggtaattcgggtgtgcgcccacatttggcctcggtgaccagctacaggattccgccgacatctccagtgcaaatcatgtggtcattccgggtggattgatgccgggggaccctgggattgttcaccggaaaatctacacagcggcaaagcgactctgagcggtgaccggagtgattacgccatcccatttgcgtgaggtcacgaggat

SEQ ID NO: 209713 - DNA, 1139 bp, Zea Mays
aaaaaaagaggaggtcgatacaatactaaagctgctcgggctatttggattcgatatcttctccttggaaggatgttgcgtttaacaagaattttgttgcaaattcggcgtttcagagcatttgttgcaacattctttaccctcatgtctagcttgttgccatacttggggactgtgttttgcatactttgtgtatattgctccataggtttacagttttttggtggcatcgtgtatgcaggaaacttgaagttggaagaaacagatctctttgggaacgattatcttcttttcaacttcaatgactacccaagtggtatggttactctgttcaatttgttagtcatgggcaattggcaagtctggatggagagctatgcacacctgactggaagttcttggagcctggtttattttatcagtttttaccttatttcagtattactgctgcttaatctgattgtggcatttgtgttggaggcgttttttgctgagatggaactggagaaagctggagaagctgatacgcaggattctaccccacaaggaagaaacaagcggcgatccatgcgtgtgaggacgaagggtactatggttgacattcttctgcaccatatgttgagcaatgaacttgatggatctcaaaactcggattgattactcatcttaatggtaccagatcactagtactaccctgctgttcttttaactttgaccacggcttccgttatgaacacctgtctcatctatactctacagcatccgagacttcgattggtaatttatataccatacgtatagcttaaagtgacacaacggatactgacagatgcttatttatctgcaatttcagtcaatatatatacccctacattttttttttgtttttatatgtatcttctacagccttctgatttctgacagtgtggaatatgccgtattgagtagacagtattggttgtattaagcaactcgtatgaagcgaaataacagttcaaaggtgcccagtcttctcccctcccaaattattgatgaactctagatgcaattggtgattcttgcttctttggagagatgcaatgcaaggagttgtatatttctccaacaaaaaggacctacttcgttaggggaggcagccc

SEQ ID NO: 209714 - DNA, 2335 bp, Zea Mays
gctcaggcctctcccgagaaagactgcttataacatggtattgaacaagtttgctcctcagctctatgagaaactcacagaaaacatgaaagggcatcttgaagagatgcgcacatgtatagaggctgctcaaggtggtttgttcctggaagagttgcagcgaaaatggaatgaccataacaaggcattgacaatgattagagatatcctgatgtatatggacaggacatatattcccactaataaaaagacacctgtcttcgaacatggattagagctttggagggatactatagttcggtctcctatgattcaggggaggttgtttgacacgcttctcgagctcatacatagagaaaggactggcgacgtgataaatagaggcttgatgaggactacaactaaaatgttgatggatctagggttgtctgtttaccaggatgattttgaaaggccatttcttgaggtctctgctagtttctatagtggtgagtcacaacaatttattgaatgctgtacttgtggtgagtatctgaagcaggctgagaggcgcctccatgaagaatcagagcgtgtgtcacagtacttggatgctaaaaccaatgagaaaattactgctgttgtggtgaaagagatgctagcaaatcacatgcagaggttgattcttatggagaactcagggcttgtgaatatgcttgtcgaggacaggtatgaagacctgaccaggatgtacactttgtttaatcatgttcctgatggtctcgcaacaattagatctgtgatggtgtctcatattaaggatactggcaaaagtttggtaacagatccagagagactaaaggacccagttgattttgttcagcggcttcttaacatgaaggacaagtatgacaatatcatcaatgtgtcatttagcaatgacaagagtttcctgaatgctctcaattcctcatttgagaactttataaaacttaaacaaacagatcacctgagttcatatcactgttttgttgatgacaaactgcggaagggggtgaaagaggccaatgaggaggatcttgaaactgtcctggacaaagtgatgatgctgtttaggtatttgcaagaaaaaagatctatttgagaaatattacaagcaacacttggcaaagcgtcttctttctgggaaggctgcttctgatgattctgagagaagcatgcttgtgaagctgaagacagaatgtggctaccagtttacttcaaagttggagggcatgttcactgatttgaagacctctcaggatactacacaagggttttatgcatctacttcctcggagctgccggcagatgcccccacaatgtctgtccagatactcacaactgggtcatggccaacgcaaacctgcaatacctgcaatctcccccctgaaattgtttctgtctcagagaagtttcggtcttattaccttggcacacataatggcaggaggctaacatggcaaacaaacatggggacggctgacatcaaagtaacatttggaaatggaagcaagcatgaactgaacgtatcaacataccagatgtgtgttctcatgctgtttaactcagcagatgtcttgacttaccgtgaaattgagcagtctacagcaataccagccgctgacctgaagcgatgcctccagtcactagctcttgtgaagggtaagcaagtcctgcggaaagagccgatgagcagggacattgccgatgatgacagcttctgcgtgaacgacaagttcaccagcaagctcttcaaggtgaagatcggcaccgtggtggcgcagaaggagaccgaccccgagaagctagagacgcggcagcgggtggaggaggacaggaagccgcagatcgaggcggccattgtgcggatcatgaagtcgaggagggtcctcgaccacaacagcatcatgacggaggtgacaaagcagctgcagccgcgtttcatgccgaatcccgtggtgatcaagaagcggatcgagtcgctcatcgaacgcgacttcctggagcgggacaagacagacaggaagatgtatcgctatctggcctaagagaaccacctgtccttgaattcgatttcatcatatctacccatgttgtataaacagaccctgatccatgtaacttgtccagagaaggaaatgggtctttctgcatcccgtgacacttttaagttgagacttttttttctggatctgcccagttagttgctagcttagcttctataacatcttgcgctgggttgcatgctaacgctatagattggctgcgacgtaatgctctcttttcgttgctgcttcagaaacgcgatctgatc

SEQ ID NO: 209715 - DNA, 762 bp, Zea Mays
acccccacttgtgaaaccctcgtatccccacaacaccagaatccgcgaatcacagacgcgtctatctcagcttgctgcactgcactaccctgccctgccatcatatcatgggcggggccatgccgccccagccgtgctgcggcggcatccgcagcctgctgcagcaggccaacaacacccccgaccgccgcaccatctgcggctgcctcaagaacgtcgccaacggcgccaacgggagcggcacctacatcagccgcgccgccgcgctgcccagcaagtgcggcgtcgccctgccgtacaagatcagcaccaacgttaactgcaacacgattaattaagtgatgaggcgtcctgtgcgcgtccgggcgaggaatgcatgcatggcgctggcggagagtaataaaataatgctactggtattttaagctatatcgaggtgtgcctgtctctagtcatttattatggtgtttaggaatggtctacacagttcgtaacggtgtatcgtggatgcatgttgccgcgagcagagtacgtaggcatgaaccgatgtgtgcgcttctgtctgtttactctctctatgtagtaatgtgtgggtgctttgatccagatgtattcgctcgtgagtcgtggaagtagatcgtttcagtatcattaccgtgtgttctttcttaattttacattcgattctgaaaatgaacatgcacgaagctggactggtccagtatacgttgccgcatgcacttcgacttgccttgccacttg

SEQ ID NO: 209716 - DNA, 982 bp, Zea Mays
caccgcccgtcaagaggcgattccttaactgacgctgcgactccgatcacccatcaccgctgccctctctcctctgcctacgccggcgccgacgccggggctagaccgtcggggagtcatgtcgcggtctttgagcatgagaggtagcatgaggtcgcgccgcgacctacctcctcccgggaagacaattgaaaggcttgagagtatggttgatggaggaaatttctatgaagctcaacaaatgtacaagtcaaccagcgcaaggtatattgctgtccataagtattcagaagccttggacatccttcaatcaggcgctttggtacaattgaagcttggacaggttacctgtggtggtgaacttgctgtcctctttgttgacatcctcatcacaggagagtttccatatagtgaacaattttttggtcaggttttttcttttataaagcaacacagtgcataagtttcttctactgatcatccaaatatttcctattgtttcagtttgaattcccttcaattatctagccaatccatttgcacagtatatcattttttagttactcctatcttgtctgtcctgcaaaatatgaagagcctaaaatattgttgaaagcggtgacccctagtgccaaatatgattttagcatatttaattctcttttttcttttctatctttacatacagaaagtcttattgatccccctatggttctgcacgaactgaataaaacaatccccttttagtaaattgacgcatgcaataagttcagttgatagatatcacatttttgtgatagtaactatattgtgtaacattagatcgtatcagaaagatatatgaggcattcccaaggataaccgttccacatttccttggagaggactatgatgatgagggacataaattgtctgaagctatttctgctgccaaagtgcgcgcagagagttgttcatcattcctgaaagctgccatcaggta

SEQ ID NO: 209717 - DNA, 597 bp, Zea Mays
ttaagattcgcgcaagcacgatcaccgcccgtcaagaggcgattccttaactgacgctgcgactccgatcacccatcaccgctgccctctctcctctgcctacgccggcgccgacgccggggctagaccgtcggggagtcatgtcgcggtctttgagcatgagaggtagcatgaggtcgcgccgcgacctacctcctcccgggaagacaattgaaaggcttgagagtatggttgatggaggaaatttctatgaagctcaacaaatgtacaagtcaaccagcgcaaggtatattgctgtccataagtattcagaagccttggacatccttcaatcaggcgctttggtacaattgaagcttggacaggttacctgtggtggtgaacttgctgtcctctttgttgacatcctcatcacaggagagtttccatatagtgaacaattttttgaaagatatatgaggcattcccaaggataaccgttccacatttccttggagaggactatgatgatgagggacataaattgtctgaagctatttctgctgccaaagtgcgcgcagagagttgttcatcattcctgaaagctgccatcaggta

SEQ ID NO: 209718 - DNA, 1967 bp, Zea Mays
tcaccactccccccgatcgagactctggagcgcagagacggcagagagcacagtagccaagcgagtggaggagagttggagactcatcactggagagcatccgaagccgcccagtgctcgcacaaccgctcccgattcccaacccctccgtccgcccaaggggcgccgcaccatctccagcctccaggcctcgatccctaccggaccccgtggccctgctgtgttatctggctggagatccggccggagtggcattcctgctctcggtcaataagtattctggaatgtttttccgagctcaaatagagaacttctggagctggatatcagtattctgttagggatatgctccaaccaagggaagctgatgtgcctgcactctttcttgtcttcattgtacttcccgtggtagcttattttcttcttgggagatggcatgactctgcaagtaagaaggcaagggcaagtgtgcttgcacagcgagctgcagaagaagcctatagagaggaaacgatggcgtgcccagacattattccgccaggcccttccttgagaactatgccctatttcaaacctgcgccttcgttaagacaggaataccatgagtgtgcaacttgccatgcccctgcaaagactcgttgctccagatgcaagtctgttagatactgctctgggaagtgtcaaatagtacactggaggcaaggacataaggaaacatgccaaaaatggcttggtagtggttctagcagctttggtggatctagcactgaggctactgaacagatgccgttcttggctaacttgaattcacctcttccaggtggtgacattcacttgcgtgacatgaacttcgatactttatcagaaccatcctttcccacaactgatggttacaatctagatactgacccatttccggcagatagaagcaacatgaatagatcaaatcaaggtattcatatgagcgaaaatggtgctgttggtgtatcttttgaaaagaataattataatgctgctgatgaaatacactcttcggagattttatctggaaacaaggtgtcaaacaactattttggttcagatgcaatgagtggtaatggggatgcaacttatcctgccaaaagtaatgcacagcagcctagcagttgtgctcctgacgtgagaaaacaatcaaaagcaagcatcacagtttatcagcctgacatgagtgtctatttaacttctgacatggtcagttcttgtgagggatcatatgtttctgccggtgagccactgcaaaggagcttgtcatctggaagaactattgggaaagtaactgtggtgaataaaaggccttcttacccatcaagtaaggtggtctcagcacaaaagtcacaggataaggtgtctacatcatatcaaaatgatgcccatgagaagaatccttgcaacaaaaatgaccaaagatctacccccacatgtgaatcaagtcaatcaacaagcagcaatctactgaagtctggaacatccaaggttgaagttttaaagaagccttcaaaatttctcaaaaccagccttgtggcattgatcaatgataataagaggaacaaggtattgttcccatatgaagatattgtcaagttttttcagtatgaagcacggggtgtttcccctagaggtcttttcaattgtggaaacagctgctatgctaatgctgttcttcaatgtctcatgtgcacaaagccactgatgatctaccttcttctgagattgcattctaaagattgttgttcaaaaaattggtgccttatgtgtgaacttgagcaatatgcttcaactttacgtgaaagtggtggacccttatctccaagtagaatcctttctaatctgaggaatattggatgtcgcttgggtggtggaactcaggaagatgcccatgagtttctaaggttctcatgctgtagtatttttagacacttcagaagcct

SEQ ID NO: 209719 - DNA, 3675 bp, Zea Mays
tcaccactccccccgatcgagactctggagcgcagagacggcagagagcacagtagccaagcgagtggaggagagttggagactcatcactggagagcatccgaagccgcccagtgctcgcacaaccgctcccgattcccaacccctccgtccgcccaaggggcgccgcaccatctccagcctccaggcctcgatccctaccggaccccgtggccctgctgtgttatctggctggagatccggccggagtggcattcctgctctcggtcaataagtattctggaatgtttttccgagctcaaatagagaacttctggagctggatatcagtattctgttagggatatgctccaaccaagggaagctgatgtgcctgcactctttcttgtcttcattgtacttcccgtggtagcttattttcttcttgggagatggcatgactctgcaagtaagaaggcaagggcaagtgtgcttgcacagcgagctgcagaagaagcctatagagaggaaacgatggcgtgcccagacattattccgccaggcccttccttgagaactatgccctatttcaaacctgcgccttcgttaagacaggaataccatgagtgtgcaacttgccatgcccctgcaaagactcgttgctccagatgcaagtctgttagatactgctctgggaagtgtcaaatagtacactggaggcaaggacataaggaaacatgccaaaaatggcttggtagtggttctagcagctttggtggatctagcactgaggctactgaacagatgccgttcttggctaacttgaattcacctcttccaggtggtgacattcacttgcgtgacatgaacttcgatactttatcagaaccatcctttcccacaactgatggttacaatctagatactgacccatttccggcagatagaagcaacatgaatagatcaaatcaaggtattcatatgagcgaaaatggtgctgttggtgtatcttttgaaaagaataattataatgctgctgatgaaatacactcttcggagattttatctggaaacaaggtgtcaaacaactattttggttcagatgcaatgagtggtaatggggatgcaacttatcctgccaaaagtaatgcacagcagcctagcagttgtgctcctgacgtgagaaaacaatcaaaagcaagcatcacagtttatcagcctgacatgagtgtctatttaacttctgacatggtcagttcttgtgagggatcatatgtttctgccggtgagccactgcaaaggagcttgtcatctggaagaactattgggaaagtaactgtggtgaataaaaggccttcttacccatcaagtaaggtggtctcagcacaaaagtcacaggataaggtgtctacatcatatcaaaatgatgcccatgagaagaatccttgcaacaaaaatgaccaaagatctacccccacatgtgaatcaagtcaatcaacaagcagcaatctactgaagtctggaacatccaaggttgaagttttaaagaagccttcaaaatttctcaaaaccagccttgtggcattgatcaatgataataagaggaacaaggtattgttcccatatgaagatattgtcaagttttttcagtatgaagcacggggtgtttcccctagaggtcttttcaattgtggaaacagctgctatgctaatgctgttcttcaatgtctcatgtgcacaaagccactgatgatctaccttcttctgagattgcattctaaagattgttgttcaaaaaattggtgccttatgtgtgaacttgagcaatatgcttcaactttacgtgaaagtggtggacccttatctccaagtagaatcctttctaatctgaggaatattggatgtcgcttgggtggtggaactcaggaagatgcccatgagtttctaagcttgcttggatgggctgggtggtgagaagcacgttgaaccaagtttgcaggaaacaacactgatacaacagatgtttggtggccgtcttaaatccaaggttaagtgcctcagatgctatcacgagtctgaaagatatgagaatataatggatcttactttggagattcatggctgggtagagtccttgcaagatgctttgacacagttcactgctcctgaagatttagatggtgataatatgtataaatgtggaaggtgttctgcctatgttaaagctaggaagcaactgagcgtgcatgaggtgccaaacattttaacagttgttcttaaaagatttcagtcaggaaaatatggcaagatcaacaaatgtgttactttccctgatatgttggacatggttcccttcgtgactgggtctggtgacaatccccctctttatttcttgtacgccgtggttgtacatgtcgatacagaaaatgcatcattctctgggcactatatatcatacgtcaaagatatgcagggtacatggttgagaattgatgattcagaggtccaggttgtatcagtgaatcaggttatgtcagaaggtgcatacatgcttttctacttgaggtcttttccccgaccaccaaggatatacatcgagaaggggctgccggttacatccgcaaagcggcacacgtcgaaatcttccaagggctctaaacacgatcgcaagcagacagagttactctttcctgcaaacgatcaggcatatggcgtctatgatttcagacccgatggcgaaggctatgcccaagatcagcatgcagagctgaggtccagagctttccatcacgccgacgatgcctttgcagactcggttagcgcggacttctcggaagcgacatcaagtgaatggtcgctgtttaccagctccgacgagtcctcgttcaccaccgagagcacaagggattcgttcagcgtcgtggactacggagacaacgccggcctggatccgatttcctccatattcgggccaagctatgctccggagcacggtgctcccggcagtttcgtctcgcgcacaaggttctcaccttccagtccacagacaaggtacttctcggagagcacaggctttgtctcggactcttccatgccggcccacccccacggcattgtacatagaggaaggtatccggatagtagggcgtgcgcctcttctgcggaaccgcttgcgtcggcggcgcatcagcggagcgggtatggccggtacccccttagtcgagatggttttgttcaaacatctggtttttgccaaatgtaatcggctcacatttcattagctgtagctggtgcatcggcagttgcggttcttagcactgccgttaatgctgcctcatgttcttttatttcagatgaggcttattgaatttttagctacatgtcgtttctaggggtagctcgattcgatgtagcgaaaaaaagttagattatgtctatatgcaggtgaaattttagagcatggtgacaagctctgtggcaaccgttttccaatgctaatctcgtaaccctggctgctgcttctggtcttagattaatgtatgtcccaagtgattattccccagcttgttactttctcggaacgttcatgcatttcttagagagaacttagagaccaaagaattgtcagacgatcgacggacttagattgacttatgtttctgatcggagaaagtaacaccggtcaaatgagatttc

SEQ ID NO: 209720 - DNA, 1785 bp, Zea Mays
ccatcgccatcctcttcgtccgtacctcccccgaagcgctccaaggcggagtcctcggggtcaccgacggcgtccgcgcccggcagggccgaggaggattctgtggcgggagcggcacccgcgaggagcgccggctcggtcgatgacgcggcagcggtcgcacagaaagatcaaggagtcgataagccgtcttccgccgctgcagagagttcaaagcggaggaaggagcaggagcaacagcaacccgcagtgccatgggcgaagctgctctcggagtgctcacagactcctcactatcccatcagtgtggatcagatttctgttggtcaaagcaaaaactgtaatttgtggctgaaagaccaacctgttagcaaagtgctttgcaagctgcggcgccttgagcaaggaggtccatgtgagttagaagttatagggaagaagggtatggtccaattaaatggaaggtccgtaagtccaggcacaaaagttccccttacaggaggggatgaagtcatattcagttcatgcggcaagcatacttatatttttctttatcctttgaatgacaaagttcctaaaacggtgctatcatctgctgttagccttctagaagctcctgttgctagtgtaaagcgtatccgtacagataagagaacaggagacacttcagctgttgctggtacagagatgatgacatctacatctaatcagaaggatgtagcagcagtacctcccgcgtcagctggagagaacagccaaagagtagtgcggccattggcatcatctgcttctgataaattgaaagggcgtgctgtgagccctgaaaaggaatttgcgaatggggaaaatgctaatgaggttaattctaacatcgaagactctccaatggttgttgctgcagcccccatatctcctgatgctgctgcgaacgatacctgtcaacaaaatggctttgtctctgattctcatctcggtgcggaaatcggtaagactgcaacctataagataaggccagttctgaggatgattacaggatcaactatatccgagttcgatttgactggtgatgatctttttaaagctcttgaagatcagagggatcacatcatcagggagcttaacgcttcaaccaacgtgcctccaagtagatgccaagcctttaaggatgggatgaaacaaggaattatcaatccaagtgatattgatgtcacctttgagaattttccttattatctcagtgagaatacaaagaatgtgctcttgtcatctgcgttcatacacttaaaaaagaaggagttcatcaagcaatttgttgagatctcatcaataaaccagcgaattttgttatctggtccagcaggttccgagatttatcaggaaacattggtaaaggcacttgccaaacattttagtgctagactccttgtggtggattcacttttgctgcctggggcaccttcaaaggatccagaattccagaaagatgttgggaaggctgataaatcaggggataaggcagctgccgagaagtttgcaatatatcagaagcatcgttcttcgttggcagacactgttcacttcaggaggccagctgcaccaacttctagtgtgaatgctgatattgtaggaacatccactctgcattctgcatctctaccaaaacaggaatcgtcaacagctacatccaagagttatacttttagagaaggtgatagggtgcgttatgtgggtccagctcaaccatgctcgttgtcacaaagatgaactaggcaaaaagccattcaa

SEQ ID NO: 209721 - DNA, 2359 bp, Zea Mays
ccatcgccatcctcttcgtccgtacctcccccgaagcgctccaaggcggagtcctcggggtcaccgacggcgtccgcgcccggcagggccgaggaggattctgtggcgggagcggcacccgcgaggagcgccggctcggtcgatgacgcggcagcggtcgcacagaaagatcaaggagtcgataagccgtcttccgccgctgcagagagttcaaagcggaggaaggagcaggagcaacagcaacccgcagtgccatgggcgaagctgctctcggagtgctcacagactcctcactatcccatcagtgtggatcagatttctgttggtcaaagcaaaaactgtaatttgtggctgaaagaccaacctgttagcaaagtgctttgcaagctgcggcgccttgagcaaggaggtccatgtgagttagaagttatagggaagaagggtatggtccaattaaatggaaggtccgtaagtccaggcacaaaagttccccttacaggaggggatgaagtcatattcagttcatgcggcaagcatacttatatttttctttatcctttgaatgacaaagttcctaaaacggtgctatcatctgctgttagccttctagaagctcctgttgctagtgtaaagcgtatccgtacagataagagaacaggagacacttcagctgttgctggtacagagatgatgacatctacatctaatcagaaggatgtagcagcagtacctcccgcgtcagctggagagaacagccaaagagtagtgcggccattggcatcatctgcttctgataaattgaaagggcgtgctgtgagccctgaaaaggaatttgcgaatggggaaaatgctaatgaggttaattctaacatcgaagactctccaatggttgttgctgcagcccccatatctcctgatgctgctgcgaacgatacctgtcaacaaaatggctttgtctctgattctcatctcggtgcggaaatcgctcttgaagatcagagggatcacatcatcagggagcttaacgcttcaaccaacgtgcctccaagtagatgccaagcctttaaggatgggatgaaacaaggaattatcaatccaagtgatattgatgtcacctttgagaattttccttattatctcagtgagaatacaaagaatgtgctcttgtcatctgcgttcatacacttaaaaaagaaggagttcatcaagcaatttgttgagatctcatcaataaaccagcgaattttgttatctggtccagcaggttccgagatttatcaggaaacattggtaaaggcacttgccaaacattttagtgctagactccttgtggtggattcacttttgctgcctggggcaccttcaaaggatccagaattccagaaagatgttgggaaggctgataaatcaggggataaggcagctgccgagaagtttgcaatatatcagaagcatcgttcttcgttggcagacactgttcacttcaggaggccagctgcaccaacttctagtgtgaatgctgatattgtaggaacatccactctgcattctgcatctctaccaaaacaggaatcgtcaacagctacatccaagagttatacttttagagaaggtgatagggtgcgttatgtgggtccagctcaaccatgctcgttgtcacaaaggggaccaagttatggttatcgaggtagagtgatgcttgcttttgaagataatggatcctcaaaaattggagtccggtttgacaagcagatccctgatggtaatgatcttggtggtttgtgcgaggaagatcatggcttcttctgctctgctgaattactgcgcccagacttttctgctggtgaagaagttgagaggctagctatgaccgagttaatagaggtcatttcagaagagaacaaatctggacctctgatagtgttacttaaggatgtcgagaaatcattcacgggggttacagagtcactatcatctttgaggagcaaacttgaatcgcttccacctggtgttcttattataggatcccacacccagatggacagccgcaaagagaaggcacatcctggaggttttcttttcacgaagtttgccagtagtagccagactctttttgaccttttcccggatagctttggtagcaggttgcatgaaagaagcaaagaaagtccgaaaacaatgaaacatctaaataaacttttcccaaacaaaattttgatccagcttccacaggatgaagctctacttacagattggaagcagcagttggatcgtgatgttgaaacccttaaagccaaatcaaatattggtagcattcgcatgggcctgtgatgcctggactaatgtggtcgtgggttcg

SEQ ID NO: 209722 - DNA, 4213 bp, Zea Mays
ccatcgccatcctcttcgtccgtacctcccccgaagcgctccaaggcggagtcctcggggtcaccgacggcgtccgcgcccggcagggccgaggaggattctgtggcgggagcggcacccgcgaggagcgccggctcggtcgatgacgcggcagcggtcgcacagaaagatcaaggagtcgataagccgtcttccgccgctgcagagagttcaaagcggaggaaggagcaggagcaacagcaacccgcagtgccatgggcgaagctgctctcggagtgctcacagactcctcactatcccatcagtgtggatcagatttctgttggtcaaagcaaaaactgtaatttgtggctgaaagaccaacctgttagcaaagtgctttgcaagctgcggcgccttgagcaaggaggtccatgtgagttagaagttatagggaagaagggtatggtccaattaaatggaaggtccgtaagtccaggcacaaaagttccccttacaggaggggatgaagtcatattcagttcatgcggcaagcatacttatatttttctttatcctttgaatgacaaagttcctaaaacggtgctatcatctgctgttagccttctagaagctcctgttgctagtgtaaagcgtatccgtacagataagagaacaggagacacttcagctgttgctggtacagagatgatgacatctacatctaatcagaaggatgtagcagcagtacctcccgcgtcagctggagagaacagccaaagagtagtgcggccattggcatcatctgcttctgataaattgaaagggcgtgctgtgagccctgaaaaggaatttgcgaatggggaaaatgctaatgaggttaattctaacatcgaagactctccaatggttgttgctgcagcccccatatctcctgatgctgctgcgaacgatacctgtcaacaaaatggctttgtctctgattctcatctcggtgcggaaatcgctcttgaagatcagagggatcacatcatcagggagcttaacgcttcaaccaacgtgcctccaagtagatgccaagcctttaaggatgggatgaaacaaggaattatcaatccaagtgatattgatgtcacctttgagaattttccttattatctcagtgagaatacaaagaatgtgctcttgtcatctgcgttcatacacttaaaaaagaaggagttcatcaagcaatttgttgagatctcatcaataaaccagcgaattttgttatctggtccagcaggcaccttcaaaggatccagaattccagaaagatgttgggaaggctgataaatcaggggataaggcagctgccgagaagtttgcaatatatcagaagcatcgttcttcgttggcagacactgttcacttcaggaggccagctgcaccaacttctagtgtgaatgctgatattgtaggaacatccactctgcattctgcatctctaccaaaacaggaatcgtcaacagctacatccaagagttatacttttagagaaggtgatagggtgcgttatgtgggtccagctcaaccatgctcgttgtcacaaaggggaccaagttatggttatcgaggtagagtgatgcttgcttttgaagataatggatcctcaaaaattggagtccggtttgacaagcagatccctgatggtaatgatcttggtggtttgtgcgaggaagatcatggcttcttctgctctgctgaattactgcgcccagacttttctgctggtgaagaagttgagaggctagctatgaccgagttaatagaggtcatttcagaagagaacaaatctggacctctgatagtgttacttaaggatgtcgagaaatcattcacgggggttacagagtcactatcatctttgaggagcaaacttgaatcgcttccacctggtgttcttattataggatcccacacccagatggacagccgcaaagagaaggcacatcctggaggttttcttttcacgaagtttgccagtagtagccagactctttttgaccttttcccggatagctttggtagcaggttgcatgaaagaagcaaagaaagtccgaaaacaatgaaacatctaaataaacttttcccaaacaaaattttgatccagcttccacaggatgaagctctacttacagattggaagcagcagttggatcgtgatgttgaaacccttaaagccaaatcaaatattggtagcattcgcatgtttctgagccgcaatggaattgaatgcaatgatcttgaagaattattcatcaaagaccaatcattgagtaatgaaaatgtggacaagattgttgggtacgcagtaagttatcaccttaatcagaataaaattgaaacctctaaggatgccaaacttgtactcacaactgaaagccttaagcatgggctcaacatgctccaaagcatgcaaaatgataacaagagctccaaaaaatcactgaaggatgttgtcacagagaatgagtttgagaaaaggcttttggcagatgttatacctccaaatgacattggagttacctttgatgatattggagccttggagaatgtaaaggacacgttaaaggagctggtgatgctccctttgcaaagacctgagttgttctgcaaagggcagttaacaaagccttgcaaggggatattgcttttcggacctcctggcactggaaaaactatgcttgccaaagcagtagcaactgaagcaggcgctaatttcatcaatatatcaatgtcgagcattacatcgaagtggtttggtgaaggggagaagtatgtaaaggctgttttctcactagcaagtaaaatagcacccagtgttatatttattgatgaggtcgatagtatgctaggaaggagagaaaatccaggggagcatgaagcgatgcgcaagatgaagaatgaatttatggtaaattgggatgggttgcgcactaaagataaggagcgtgtgcttgttcttggtgctacaaataggccttttgacctcgacgaggctgtgattaggaggttcccccgcaggttaatggtaaacttgcccgatgcatcaaatagggagaaaattctaaaagtaattttggcaaaagaagagctgggatctgatgttgatatggactcgcttgccaatatgactgatggttattcaggaagcgacctgaagaatctgtgtgtgaccgcggcgcattaccccatccgagaaattctggagaaggaaaagaaggagaagaatttggctaaaacagaaggtaggccggagcctgcattatatggaagcgaggacatccgccctcttagcatagatgacttcaaatctgcccatgagcaggtttgtgcgagcgtttcgtccgactcggcgaacatgaacgagctccttcaatggaacgacctgtacggcgaaggcgggtcaaggaagaagaaagcgctgagctacttcatgtgatggggtgagagcatagaatccagaaggatcacagccgtggcataagatcagaaggaacacagagcggccatagtaccacacccactatggccctaaatccagtcaagttttcgctccttccccctccctcagtagccgccgccgccccgccgccgcctggtgtaattagaactgtgtacggagtcgagttggtttgccagctgtttcaaggttacagagttgagatttggaattacaatggcgccattgccctcctccaacccccccccccccccccccccccccccgttttcttcctcccataagttgcggtcactgtccttcttggactctctggcctttgttcttgtaaatgcgaaatgaagggatgtgaaataagaacatcttcgtcctgttgttgacagtatggtacacatatttaatttttgtacttgaccggcgatgataaattggatcggtgccaacataagaattatggaaaggtgcctttcctgcccgccgaaatctgtgtgtatgtcgagtgggctgggtattgtgaggtgaaattttatgcgtctcctgtcgtcttgtggttgcgaaatgcgtgggagcaaacgtccggcataatgaactttcgtcatttcttatggctgcgaaatgcatgggttcggtatgtatgaattttctctgtcataatgaacttggattctgataacggtgcattgcacagatttcattttttttcttacgtaaacacttcggttctttcta

SEQ ID NO: 209723 - DNA, 4209 bp, Zea Mays
cgcggcagcggtcgcacagaaagagagttcaaagcggaggaaggagcaggagcaacagcaacccgcagtgccatgggcgaagctgctctcggagtgctcacagactcctcactatcccatcagtgtggatcagatttctgttggtcaaagcaaaaactgtaatttgtggctgaaagaccaacctgttagcaaagtgctttgcaagctgcggcgccttgagcaaggaggtccatgtgagttagaagttatagggaagaagggtatggtccaattaaatggaaggtccgtaagtccaggcacaaaagttccccttacaggaggggatgaagtcatattcagttcatgcggcaagcatacttatatttttctttatcctttgaatgacaaagttcctaaaacggtgctatcatctgctgttagccttctagaagctcctgttgctagtgtaaagcgtatccgtacagataagagaacaggagacacttcagctgttgctggtacagagatgatgacatctacatctaatcagaaggatgtagcagcagtacctcccgcgtcagctggagagaacagccaaagagtagtgcggccattggcatcatctgcttctgataaattgaaagggcgtgctgtgagccctgaaaaggaatttgcgaatggggaaaatgctaatgaggttaattctaacatcgaagactctccaatggttgttgctgcagcccccatatctcctgatgctgctgcgaacgatacctgtcaacaaaatggctttgtctctgattctcatctcggtgcggaaatcggtaagactgcaacctataagataaggccagttctgaggatgattacaggatcaactatatccgagttcgatttgactggtgatgatctttttaaagctcttgaagatcagagggatcacatcatcagggagcttaacgcttcaaccaacgtgcctccaagtagatgccaagcctttaaggatgggatgaaacaaggaattatcaatccaagtgatattgatgtcacctttgagaattttccttattatctcagtgagaatacaaagaatgtgctcttgtcatctgcgttcatacacttaaaaaagaaggagttcatcaagcaatttgttgagatctcatcaataaaccagcgaattttgttatctggtccagcaggttccgagatttatcaggaaacattggtaaaggcacttgccaaacattttagtgctagactccttgtggtggattcacttttgctgcctggggcaccttcaaaggatccagaattccagaaagatgttgggaaggctgataaatcaggggataaggcagctgccgagaagtttgcaatatatcagaagcatcgttcttcgttggcagacactgttcacttcaggaggccagctgcaccaacttctagtgtgaatgctgatattgtaggaacatccactctgcattctgcatctctaccaaaacaggaatcgtcaacagctacatccaagagttatacttttagagaaggtgatagggtgcgttatgtgggtccagctcaaccatgctcgttgtcacaaaggggaccaagttatggttatcgaggtagagtgatgcttgcttttgaagataatggatcctcaaaaattggagtccggtttgacaagcagatccctgatggtaatgatcttggtggtttgtgcgaggaagatcatggcttcttctgctctgctgaattactgcgcccagacttttctgctggtgaagaagttgagaggctagctatgaccgagttaatagagaagagaacaaatctggacctctgatagtgttacttaaggatgtcgagaaatcattcacgggggttacagagtcactatcatctttgaggagcaaacttgaatcgcttccacctggtgttcttattataggatcccacacccagatggacagccgcaaagagaaggcacatcctggaggttttcttttcacgaagtttgccagtagtagccagactctttttgaccttttcccggatagctttggtagcaggttgcatgaaagaagcaaagaaagtccgaaaacaatgaaacatctaaataaacttttcccaaacaaaattttgatccagcttccacaggatgaagctctacttacagattggaagcagcagttggatcgtgatgttgaaacccttaaagccaaatcaaatattggtagcattcgcatgtttctgagccgcaatggaattgaatgcaatgatcttgaagaattattcatcaaagaccaatcattgagtaatgaaaatgtggacaagattgttgggtacgcagtaagttatcaccttaatcagaataaaattgaaacctctaaggatgccaaacttgtactcacaactgaaagccttaagcatgggctcaacatgctccaaagcatgcaaaatgataacaagagctccaaaaaatcactgaaggatgttgtcacagagaatgagtttgagaaaaggcttttggcagatgttatacctccaaatgacattggagttacctttgatgatattggagccttggagaatgtaaaggacacgttaaaggagctggtgatgctccctttgcaaagacctgagttgttctgcaaagggcagttaacaaagccttgcaaggggatattgcttttcggacctcctggcactggaaaaactatgcttgccaaagcagtagcaactgaagcaggcgctaatttcatcaatatatcaatgtcgagcattacatcgaagtggtttggtgaaggggagaagtatgtaaaggctgttttctcactagcaagtaaaatagcacccagtgttatatttattgatgaggtcgatagtatgctaggaaggagagaaaatccaggggagcatgaagcgatgcgcaagatgaagaatgaatttatggtaaattgggatgggttgcgcactaaagataaggagcgtgtgcttgttcttggtgctacaaataggccttttgacctcgacgaggctgtgattaggaggttcccccgcaggttaatggtaaacttgcccgatgcatcaaatagggagaaaattctaaaagtaattttggcaaaagaagagctgggatctgatgttgatatggactcgcttgccaatatgactgatggttattcaggaagcgacctgaagaatctgtgtgtgaccgcggcgcattaccccatccgagaaattctggagaaggaaaagaaggagaagaatttggctaaaacagaaggtaggccggagcctgcattatatggaagcgaggacatccgccctcttagcatagatgacttcaaatctgcccatgagcaggtttgtgcgagcgtttcgtccgactcggcgaacatgaacgagctccttcaatggaacgacctgtacggcgaaggcgggtcaaggaagaagaaagcgctgagctacttcatgtgatggggtgagagcatagaatccagaaggatcacagccgtggcataagatcagaaggaacacagagcggccatagtaccacacccactatggccctaaatccagtcaagttttcgctccttccccctccctcagtagccgccgccgccccgccgccgcctggtgtaattagaactgtgtacggagtcgagttggtttgccagctgtttcaaggttacagagttgagatttggaattacaatggcgccattgccctcctccaacccccccccccccccccccccccccccgttttcttcctcccataagttgcggtcactgtccttcttggactctctggcctttgttcttgtaaatgcgaaatgaagggatgtgaaataagaacatcttcgtcctgttgttgacagtatggtacacatatttaatttttgtacttgaccggcgatgataaattggatcggtgccaacataagaattatggaaaggtgcctttcctgcccgccgaaatctgtgtgtatgtcgagtgggctgggtattgtgaggtgaaattttatgcgtctcctgtcgtcttgtggttgcgaaatgcgtgggagcaaacgtccggcataatgaactttcgtcatttcttatggctgcgaaatgcatgggttcggtatgtatgaattttctctgtcataatgaacttggattctgataacggtgcattgcacagatttcattttttttcttacgtaaacacttcggttctttcta

SEQ ID NO: 209724 - DNA, 2564 bp, Zea Mays
catttctgcagatccctgatggtaatgatcttggtggtttgtgcgaggaagatcatggcttcttctgctctgctgaattactgcgcccagacttttctgctggtgaagaagttgagaggctagctatgaccgagttaatagaggtcatttcagaagagaacaaatctggacctctgatagtgttacttaaggatgtcgagaaatcattcacgggggttacagagtcactatcatctttgaggagcaaacttgaatcgcttccacctggtgttcttattataggatcccacacccagatggacagccgcaaagagaaggcacatcctggaggttttcttttcacgaagtttgccagtagtagccagactctttttgaccttttcccggatagctttggtagcaggttgcatgaaagaagcaaagaaagtccgaaaacaatgaaacatctaaataaacttttcccaaacaaaattttgatccagcttccacaggatgaagctctacttacagattggaagcagcagttggatcgtgatgttgaaacccttaaagccaaatcaaatattggtagcattcgcatgtttctgagccgcaatggaattgaatgcaatgatcttgaagaattattcatcaaagaccaatcattgagtaatgaaaatgtggacaagattgttgggtacgcagtaagttatcaccttaatcagaataaaattgaaacctctaaggatgccaaacttgtactcacaactgaaagccttaagcatgggctcaacatgctccaaagcatgcaaaatgataacaagagctccaaaaaatcactgaaggatgttgtcacagagaatgagtttgagaaaaggcttttggcagatgttatacctccaaatgacattggagttacctttgatgatattggagccttggagaatgtaaaggacacgttaaaggagctggtgatgctccctttgcaaagacctgagttgttctgcaaagggcagttaacaaagccttgcaaggggatattgcttttcggacctcctggcactggaaaaactatgcttgccaaagcagtagcaactgaagcaggcgctaatttcatcaatatatcaatgtcgagcattacatcgaagtggtttggtgaaggggagaagtatgtaaaggctgttttctcactagcaagtaaaatagcacccagtgttatatttattgatgaggtcgatagtatgctaggaaggagagaaaatccaggggagcatgaagcgatgcgcaagatgaagaatgaatttatggtaaattgggatgggttgcgcactaaagataaggagcgtgtgcttgttcttggtgctacaaataggccttttgacctcgacgaggctgtgattaggaggttcccccgcaggttaatggtaaacttgcccgatgcatcaaatagggagaaaattctaaaagtaattttggcaaaagaagagctgggatctgatgttgatatggactcgcttgccaatatgactgatggttattcaggaagcgacctgaagaatctgtgtgtgaccgcggcgcattaccccatccgagaaattctggagaaggaaaagaaggagaagaatttggctaaaacagaaggtaggccggagcctgcattatatggaagcgaggacatccgccctcttagcatagatgacttcaaatctgcccatgagcaggtttgtgcgagcgtttcgtccgactcggcgaacatgaacgagctccttcaatggaacgacctgtacggcgaaggcgggtcaaggaagaagaaagcgctgagctacttcatgtgatggggtgagagcatagaatccagaaggatcacagccgtggcataagatcagaaggaacacagagcggccatagtaccacacccactatggccctaaatccagtcaagttttcgctccttccccctccctcagtagccgccgccgccccgccgccgcctggtgtaattagaactgtgtacggagtcgagttggtttgccagctgtttcaaggttacagagttgagatttggaattacaatggcgccattgccctcctccaacccccccccccccccccccccccccccgttttcttcctcccataagttgcggtcactgtccttcttggactctctggcctttgttcttgtaaatgcgaaatgaagggatgtgaaataagaacatcttcgtcctgttgttgacagtatggtacacatatttaatttttgtacttgaccggcgatgataaattggatcggtgccaacataagaattatggaaaggtgcctttcctgcccgccgaaatctgtgtgtatgtcgagtgggctgggtattgtgaggtgaaattttatgcgtctcctgtcgtcttgtggttgcgaaatgcgtgggagcaaacgtccggcataatgaactttcgtcatttcttatggctgcgaaatgcatgggttcggtatgtatgaattttctctgtcataatgaacttggattctgataacggtgcattgcacagatttcattttttttcttacgtaaacacttcggttctttcta

SEQ ID NO: 209725 - DNA, 740 bp, Zea Mays
cctgtgtaaacatactgcactactcatttggggagatcagagtgttgtcgcctcccttgcatcagatagaaatgtctgggatgcagtattgaagaatgagaaggttatggaattttataagactcaccagacaagtatgtactcatgcgacttagacaaagtcatacgtttcatattcatcatttctaccaacctgtatgaccattgtcgttgtcctctgctatgacacagctccagttcagacattccctgaggaagcagccacagcagagtcgcctgggaagtttgaagatgccacctctgaaaatgcatccaacagcgaactccccacgggctcaggcgcaagtttcgcagatttcgtggacaatgcgaagaagaaagtgatggatgtggtccacaatataaccgactttttcagggacttgttcaatgactcagccgaggcccagaccggagcaggcccttcagctgagaagggcttttctgcaacagagatggctgtgggaggatccttcatggctctgaccatagcggtcatcctagttgttctgttcaagagggcatgatagctcaagagtcatgggtaccttctgggacccatcgtgctttaaatctgtcgaaaattactcgtctgtcgtatggtcaataattccgaatgcaatgtatagcttgtccgtttctttggaaacagtacaataaaggatttatctaaagtatgctcctatacactgtagtttctc

SEQ ID NO: 209726 - DNA, 2997 bp, Zea Mays
caaggttgcaacttgcaagcagatctcaactggtgcgcgcgcacacacacgcacagatctgagccacgcgcacaggcagtactgccccctttcttctccaagtccggccggctgatcggtcgttatgtatatgaacgtggtggtggggttctttttatggtgagtggtttcgagctaggtggtggcggccggctgggttttcgttccgtggctaactgacagaagagagtgagcacacagcgggcagactgcatcgatcgatctgcatccgagacggcgcacgtacgaatgatgatgcagctgctgctgcgtgctcacttctctctctgtcagtcctctagctgctacggcctctctcccggcctgccaccactataacttcaccttgccatggtggccggccactactctactctactctctctctctttttgctgcatgcgttgttgcaactcgaagttgcaggccggtgaatgaatgaacgaacgggtgggtcagctgacttttactgcgacgggacagcaggggttcgcaggggagggatagaggaatgcaaagataaggccggccaccgatcgatttgggcggggtctcgtccttatcttgtacgactgcggctggacggccagcctctcgccgcccgaggagcggtggtgcagtcggacccgttctttggagcaaggccgtgcgtggtctcgatcggcttcccaaggtcgagggagagggggggacatgcctcgggcgaaggaaggaggtgcccgcgcgcgtgatctcaccgatctcgctgctggcgcggctttccaaagcacgcctgcgtaggagtagtagccgaacctagctcggtgtccggctgccgcttcgagatctgttgataactcgaagaaaaatacccaagatctggacttttaccccgagtccccgacccttccctgtcttgctggctgtttcttttcatcaccctcagtggtgccatcatctcatgtgctggaggtaggtttttgggcgggagccatggtggtgccgccttctgcaggaggtagatctgcctgtccggaagaggaaaggagaatcagtgcgcctgacttccagatctggaagctgctgttcgtacttgcggatctcaacatgtacggtgactgcactgcacatacgtttgcttgctcttctaacagtcgtttccttgcaggcaagggcaaatttccacatactgctgctaaattcttacttttctacatatatatagtttgatacagtaaaccaaatcagcgttaatatggcttttgttgatcctgatctttgaaattgacatttgttgtgcacagataaattcaatttttttaatgtttgaagatgtagtggatcttttcagatcttatatatgcatgtatatattcctgtacttctgttttctcttgaacgaggcgtagatggccagcaacaatctggcatacatgaataaccaatattttcattttatggcactagcataacatggttttctttgtgtagttctccagagattcctaattaattatatgcacatctggacctagcttggcaactgtatactcctaattaattaattaatcgattaagcatcaaattgttctttcgtttgcctgcagggattttctaaattcttatcatccacgcgttttttactgcacaaaaaacattatccaatcgaatgtgtcatcaaatatcctcttataaagtcataattagcttcttcaaaagtgctacttaagttttgtcattcttaattaatgcttttgaacaaaatatgaaatggacgctcattacaatttcatgtggtcctgccagttccaggcctagaagtacatatcttttgcaaagattgagatgttttttttccaaaacaagaaatagttgcaattttatgtggaccttcacataattgctttgttaaactgaataggctagggtatactcctatatatgcaagtcacccttatttcatctgtatttttgttctatataggcatatatttcgtctaacaccttgtctcaaatcaactgcgctctacacagccatgcatatataactattacattttagtttggaatctgaaaaaaacctattttttcactatcattatttgctctcatgattaatatgatcatgttattcatttataccgtatataattatgatagctaagtctttgcatgatttgtataattgtttccagtgctcctatttgtatatatatggtctataaggagagggggttacattaatttgtactataaggtgttttacaaaatggattttctcctaataatgtttggatttctgtccatctgaattcgagataaggcataccaaacatttacactgtggatcacagtttgtgtgtctcctcctaagcttatccacatggccggaactgaacaggcatagccttcctgagcatggttcctgggcacgtgttgccaatatttggacatctggagataaaactctgattgcatgaggtcgtgaatcaggagcgccgatcgccaacgcctttctctggtcccaagattatgaaacttgcatgctctccagagaatagtgatgacacaacagggctgcatcagactgtgtgcacatatagacttgttgcatctgtgcttgaaaaattgaacagtagcctagctagcttgtatatattttggtagcaggttgttagttatccattcggcgaaatctctagttgccccttgaattcgttaatcttatgtagcaggcatctttaaactttttagcaggtctgcagaatattttgtcaatatttattcaattttgtacatttgaaattatcaatacaatgttatatttcagatatcatgcccaatattatcagtctacaaaggtggatccggcaaggagtggtgtggactcattccttcttaaaaagtcctgtttaggactactctggctacaaacaatttgatgggcggatagagcaggttattaggtactttagaaaa

SEQ ID NO: 209727 - DNA, 1205 bp, Zea Mays
gcgccaaacaatcaaaccgggacttccttgtcacagtccatgtcgtagctattatgacatgggaatgggatggatgctgaaactttgctagctagctagctgaaaggctccggccgggcctggctggtacacacgcccagatccttgttgtgcacgtacgttccaaacttgctcatactactcagagcgcggcgacatgttcggctttctgaaacaacggaggcagaccccgtcagggttctcgtcgtcgtcagccgccgaggaggtcaccgccggcatcgatggctccggcctcgtcgcgatcgtcacgggcgcgtctagtgggatcggtgccgagacctgccgagttctggcgctgcggggcgttcgcgttgtgatgggcgtgaggacaccgtctgccggtgagcgcgtcaaggaagagatcgtgaagaacgtccccgctgccgattctccccacagccagattctcagaaaagctggtcagaaaaaagctgaaccaaacagacacgttagcagcatgtcatccgtcaagagattcgctgacaacttcaacggactaaatctcccactcaacattctcatgaagaagatgcaaaagtagtagtcaactcactgcatccgggagttgttgccaccaacatcacgcgccatctgggtatcataaaagatattctttctccaattgctaaacttgtactaaggggtgttgaacaaggtgcagccaccgtttgttatctggcattgcatcctcaggttgctggagtcaccggcaaatactttgtggatttcaatgctgttgaactaaaaccgcctgcaactgacaaggagttgtccaaaaagctctgggattttagtgtcagcctactccagtgatataactgccgattagttctcctacgccagctggtaaataaaggtcgatctgaatgagagatcatgtttcagtaatagaacaaggtgatccagcagtgtaatatctactactacttattgtttgactagatatggatgccatatgtttgtaatttgaataaattgattggatacatttctgcacttgtttgaattgtggcaatgtcggacatgtctaaagatgtgatactattgagtgttgagatgcacatttttttttaaatcctttgtccataaaatttccgtttatgtgctgaaaacagttgtgtgttgtcttcttcatagttcataac

SEQ ID NO: 209728 - DNA, 1167 bp, Zea Mays
gcgccaaacaatcaaaccgggacttccttgtcacagtccatgtcgtagctattatgacatgggaatgggatggatgctgaaactttgctagctagctagctgaaaggctccggccgggcctggctggtacacacgcccagatccttgttgtgcacgtacgttccaaacttgctcatactactcagagcgcggcgacatgttcggctttctgaaacaacggaggcagaccccgtcagggttctcgtcgtcgtcagccgccgaggaggtcaccgccggcatcgatggctccggcctcgtcgcgatcgtcacgggccattttctactcactaatcttttacttgaaaagatgaaaatcacggccatggagagtggaatagaaggtagggttgtgattgttgcttctgacagctacaagcacacgtatcgagagggaattcgttttgataaactcaatgatgcatcaggctataaaggcatcctggcttatggccaatcgaagctggccaatatattgcgttccaatgaactttcttgccgcttgaaggaagaagatgcaaaagtagtagtcaactcactgcatccgggagttgttgccaccaacatcacgcgccatctgggtatcataaaagatattctttctccaattgctaaacttgtactaaggggtgttgaacaaggtgcagccaccgtttgttatctggcattgcatcctcaggttgctggagtcaccggcaaatactttgtggatttcaatgctgttgaactaaaaccgcctgcaactgacaaggagttgtccaaaaagctctgggattttagtgtcagcctactccagtgatataactgccgattagttctcctacgccagctggtaaataaaggtcgatctgaatgagagatcatgtttcagtaatagaacaaggtgatccagcagtgtaatatctactactacttattgtttgactagatatggatgccatatgtttgtaatttgaataaattgattggatacatttctgcacttgtttgaattgtggcaatgtcggacatgtctaaagatgtgatactattgagtgttgagatgcacatttttttttaaatcctttgtccataaaatttccgtttatgtgctgaaaacagttgtgtgttgtcttcttcatagttcataac

SEQ ID NO: 209729 - DNA, 1704 bp, Zea Mays
gcgctgcgtttcttgatctgtgcccgcaccgagccgtgccctagtttcttgccgtgctggggttgggttcgctccattcggtgcggcgagatgcggcatggcttacttcggcggagcaggagcagcagcagcagccccggcaatggactggtccttcgctagcaagcccggcgccgccccggcgttgatgtcgttccggtcagcttcgttcccccagttctcctccttcgacggcgccaagaacccggcccctcgtatcctcacgcaccagaggtcgttcggccccgacagcacgcactacgccgccgcgcaccgcacgcagcatgcgctgaacggggctagagtcactccggtctcgtcgccgttcaaccagaacagtccgatgttcagggtccagagctcgcctagccttccgaacggtactgcgttcaagcagccgccttttgccatcaacaacaacgctgcggccagttctactgttggtttctatggaacaagggatgtggtgaggccaaagacagcacaattgacgatcttctatgctggttctgtcaacgtattcgacaacgtctcagctgagaaggctcaggagctcatgctcttagccagcagagggtctcttccaagctcagcccccgtggcccgtaagccagaagctcctattctcgctccagcaaaagtcacagcgcctgaggttttgcatgcaacacagatgctgtttcaaaaaccacaacacgtttctccaccttcgtctgccatctccaaaccaatccctggcatcttgcaagctgcaagtctccccaggagcgcctcgagctctaaccttgactccccatttccaaaatcttcagtgccatttcctgtttctcctgtaagtcaggctccgagagctcagcctgcaaccattgccgctacaactgcagcagcaataatgcctagagctgtccctcaagctagaaaggcgtcccttgctcgattcttggagaaaagaaaggaaagggtgacaactgctgcaccttacccatcagccaagagcccgatggagagcagtgacacgtttggcagtgggagcgccaacgacaagtcatcatgcacagacattgccctctcaagcaaccatgaggagtccctatgtttagggcagcccaggaacatcagcttcatccaagagtcccccagtacaaaactacagatctgatctgaatatctgatcatgcccaatgttcatagatttgtccaggctgactgatgcaaggaccatacgatacttttgcattcaggcaaggactcgagaggaagagattacgtatgttatcggtgccgctagctgttgtttatgatgatgttttgttgtgctagtttactgtgatgctggtggtgcccccacctaactaacaagagagctgtcacttgcagactcttgatttttttttgtcctagcgccatttctttagcggtatcaagtcaatttatataggcttacaaattctgcgccttttgtatggccaaagtgtaatatttttgttcttgtattatgaacctccatgctgcagaatgcaagagcaaatcttattgtcgatggtgttctcattgccagcatgtgtacgcagtagcggttcatgttgttttgagctgttctgttttaataatatctcaaaaggttgccgattggtgcccgtaaggatgacatttcaagaacagatg

SEQ ID NO: 209730 - DNA, 1892 bp, Zea Mays
aagccattaaacaaacacaaatagcacacacgggcacacggcaggcctacaactacaagaggagaggagaagagagaggagaattttcaatgctgccgcgcaccgtcatcactagctagtggaggggcggacgagaaggcgaggagctgaggggagagaggcttcacagagcttgcttgagcctggagggggctgccgctgtttgtctctccactccacccaccagcagttacctcgggagggcatggcaaaatctggtgcctcctttccggagtccagttggatggagagggatttcctggccgcgatcggcaaggagcagcagcacccgcacaaggaggaggcaggcgcggaggaatctgcttacttcggcggagcaggagcagcagcagcagccccggcaatggactggtccttcgctagcaagcccggcgccgccccggcgttgatgtcgttccgaggtcgttcggccccgacagcacgcactacgccgccgcgcaccgcacgcagcatgcgctgaacggggctagagtcactccggtctcgtcgccgttcaaccagaacagtccgatgttcagggtccagagctcgcctagccttccgaacggtactgcgttcaagcagccgccttttgccatcaacaacaacgctgcggccagttctactgttggtttctatggaacaagggatgtggtgaggccaaagacagcacaattgacgatcttctatgctggttctgtcaacgtattcgacaacgtctcagctgagaaggctcaggagctcatgctcttagccagcagagggtctcttccaagctcagcccccgtggcccgtaagccagaagctcctattctcgctccagcaaaagtcacagcgcctgaggttttgcatgcaacacagatgctgtttcaaaaaccacaacacgtttctccaccttcgtctgccatctccaaaccaatccctggcatcttgcaagctgcaagtctccccaggagcgcctcgagctctaaccttgactccccatttccaaaatcttcagtgccatttcctgtttctcctgtaagtcaggctccgagagctcagcctgcaaccattgccgctacaactgcagcagcaataatgcctagagctgtccctcaagctagaaaggcgtcccttgctcgattcttggagaaaagaaaggaaagggtgacaactgctgcaccttacccatcagccaagagcccgatggagagcagtgacacgtttggcagtgggagcgccaacgacaagtcatcatgcacagacattgccctctcaagcaaccatgaggagtccctatgtttagggcagcccaggaacatcagcttcatccaagagtcccccagtacaaaactacagatctgatctgaatatctgatcatgcccaatgttcatagatttgtccaggctgactgatgcaaggaccatacgatacttttgcattcaggcaaggactcgagaggaagagattacgtatgttatcggtgccgctagctgttgtttatgatgatgttttgttgtgctagtttactgtgatgctggtggtgcccccacctaactaacaagagagctgtcacttgcagactcttgatttttttttgtcctagcgccatttctttagcggtatcaagtcaatttatataggcttacaaattctgcgccttttgtatggccaaagtgtaatatttttgttcttgtattatgaacctccatgctgcagaatgcaagagcaaatcttattgtcgatggtgttctcattgccagcatgtgtacgcagtagcggttcatgttgttttgagctgttctgttttaataatatctcaaaaggttgccgattggtgcccgtaaggatgacatttcaagaacagatg

SEQ ID NO: 209731 - DNA, 2407 bp, Zea Mays
gtacacgtagttaccatatcaatggaattctagggttcaaggggatcatctgcagttgtttgaatggttgaaataaatcttctcttttataattcagggttgaattttatgtctttaagagtgggtgttgttagaatacaagtgaattgcccatctcttctatcagcttgagcttttgggttgaattggttggataaaagattgaagtctcgagttcgaatcttggttagcgcaattaaataaaataattgttgcttgcttttattccacgtctgaggcttgagagagcctcggcatcaggagtgttagaatacaagtgaattgccatgacttaatttgtgtaggggcaggaggtataaatctttgctcgttcagaagaaagctgttaggttgagagtgaggaggaagttttagttacatggtggatatgttagttccttggaggaaattgaagtcacacaaacgttagatgagatatgagcatatgacatttctttttgttttgaagcttatgccttctgcagttttatgttcacctacctactgggcagcgattcttatcaaaagcatggtggatatgttagttccttggaggaaattgaagtcacacaaacgttagatgagatatgagcatatgacatttctttttgttttgaagcttatgccttctgcagttttatgttcacctacctactgggcagcgattcttatcaaaagcagaagtattgcactttgttaataagggcatggtttctacatgtgatatggatgtgctgtgcgacactagcactgatgataatatacttgctcatgtggaattcaatcctgatggtttaccagatggatgggtgaaagaaacgatatctagaaagttcaatgatggaatcagaaaagaccagtactataccgatcctgttagtcaccgtgtatttcgcacgcttaagtctgtattgagctaccttggaaccggagaaatatctaggcattcctatttaccaaggagaaatgtcattgacatgtattcatttgataagtgtgcagatctgcccaaaagcatggtgaaaagattgaaagcaaaaggacaagcaaagaaaaaattcatgagagcacaggttttagacaaggacttatctaatgggcagacttcaaatcactgtgaaggtgctattgggttaactcaatctgacccggaaggagataagtttggatctatggaagcggcatgcgaaaaggggaccagttcagagactatgaaacagcgaatagggaggccaaagaaaatcttgaagcaaacaaatgatagcatttcggatcgtgacaagggttcacatcaggagcacatcgaggccaaagaggaagttgatatctgtggtgggaaagacttgacgcatttgaaaactctggagcgtaccgaggctcagaatagcacaatgataaccaaggaagtaaacaacaacgacacagcagagaaaaacctatccaagatagagggagacaactcggatctggtaaccggcacgggtttgcacaagcaagagaatagcagattaactgaagttagtgagaaggcaacattctccacaggttacaaattttacaagaggagaagttgcaataagacatgaggttcaagaaaagcataaaattagatcaagttatctgtagtccagaatacaggcactttgttatactatcaaggaacgttcttgcggcttctgtagcaatcaactcaactgtgagcagttgtaaggagccaggctattttgcttttcatatcctaactgacgctcagaacttctatgccatgaaacactggtttgccaggaattcgtataaaaatgcagctatctgtgtcataaactacgaagcaattattttggagaaacttccaaagtatactatccggcagctgtatttgccagaggagttccgtgttctcattaggagcattaagcggcctactgaaaacacaagaatgaaatacctgtcactgttcagcccctcacatttcgttattccagaaatattcaagtatctaaaccttgacgcatccacaacgttggaatatatatgtactcatattcggattatagaatacaggcttatctgtagaaaattaatataaaaataacaaatttgatgtttgtgtactgatgctaacacaggaatatgggaatagtttttttttcatgtgcttttatataaaatcaaactggtgagactacaaaattcatgtattaatttatataataaccttgcattccaaataggccatcgtataagatagtcaattccataggagttttaaaaaaattaatacgtaagattcaataatttattccagagactcttagaaacctctggcagcaaaagccccaagacaaaaaatatacctaatgagttattt

SEQ ID NO: 209732 - DNA, 2427 bp, Zea Mays
atatcaatcaacattgtacacgtagttaccatatcaatggaattctagggttcaaggggatcatctgcagttgtttgaatggttgaaataaatcttctcttttataattcagggttgaattttatgtctttaagagtgggtgttgttagaatacaagtgaattgcccatctcttctatcagcttgagcttttgggttgaattggttggataaaagattgaagtctcgagttcgaatcttggttagcgcaattaaataaaataattgttgcttgcttttattccacgtctgaggcttgagagagcctcggcatcaggagtgttagaatacaagtgaattgccatgacttaatttgtgtaggggcaggaggtataaatctttgctcgttcagaagaaagctgttaggttgagagtgaggaggaagttttagttacatggtggatatgttagttccttggaggaaattgaagtcacacaaacgttagatgagatatgagcatatgacatttctttttgttttgaagcttatgccttctgcagttttatgttcacctacctactgggcagcgattcttatcaaaagcatggtggatatgttagttccttggaggaaattgaagtcacacaaacgttagatgagatatgagcatatgacatttctttttgttttgaagcttatgccttctgcagttttatgttcacctacctactgggcagcgattcttatcaaaagcagaagtattgcactttgttaataagggcatggtttctacatgtgatatggatgtgctgtgcgacactagcactgatgataatatacttgctcatgtggaattcaatcctgatggtttaccagatggatgggtgaaagaaacgatatctagaaagttcaatgatggaatcagaaaagaccagtactataccgatcctgttagtcaccgtgtatttcgcacgcttaagtctgtattgagctaccttggaaccggagaaatatctaggcattcctatttaccaaggagaaatgtcattgacatgtattcatttgataagtgtgcagatctgcccaaaagcatggtgaaaagattgaaagcaaaaggacaagcaaagaaaaaattcatgagagcacaggttttagacaaggacttatctaatgggcagacttcaaatcactgtgaaggtgctattgggttaactcaatctgacccggaaggagataagtttggatctatggaagcggcatgcgaaaaggggaccagttcagagactatgaaacagcgaatagggaggccaaagaaaatcttgaagcaaacaaatgatagcatttcggatcgtgacaagggttcacatcaggagcacatcgaggccaaagaggaagttgatatctgtggtgggaaagacttgacgcatttgaaaactctggagcgtaccgaggctcagaatagcacaatgataaccaaggaagtaaacaacaacgacacagcagagaaaaacctatccaagatagagggagacaactcggatctggtaaccggcacgggtttgcacaagcaagagaatagcagattaactgaagttagtgagaaggcaacattctccacaggttacaaattttacaagaggagaagttgcaataagacatgaggttcaagaaaagcataaaattagatcaagttatctggtcagtagtccagaatacaggcactttgttatactatcaaggaacgttcttgcggcttctgtagcaatcaactcaactgtgagcagttgtaaggagccaggctattttgcttttcatatcctaactgacgctcagaacttctatgccatgaaacactggtttgccaggaattcgtataaaaatgcagctatctgtgtcataaactacgaagcaattattttggagaaacttccaaagtatactatccggcagctgtatttgccagaggagttccgtgttctcattaggagcattaagcggcctactgaaaacacaagaatgaaatacctgtcactgttcagcccctcacatttcgttattccagaaatattcaagtatctaaaccttgacgcatccacaacgttggaatatatatgtactcatattcggattatagaatacaggcttatctgtagaaaattaatataaaaataacaaatttgatgtttgtgtactgatgctaacacaggaatatgggaatagtttttttttcatgtgcttttatataaaatcaaactggtgagactacaaaattcatgtattaatttatataataaccttgcattccaaataggccatcgtataagatagtcaattccataggagttttaaaaaaattaatacgtaagattcaataatttattccagagactcttagaaacctctggcagcaaaagccccaagacaaaaaatatacctaatgagttattt

SEQ ID NO: 209733 - DNA, 2051 bp, Zea Mays
cccatcagtgggtttgtaacacaaatggatgaagtgaggagagttaacaaatggatgaagtgaggagagttagcagaagatgcagcactgtagactgaccaaattccccccgcgggcgacgaagaacatcactgtagggctgatttggtgaccggggatcccgaggggaagaaatcctcttgctattcaaaattgaattgcaaggggattcctcccccatggatcccctagggatccctaatcaccaaatcagcccgtagactgaccaaattccccgcgggcttgcggccaaacctttcaccgaggccgcaccctcccgtgcatgtcactcctgccggcgccgggcgtcctatggtagagactcgccgctcagcgcggaggagcggcagcggttcgctcccggccgacggagcgccgtccgagccggcatccagctcccctgcaacctccctccccccgcgggagaataatggcctggttatctctaatgacaacacattgaagcagaccgtggaggtagaaaaacaggggaggcaaggtaaggaggtcttagtggttcatgaattggatgagtcgaatgaggattctgggtcattggatgagccgccgggttggcttcctgacggttggactatggaggtttgtcaagaagacaatggctccatctacaagtactacacttccccaatgtccggatacatgttcacatcaaagatggagacattgcattatcttttctcaggggtggaagaacgcatgttggagttgcaggcaagcgccgaggacaacgagcttcatgagtcacatacatggcttccacgtgggtgggtgattgaagtcagagccggtgggaagaaaatggacaaaatgtacaagttttatgttcacctacctactgggcagcgattcttatcaaaagcagaagtattgcactttgttaataagggcatggtttctacatgtgatatggatgtgctgtgcgacactagcactgatgataatatacttgctcatgtggaattcaatcctgatggtttaccagatggatgggtgaaagaaacgatatctagaaagttcaatgatggaatcagaaaagaccagtactataccgatcctgttagtcaccgtgtatttcgcacgcttaagtctgtattgagctaccttggaaccggagaaatatctaggcattcctatttaccaaggagaaatgtcattgacatgtattcatttgataagtgtgcagatctgcccaaaagcatggtgaaaagattgaaagcaaaaggacaagcaaagaaaaaattcatgagagcacaggttttagacaaggacttatctaatgggcagacttcaaatcactgtgaaggtgctattgggttaactcaatctgacccggaaggagataagtttggatctatggaagcggcatgcgaaaaggggaccagttcagagactatgaaacagcgaatagggaggccaaagaaaatcttgaagcaaacaaatgatagcatttcggatcgtgacaagggttcacatcaggagcacatcgaggccaaagaggaagttgatatctgtggtgggaaagacttgacgcatttgaaaactctggagcgtaccgaggctcagaatagcacaatgataaccaaggaagtaaacaacaacgacacagcagagaaaaacctatccaagatagagggagacaactcggatctggtaaccggcacgggtttgcacaagcaagagaatagcagattaactgaagttagtgagaaggcaacattctccacaggttacaaattttacaagaggagaagttgcaataagacatgaggttcaagaaaagcataaaattagatcaagttatctggtgagttttatgggtcgccgcccaaaagttgtatcatacttcttcagggaacaaatggaaccaaagttgatctggaattaatactggttgtagagagcaggatttaacacttgacagcaggagcatcaaaggaatcaaatttaagaagctttcgttaacctgagggctgagacataaatgccgtcaa

SEQ ID NO: 209734 - DNA, 2917 bp, Zea Mays
ttccccctctcttcgcctttttctgtttcttcccccttctttatactcgctggcagcggcgggcgacggtcgtggtgcactgctgccgcggccgcgcggagggagggcccctgatcgcccgcttctactacaactatattctgtcgccagcgcacaagcggcgggggcacggggtagattcggagcggctcttggcttgcagtccagacgcccttcacccctgatctggaccggagggagcggctccttccgtcagttgttcttgctttgcctgggcctcttccgcctgcttcgtgttcttcacaggagccggtgacctcggacgatatcttggaggacaagatgtcgggggctgttcttgtcgccatagtcgcctccatcggcaatctattgcaggggtgggacaatgccaccatcgcagctgctgttctgtatataaagaaggaatttcaattgcaaaatgagcccactgtggagggactaattgtgtcaatgtcacttatcggcgccaccatcgttactacattctccgggccattatcagactcgattggccgacgccctatgcttattctctcttcaattctgtacttcttcagcggcctcatcatgctatggtctcctaatgtctatgtcctgctgttggcacgcttcgtagatggatttggtattggcttggctgtcacgcttgtgcctttgtacattttcagaaatagccccttcggagattagaggtttgctgaatacactaccacaattcagtggatcaggaggaatgttcttgtcatactgcatggtgtttgggatgtccctgtcgccatcacccgattggagaattatgcttggtgtgctcgcgataccttcattgttcttctttggtttgacaatattttatcttcctgaatctccaagatggctcgttagcaaaggtcggatggcagaggcaaaaaaggtgttgcaaaagttacgggggaaagacgatgtctcaggtgaattgtcccttcttctcgaagggttggaggttggaggagacacttccattgaagagtacatcattggacctgccaccgaggcagccgatgatcttgttactgacggtgataaggaacaaatcacactttatgggcctgaagaaggccagtcatggattgctcgaccttccaagggacccagcatgcttggaagtgtgctttctcttgcatctcgtcatgggagcatggtgaaccagagtgtaccccttatggatccgattgtgacactttttggtagtgtccatgagaatatgcctcaagctggaggaagtatgaggagcacattgtttccaaactttggaagtatgttcagtgtcacagatcagcatgccaaaaatgagcagtgggatgaagagaatcttcatagggatgacgaggagtacgcatctgatggtgcaggaggtgactatgaggacaatctccatagcccattgctgtccaggcaggcaacaggtgcggaagggaaggacattgtgcaccatggtcaccgtggaagtgctttgagcatgagaaggcaaagcctcttaggggagggtggagatggtgtgagcagcactgatatcggtgggggatggcagcttgcttggaaatggtcagagaaggaaggtgagaatggtagaaaggaaggtggtttcaaaagagtctacttgcaccaagagggagttcctggctcaagaaggggctcaattgtttcacttcccggtggtggcgatgttcttgagggtagtgagtttgtacatgctgctgctttagtaagtcagtcagcacttttctcaaagggtcttgctgaaccacgcatgtcagatgctgccatggttcacccatctgaggtagctgccaaaggttcacgttggaaagatttgtttgaacctggagtgaggcgtgccctgttagtcggtgttggaattcagatccttcaacagtttgctggaataaacggtgttctgtactataccccacaaattcttgagcaagctggtgtggcagttattctttccaaatttggtctcagctcggcatcagcatccatcttgatcagttctctcactaccttactaatgcttccttgcattggctttgccatgctgcttatggatctttccggaagaaggtttttgctgctaggcacaattccaatcttgatagcatctctagttatcctggttgtgtccaatctaattgatttgggtacactagcccatgctttgctctccaccgtcagtgttatcgtctacttctgctgcttcgttatgggatttggtcccatccccaacattttatgtgcagagatctttccaaccagggttcgtggcctctgtattgccatttgtgcctttacattctggatcggagatatcatcgtcacctacagccttcctgtgatgctgaatgctattggactggcgggtgttttcagcatatatgcagtcgtatgcttgatttcctttgtgttcgtcttccttaaggtccctgagacaaaggggatgccccttgaggttattaccgaattctttgcagttggtgcgaagcaagcggctgcaaaagcctaatttctttggtacctttgtgtgcaactattgcactgtaagttagaaacttgaaggggtttcaccaagaagctcggagaattactttggatttgtgtaaatgttaagggaacgaacatctgctcatgctcctcaaacggtaaaaaagagtccctcaatggcaaataggagtcgttaagttgtcaatgtcatttaccatatgttttacctatttgtactgtattataagtcaagctattcaacgctggttgttgctagaaatctttagaacaaagatgataatgatctgatctgatgttataatattcaaatctcaaataaagaaaatatcgtttctca

SEQ ID NO: 209735 - DNA, 2647 bp, Zea Mays
ctagcttccgtcaccgctcccccagtaggccagtaccaccaaatctctagcgaggccgcccgcaaccgtgtcccggggttgaggatctgcgcggggccgtcctcgcgcgcgccgccgcatccccgccgtcccactccggcgaggctggctgcgttccgtcgtcgtcccccgcaccgccgctgactcctggaacaggaaccagcttcttcgcccccaccatctcacgtccagcgtcgcgaactcgcgatggcgggcgccgccactcctcctccgtcgtcgtcgtcgtcggcgtcgtgtggcacggacgctgcctacctgctgttccgcggggagacgctgctccccgacggcgtccacgcctccctctacgccgtcgctctcgcgtactgcttcgtggggctgtccgcggtcacggcccgcttcttcaaatccatggagcagatcatgaggcactcccgggaggtggtggtcggcgtggacccgcgcaccggggcgcccgtcgtgaggcgcgacaaggtgtggaactacaccgtcgcggacattgctctcctcgccttcggcaccagcttccctcagatctccctcgccaccatcgacgccatccgtaacctcggtcaactcacagcaggaggtctaggtccaggcacacttgtcggctctgcggcgtttgatctgtttccgatccacgctgtctgtgtgcttatgccaagggcgggatcaaagaagaagatctcggacctgggcgtttggttagtcgagctcttctggtctttctgggcatatatctggctctatgtcatcttagaggtgtggacgcctagagtgatcaccctctgggaggcatcgctgacagtcctgcagtatgggctgcttctactccatgcgtatgcgcaggataaacgatgtccatttgtgtcgatcccgtttgcgagaggtgagaggcctgaagattgggttccaccagaagatgtttctgctgtttattacgccaaatgtgatggcattgacgagacactccctatgggtgctgacgggaacgatgggattgtagacatcttctctgcacattcctactacgatgcagcagtcaacttgcagaagaggatatggaaggatcgtcaacaatggatcaagttgtaaagaacacacaagataacatgtcctggctttctatttggtggcaacaatttgttgatgcttcaatggtaatttggttcatttcatttatgggacagatgtgcctaacccttttaatacattggacaccataactagcatggtgcatggactgggaaatatgttctagacttttattttacaaatagttgatgaatttatttctaggtgctgctgagacaaatttgtttcccagagatagttatattgaaatagtttaatccacaccccttcccatctagccaggagaaaattcagtagcattaacatttgtcatttgccagtcttaaaactgagccccaatattaagaactttctgttttttttggcatagtaattgtttttttagcaatacatgcagttggagagccctgagtcaatgaagatggattctgtctgcctgaggtacaccagaatattttggaacttgatcattgcgccttggaagtttttgtttgcttttgtgcccccataccacattgcacatggctggattgcttttatatgctcactgatcttcataagtggtattgcttatggtgttactaagcttacagatcagataagctgcgtcacaggagtaagtccatatgttattgcattcacagcactggccgctggaacctcatggccagatctagttgctagcaagatagctgctgagcgtcaagtcaccgcggactctgcaatagccaacatcacttgcagtaactcggtgaacatatatgttggcattggtgttccatggttgattgatacagtgtacaacttcttcgtttaccgggaaccattgtacatagataatgctgccggtctcagcttctcccttctagtcttcttcgcgacatcatttggatgcataacggttttggttctgcgtcgtattatactcggtgctgagcttggaggccctaggctatgggcttgggttacatcagtctacttcatgatcctttgggttgtttttgttgtgttttcctctttaagagtatctggagtaatatagacaggaattaaaaaaaaaaggtagtgggggcttcgattttccataaattttgttgcaattggttttcatatccacaaagaaaacaactattgcgggtgaaaattagggtctgtgaattagggattatagatacaagtgcttgttctatataatgattactgatgaagccaacaatatattgtgtagtataattgaagttattgtatcagaaagaagggagaacagttggatagctcttaaattttttattcaatcagagtgttgcattatcaatcatacatgtaaatatcgaggcttatgttttgctagcattgtactactactattatgtttttatgggttaacaacagtacattggacataggctgcctcacattcatatgttttgctagtaactagagactgtataaggatatagaattcttaattcttgcactccctccgtttctttttattagtcgctgg

SEQ ID NO: 209736 - DNA, 1081 bp, Zea Mays
gccattgaaatatctctatttctactatattaaaccaccaatgtctccaggttccacggtcgctgtgctcccccacatttaaatagtaaaaataacaaaaaaaatatacatacataaagatttgaactatggttgctagttttaaattttaaaactcacattcacatccacctatccaattgaacaaacattttcctaagctcggacttggaggctcgcaaaacgccacaagaagcccgatccacacgagagtctgtcgcttgaaacggaccttatcagcatcgtcgctcggcccattcgaggcccacagagtgaggaggagtcgaggagcaggaggctagggtttaaggtgcacggcgatggcgacggcggcgaagaccctagcgcgggctgagctcgctccccggcgagatctccttcccctgcggcctcccctcgctccgcttcttcatcgacgacgttgaggatcctgttgctaatgaccctctccagttgcttccgaaaagaacttaccagcccagtaccatcaagcggaaaagaacccatggattccttacacgtaaatcgaccaagggtgggcgcaaggtgattgcccggagaatcgcaaaaggcaggcacagaatttcagtttagcaagatcccatagcagcactggatgttttctgtactactacagattcgtatcgtgttccttgtgtgaacgacgtattttaagccttttgaagtttttgcatgccaccctgctgaagcatgaagctgagcccccgcgcaagcagctgaaacaaactcttgctgcgaaataaacaagtcaaaggaactggaaaattgccgcgccgaatgagttcatttggagcagctgcgtgccgcatttgtgtttgtttgtgctggaattgccacgtatcagagatgcgtgcgtggtctgagtgtggtcgcagtagcacttggccttgttttcagagtgggggtcaagggggggtcctagtgtaatactttcctctcttataaatcaccaggagagattttattctactattttctaggggagggagagagtatgatgcacctgctgccgttttctttc

SEQ ID NO: 209737 - DNA, 706 bp, Zea Mays
gtcatactgttccctgtatatagagattgtagtgcgtgaccactcgaaactcgcatgacttctgtaggactgcgcaattactgtgttgaggatcctgttgctaatgaccctctccagttgcttccgaaaagaacttaccagcccagtaccatcaagcggaaaagaacccatggattccttacacgtaaatcgaccaagggtgggcgcaaggtgattgcccggagaatcgcaaaaggcaggcacagaatttcagtttagcaagatcccatagcagcactggatgttttctgtactactacagattcgtatcgtgttccttgtgtgaacgacgtattttaagccttttgaagtttttgcatgccaccctgctgaagcatgaagctgagcccccgcgcaagcagctgaaacaaactcttgctgcgaaataaacaagtcaaaggaactggaaaattgccgcgccgaatgagttcatttggagcagctgcgtgccgcatttgtgtttgtttgtgctggaattgccacgtatcagagatgcgtgcgtggtctgagtgtggtcgcagtagcacttggccttgttttcagagtgggggtcaagggggggtcctagtgtaatactttcctctcttataaatcaccaggagagattttattctactattttctaggggagggagagagtatgatgcacctgctgccgttttctttc

SEQ ID NO: 209738 - DNA, 663 bp, Zea Mays
ctgagattgtgtggagcttgggaagttctgctactcgtaaacttgaggatcctgttgctaatgaccctctccagttgcttccgaaaagaacttaccagcccagtaccatcaagcggaaaagaacccatggattccttacacgtaaatcgaccaagggtgggcgcaaggtgattgcccggagaatcgcaaaaggcaggcacagaatttcagtttagcaagatcccatagcagcactggatgttttctgtactactacagattcgtatcgtgttccttgtgtgaacgacgtattttaagccttttgaagtttttgcatgccaccctgctgaagcatgaagctgagcccccgcgcaagcagctgaaacaaactcttgctgcgaaataaacaagtcaaaggaactggaaaattgccgcgccgaatgagttcatttggagcagctgcgtgccgcatttgtgtttgtttgtgctggaattgccacgtatcagagatgcgtgcgtggtctgagtgtggtcgcagtagcacttggccttgttttcagagtgggggtcaagggggggtcctagtgtaatactttcctctcttataaatcaccaggagagattttattctactattttctaggggagggagagagtatgatgcacctgctgccgttttctttc

SEQ ID NO: 209739 - DNA, 1943 bp, Zea Mays
acagaacactctatgagactacttccttctctccaagtcgttgtcttcttcctagcgtctccccgttcttctctccgtagtagctaacagtatagtgtgggcgtgtggccccgcatggagactttccctcctcgctggccccgcatctggcccggattaaccgccttcggctcccttcccagattgccccacccaccgtcagcctcgtcaggcccttaacccgaaggtaattgagattgcgaagaagatgaaagaggagagggtcaagttgtttacttcagaatattttgcttacagatgatacgactagatcaaatcagttgcattggtcctcccaggacaaaccatgctccggagacagaggcggcagagctggggcaggagcagagccatcacagaaattcttgtctccaggtatgttgaagtttcaacaacttggtttataaattaacatgattttaaaaaatcacagtgactcctcttgcagattttgtaaaatgttttttttctctagtgcactgcctatcatttgctgcaatttgaggatgataacattctagacacactaaaatctatcatctatcataaacagtagctatttccccctctgttctttgtgtctctgattgtgtggtaccagctactttggcatacatttgttttttgctttaatcttctgttcagcttctaattcagaaatctttacttcagataaccagaatacttcagcttccatagttccacttccacagttgtaacaatctagcctgtaatggcttgtaacagtacagtgagttgggacacctctgatgtttagagctccaatggtcctgtgggagggatatatttttgttttcatagtgtttagccatggggtgccagggtctacgttctaccttggtttggttctctccttttctcctatctgtcaacacatagtcgtctattacttataaaaaaccacattttcccattttgatccctttatgaacaatgctggaaatcaaattctattcattttggaaaataattacatatttattcgtcgtagctatattccattgttttattaggtgctcaaaaattgtgttgaccggacacatgctattttggcctatgtgctatccatttctatgttttatcggtagggttttccatgcttagataacttcctaatttctcattttttttgtaaataaataaatacttggagattcttggtcaaaggaatgttggacacctgctagccaatgtgcaggtaacaggaacctgaacaaaatggccttgcagtctttttttttactgtgtatatctttttcatgtggagtccattaaaaatccatgcataagcagccgcgagaggtctcagacagataagatggtcgacggcatggacttcgaggagctctgcagcgacttcgaatgcataagcagcccctacgtggagtccataatgaggcaggtcgcgcgggacatctttgagcttcgcgaggataaccgcgcattcagctgctacgccgtccccgtgaagtatgaggctccttcctgatgataatttataattataaatcgaggaaactccaataagtttccttcctttttttcctttcgtttttctcccttctctgatttttcactgtggagggactggacttccgacaaaggaaatcacaacattgtatatgattgacttgtaatatgttagtaaatatatctgtacgttatgacaagagatataacttgttttagggctagtttggtaactttatttttttcaaggaattttttcatttttccgagggaaattagttcattttttacaggaaaaatgtaaatcccttgagaaaaatgagttgccaaactagctcttatctagataatttgtagctcaaaattttacatccaacaaacaaggtgtatatatatgtatatttacatgtata

SEQ ID NO: 209740 - DNA, 589 bp, Zea Mays
cacaacgacgctgtcgagcctgcctggcgagtgttgtccggcggccggcaacggggaagagagcgtccgacggcgacgcactcgagcggcacccctcccaactcgctccctcctcggcccctgcagccctgctccgtggcgcgcatcactgggcggctcgccgtacaatcagcgagcgggtggcggctacctccatactagcaagactcaatcggcgaaatcctgggcgtgcctgccaatgagcaagaagaggaagcatctggatccagcgaactcgttgaaagacagcgaacaagtagtcgcctcagatttcataagaggagacgatcttgatgacctattatcgaagcttatcaggagtgtggagattgccaaggcttcaaggggaggcttaccagaaaagatatggatgaagcaacaatttgctatcggcgtcaatgatgtcacaagggttcttgagcgaatgccgcattctgtcactgctcatcctgctcaaatgtctaatgaagcaccaactgtctcaggccgacgtcaagctcctttggtgccattgcagctcccggattatgtcctgcgcgttattcttcag

SEQ ID NO: 209741 - DNA, 3612 bp, Zea Mays
ctacgtccacccaggcccagccacagatgaagaaagcgcaagccaccaggaggagctagcaaaagaaggaggaacgaagagaagagagaaattaacagctcgagagaaacggagctagatagtagcaggggcgctgctcgctagaggccgttgatatggcgcttcgcgacgtgctgctgtccatagcgcagacgccgcaccggctgcgcaggagggcgctggtgacgtggacgccgacgcaggagctgaacgaggtgcgggaccggtccggggcgcgcatgaagcggcggctggagtggtacgacctcgtggggctcggcgtgggcggcatgctcggcgcgggcgtcttcgtcaccacggggagggtggcgcgcgacaccgcggggcccgccgtcttcgcgtcctacgtcgtcgccggcgtctccgcgctgctgtcgtccttgtgctacgccgagttctccgtgcgcgtccccgtcgccggcggcgccttcagctacctcagagtaacgttcggtaggttaataattacgactctttcatttcctctcgcgccatggtttcacgctgctactgtacgtttaaaaggaaggaggaatcacttgaatcaattaatgaaacgtaacggtcagatatatgtgtaccgtaaattaaaaaaatgtgttcatgtcctaattaataataaaggacaggtacttaataaaagtggacaatgcaaagcaaaacccttctatgaatatgatccttcctagctagctacatcttgtcaggcgagttcgtggggttcttcggcggagcgaacattctgatggagtacgtgctgtcaaacgcggcggtggcgaggagcttcacggactacctggcatcgacgttcggggtcacggagcgcaacgcgtggaggatcgtcgtcgacggcatcgccgacgggtacaatgagctggacgtgccggccgtcgcgctcatccttctcataaccgtatgcctgtgctatagcaccaaggagagctcgatgctgaacatggtgctcacggtgttccacctgctcttcttcgccttcatcgtcgctgccggcctgtggaacggcagcgcgaggaacctcgtgcggccgcacgggctggccccctacggcgtccgcggcgtcctggacggcgccgccgtcgtctacttcagctacataggctacgactcggcgtgcaccatggccgaagagatccgggacccctcccgcgcgctccccgtcggcatcgccggctcggtgctcgtcgtgtccgggctctactgcctcatgtccgtcgccctctgcgtaatgctgccctacaccgagatatcggaagccgccccgttctcgtcggcgttcagggagaaggtggggtggaggtgggcgagcagcgtggttggcgccggcgcgagcatcggcatcgtggcgtcgctgatggtggcgatgctggggcaggccaggtacctgtgcgtcatcgccagagcgcgtctcgtgccgttgtggttcgccaaggtccacccttccacaggcacccccatgaacgccaccatctttctagggttctgcactgcatcattagcactcttcacggagctgcaaatagtgttcgagatgatatccatcggaaccctgctggtcttctacttggtcgccaatgcactaatctaccaccggtacgtgaaggtcggcacaaaccggcccctgcatgtcctcctcttcctgctgctcctcaccctgagctctctcggcttctccctctcgaggaagatcgatgggtggtgccagtgggggatgacactgttcggcgcagtctccatagcaatcaccaccatcttccactgcacagcacggcaggacatcgccggaccctcgttggagtggtcggttcctctgatgccatggcctgccgctgcatctgtcttcctgaatgtgttcctgataaccactctcaaggtgagatcataccagaggttcggcatctggagccttgtgaccatagttttctatgtctgctatggggtgcactccacatactctgcagaagaaaatgagattgtcaatgcaatgatccatcatgcaaatttggacatatcttagcagtggcaggttaattatatgccagaagttacattagagctcaatagattggcaattaggccatcttggagatggtcctaggcctaaagatggtgcaaaagagtattttgctttaggttaatccctctttttttttcctgcttttgtgctttctgattggcccaaaactattggcatgtgcttactttttgctcgaggtacatatgcaggattgtgcaaggcatgtgtccgtttggccagtgatttgaaaatctatctattttcaccacaacaaatgacaatgccctagaatgcaggaaactatcaaacatcagcatgatgactgatctgttccagctagaaattactttcacctgcaactagccattcctgcagatagagcaggagtgagcatacaaaaaaaatgtatcaaagtttactggaaagcatatcctaaaaaatgtaaaagcactggtgtacttcataaaaatcattgtaattgaaccatgagaagctgaagttaatgattttgcttttctgtgtaactcatacatggagagaaataaacagaggaaaccaaaacgaaaactgtgtttagacttcagaataattactgatactatttcaatcacactatttccattagtatggagcaagagttcgctcagatagctttaacacatgaacacattgataccattcatctttcatgccatagagtttgatgcctaaaggcacacaattcacttgtgtgtttgagaaaagaatgacagttcctcgccaagaaaaaatagatcatacaagcacatcctctaaccttactggtccaggaaataactaggcgtgaatttcacaagaagcatagaagacatttttagttctgagaactaaataatctgtattcatgttataataaaaggaggctccatacaaatttcaaaagttacatcaagtccattcctaaagaagaacgtatttacaatttatcaagacatgtagactaatgaggtgcaaatattcaatagactaggctttgatacatgataagcctaaacaatggctgtcatacataattgtattgaaagttcaaggaccacgcatgatggaatgcgggagtaaagccgaacatcatggagcgaatccatgctttcaactcagcatgcctcatcgagtcaaggtacatacctcagttttatttcttaatgcacacctcaaatggtagcccaattgtcgaacagcacagtgagccaaggattggatgccagcatactaaggaccacactctgatggtgagtccgagatagtactaagtggatagtggtgccttcatctgcaccaaatccgctgagaaaaaacaaaactattagattgcagttctgaaccaataaataatgaactacatggaaaacttaagtacccatgtatttttctcaccagataagaagattctgaagaataacaaaactgtagaaggccatggaatacctatagttccaaaattgtcattcaaagtagctaaacttgcagatttgcagaaagct

SEQ ID NO: 209742 - DNA, 2089 bp, Zea Mays
tgcgctgccacattactctgatctcgatgtggttctgaagaaaatatcagcccgacaaatcgcaaaaacagcgtcaccggtcgatcaatttcgatgtgcattgcaacagggaaatgaaatgggagttaaagagttagatagccttatgactttgattgctgagaagaagcggcaaatggaacaacaagaatcggagacaaatatgcaaatattgttagtcttcttgcactgccttagaaagcaaaagctggaagagttgaatgagatccaaagtgatctacagtacatcaaagaggatataagtgctgtggagagacatagggtagaattataccgcacaaaagaaaggtactccatgaagctgcgcatgcttttagatgagcctactgcacaaaaaatgtggccctctcctatggacaaagctagttgtcgctttcctcccaactctcggacaccacttggcggatcatgtccaggaactttacagaataagaagcttgatccgaaagctcaaagacgagttcaagcacagttcaatgagcttcaagaatactacctgcaaagacggcgtactggagcacaggcacgcagacaagaagaaagagagaccgttgcaatgaatagagaaggctatcatgcaggtcttcaggatttccagtctgtgctaacaacattcactcgatatagtcgtctacgtgtcattgcggaactaagacatggagacttgtttcactctgccaatattgtgtccagtattgaatttgatcgtgatgatgaactatttgctactgctggagtctcgaaacgtattaaagtcttcgaattttctactgttgttaatgaaccatcagatgtgcattgcccggttgttgaaatggctaccagatctaaacttagctgcctaagctggaacaagtactcaaaaaatattatcgcaagcagtgactatgagggtatagtaactgtgtgggatgtccagacccgccagagtgtgatggaatatgaagagcatgagaaaagagcatggagtgttgatttttctcgaacagagccttcaatgctagtatctgggagtgacgattgcaaggtgaaagtgtggtgcacaaaacaagaagcaagcgtgatcaatattgatatgaaagcaaatatttgttcggttaaatataatcctgggtcaagcttctatgttgcagtcggatctgctgatcaccatattcattacttcgatttacgtaatccaagtgcgcctgtccatgtttttggggggcacaagaaagcagtatcgtatgtcaaattcttatctaacaatgagcttgcatctgcatcaacagatagcacgttacgtttatgggatgtcaaggataatttgccggtacggacattcagagggcacaaaaatgaaaagaacttcgttggattgtctgtgaacaatgagtatattgcttgtggaagtgaaacaaatgaggtttttgtttatcacaaggctatctcaaaaccagcagcaagccatagatttgtatcctctaacctggatgatgccgatgatgatcctggttcttatttcattagtgctgtctgctggaagagtgatagccccaccatgttagctgctaacagtcagggaaccataaaagttcatgtacttgctccttgatgtcgtggagggcgttcaagagatttacagccagcgcgtgtatgtcgtactgtccaggtgttccctttcgtgccattatattccccaaaagcgagaatggaggcattattgatctccggttagggcatgaatttttgcagacgatggccagctgacgtagggttttgaggtatcagaatgtgcataatcatgtttatgttgtacaggtgtaaatcagccaagttattgattacaagtgtgacatgagaaatacacattaataaaaactccagctcggttgtacagagattgtgtttgaacccagaaattcatgtggttatgtcgtttgataatatatgtacctggcaggggtgaagctaggcctttttttgtcagctggccttgataattttctggatatctaatgaaaaaacgatgtcaataacaagagttgta

SEQ ID NO: 209743 - DNA, 1024 bp, Zea Mays
gtgtgaggttttcttgagtaaggtgaaagtgtggtgcacaaaacaagaagcaagcgtgatcaatattgatatgaaagcaaatatttgttcggttaaatataatcctgggtcaagcttctatgttgcagtcggatctgctgatcaccatattcattacttcgatttacgtaatccaagtgcgcctgtccatgtttttggggggcacaagaaagcagtatcgtatgtcaaattcttatctaacaatgagcttgcatctgcatcaacagatagcacgttacgtttatgggatgtcaaggataatttgccggtacggacattcagagggcacaaaaatgaaaagaacttcgttggattgtctgtgaacaatgagtatattgcttgtggaagtgaaacaaatgaggtttttgtttatcacaaggctatctcaaaaccagcagcaagccatagatttgtatcctctaacctggatgatgccgatgatgatcctggttcttatttcattagtgctgtctgctggaagagtgatagccccaccatgttagctgctaacagtcagggaaccataaaagttcatgtacttgctccttgatgtcgtggagggcgttcaagagatttacagccagcgcgtgtatgtcgtactgtccaggtgttccctttcgtgccattatattccccaaaagcgagaatggaggcattattgatctccggttagggcatgaatttttgcagacgatggccagctgacgtagggttttgaggtatcagaatgtgcataatcatgtttatgttgtacaggtgtaaatcagccaagttattgattacaagtgtgacatgagaaatacacattaataaaaactccagctcggttgtacagagattgtgtttgaacccagaaattcatgtggttatgtcgtttgataatatatgtacctggcaggggtgaagctaggcctttttttgtcagctggccttgataattttctggatatctaatgaaaaaacgatgtcaataacaagagttgta

SEQ ID NO: 209744 - DNA, 1978 bp, Zea Mays
ctgaatctgccaccgacaagtgggttcgtccaccgcaccttctcccttcttcgtctccgtctctcccagccccatatcaacgggggacggctctctcgccattctccatccgaaaaacccatagaaacttccctcgtttctctctcctcggccccgcgggagcgaaccattatcagtcgctctcgttggtccggagcagcgatgcgcaccgcctgcctccgccccaccattcgaataaaaccctcccctccgcctccctccttccgccactcctaggcccattcccacccgcgccagcctcggccgccgcggccgcaccacccacggtcccgcctcgccgtggcatgagaagatggccgcgtgctccaggggcctcgcgtggccgccgttcgatctgaccacggcgaggggggcggcgtcctggccgcgccgccgcgccacgatccggtgctgctgcgccgggacggacccagagccgcggaggcgactctcgagggcggccgcggccgcgcccgagcgtgccgaggagtggcgcgtcgatgggaacaagccgtctgccgcggcaccggcccggcggcgcgctagtctcaccgccatgcccccgctccccttcccggcacctcgtatagttctagaagacagttcaagcaacaggacttctacccacggtgcacgccgaggggcccggctcctcaatcctgtgattccccacccaagagagacactggtattgctagtgagaaggaatggggaatcaacttgctggacgaagccgtcaaggagtctggaataaatgaagatggaagcacttggtatagggagagtggagaagatactggcgagaatgggtaccgctgccgctgggcaagaatgggaggacagaaccatgatggttccaccgaatggaaagagacttggtgggagaaaagtgactggactggatataaggaattaggtgcagagaaatctgggaagaatgctgaaggtgattcttggtgggagaagtggaaagaagtactgtaccaagatgaatggagcaatcttgcaagaatagagaagagtgctgaaaaacaagcaaaatcaggtgcagaaaatgctgggtggtatgagaaatggtgggagaaatatgatgccaaaggctggacagaaaaaggtgctcacaaatatggaaggttgaatgagcagtcgtggtgggagagatggggtgaacattatgatggccgtggatttgttttgaaatgataagtgggcagagacagacttaggcaccaaatggggggacaagtgggaggagaaattctttgcaggaattggttctcgacaaggggagacatggcatgtatctcctggcagagaacgttggtcaagaacttggggagaagaacactttggtaacggtaaagtccacaagtatggaaagagcacaactggcgagagctgggatttggtagtcgacgaggagacatactatgaggcggagccccactacggatgggccgatgtcgtgggggactcgacacagctgctgtccatacaacccgtggagaggccaccgggagtgttcccggccatcgacttcagctcggcgcccccgccaaaggacgctccgccgggcatgcctccttcccctctggatggagggaactagagctgccagcacaagcgaattttttctttctagaggctccaaattttgcctgtaagggaacagcattctttgtaggaagttaatggacccaatttcctgcgttcattggttggttcactctctgctacgctttcctttcctcccaaacatgccgttgcgttcctctggttggcgaccgggtgaatgcaataatcaaacggcccacccgtggtttgtattgctcgctgaggataaagcctttgttctgccttcaaggcagtgttggaaactcggccattttcctcgcgtaagggacagagattttcactccgaaccaaacggagagagggg

SEQ ID NO: 209745 - DNA, 1433 bp, Zea Mays
attttggttgtcgtaatgacagtatagttctagaagacagttcaagcaacaggacttctacccacggtgcacgccgaggggcccggctcctcaatcctgtgattccccacccaagagagatctctgatttgctaaggaaatgcatgtgtttgtttggcacctgccttatagacactggtattgctagtgagaaggaatggggaatcaacttgctggacgaagccgtcaaggagtctggaataaatgaagatggaagcacttggtatagggagagtggagaagatactggcgagaatgggtaccgctgccgctgggcaagaatgggaggacagaaccatgatggttccaccgaatggaaagagacttggtgggagaaaagtgactggactggatataaggaattaggtgcagagaaatctgggaagaatgctgaaggtgattcttggtgggagaagtggaaagaagtactgtaccaagatgaatggagcaatcttgcaagaatagagaagagtgctgaaaaacaagcaaaatcaggtgcagaaaatgctgggtggtatgagaaatggtgggagaaatatgatgccaaaggctggacagaaaaaggtgctcacaaatatggaaggttgaatgagcagtcgtggtgggagagatggggtgaacattatgatggccgtggatttgttttgaaatggacagataagtgggcagagacagacttaggcaccaaatggggggacaagtgggaggagaaattctttgcaggaattggttctcgacaaggggagacatggcatgtatctcctggcagagaacgttggtcaagaacttggggagaagaacactttggtaacggtaaagtccacaagtatggaaagagcacaactggcgagagctgggatttggtagtcgacgaggagacatactatgaggcggagccccactacggatgggccgatgtcgtgggggactcgacacagctgctgtccatacaacccgtggagaggccaccgggagtgttcccggccatcgacttcagctcggcgcccccgccaaaggacgctccgccgggcatgcctccttcccctctggatggagggaactagagctgccagcacaagcgaattttttctttctagaggctccaaattttgcctgtaagggaacagcattctttgtaggaagttaatggacccaatttcctgcgttcattggttggttcactctctgctacgctttcctttcctcccaaacatgccgttgcgttcctctggttggcgaccgggtgaatgcaataatcaaacggcccacccgtggtttgtattgctcgctgaggataaagcctttgttctgccttcaaggcagtgttggaaactcggccattttcctcgcgtaagggacagagattttcactccgaaccaaacggagagagggg

SEQ ID NO: 209746 - DNA, 2089 bp, Zea Mays
ctttctgcttctcccgtattgccgtgccctcctccctctccctgctcgctctctccctctcgtcgctttctttcctggtcgcgccgcccttcatcaggtctcctccgccttagccggtgaagagcgaccaggcccaataaataatcaccatggctcatcaaaagcgtgaaggcagctacgccgatgatgatagtacatccaagcgcatcaaaggcaccgacactgcttctgaaacgggggacagtgtagagtctagtgtttcacagcaaatggatgctgaagctaggaggacctgccaaaaggaaagcgaagcaccatcggacaaatgcgtttcagatggggaatgcgctgcaaactctaaggttttgggtgagcagaagatggtattgactgttgtcgaggctgatgcggcggacgacaagggttgcaggcacactatggaggacgcctgggtggtgctccccaatgctggtgcagaatccccaggaagcttgaggtgcgtacattttgcgatttatgacgggcatggtggtcgcttggcggcagattatgcacagaagcatttgcatcagaatgtcatcgctgcaggattaccacatggatattaaagctgcaaagaaggctgtaattgaaggtttccgtagaactgatgaatctttactgcaagaaagtactaagggaaattggcaagatggtgcaacagctgtatgcgtttggatcctgggacagacggttgtagttgcgaatgttggagatgctaaagcagtattggctcgttctatttcaactgagggtgaaggtgtggttgatgagaccaaaagtcaactaaaggctattgttttgacaagagaacataaagccatcttttcacaggagcgctcccgaatccagaaggctggaggttctgttggctctaatggaagattacaaggtcgtattgaagtatcaagagctttcggtgatcgccagtttaagaaggtttgctgatataagtatatttggtcgctacttaagtctgctcttttgtatctgtttatttggaaaaggtatggtgtttgattacctagttgaatatttcagcatcaataataaatggaggcattattttatgctgaaaataaagtacattttgagtgcaatgtacagaaacgattacaaagtctatttcctttggctatgcattctgttgatctagaccaaccagtgaagcgtccgatgacctttgctttgtatgctaaaaatgggggttttcctgattttgtgattgtatctactgttaagggcagtcctggtgcagtggtgagaactgtttcactgagtcaccaggtcgcggattcgaagcagcttttctgcacttgtggaaggcttgcctctgtttatccttttccagaccccactcatgtgcgagcctctcacactgggtctgccccctttatctactattaagaaataatataactgctgcttgaaacctttatagtcgataatgaggaactttgttagcttagttgtgttagaaagtaaacggcgacacgtagtgtccatgacgtgcgtctgtgtaccgcgctgtggtggtgtcgtgtgcatgtctgcatgcaagtgagctagctcgggctgattggtgttgggttagaaagagtccaggttgattggtgctagtcaagaaagagtccaggctgatttggagtggtttgcatggcgctgattcacatggtggaagccacatcgtccagatgaggaagtgggtcacggtgattgctgcacgagtcccgtggatcatggcacgaaggccggcatggaggcaagctccaagtctataagtagcgttgtacttctccatggtttctttgccaagtgcagtgagtaaaggagccaagataaaggtgagtttgacatcgtggcgttcatcaacggaaaacagtgtgcctgttgtgcttctgtctcttgccaagtgtgttggcgtgtctgtgttcaagtggttcctggacgaagccatcatttggtatgagagccgaagatgacgactttgttgaagaactcaggatcccgtgatctctgttcttaaggcgtcgcctaggcgacgcctagg

SEQ ID NO: 209747 - DNA, 2100 bp, Zea Mays
ccactttctgcttctcccgtattgccgtgccctcctccctctccctgctcgctctctccctctcgtcgctttctttcctggtcgcgccgcccttcatcaggtctcctccgccttagccggtgaagagcgaccaggcccaataaataatcaccatggctcatcaaaagcgtgaaggcagctacgccgatgatgatagtacatccaagcgcatcaaaggcaccgacactgcttctgaaacgggggacagtgtagagtctagtgtttcacagcaaatggatgctgaagctaggaggacctgccaaaaggaaagcgaagcaccatcggacaaatgcgtttcagatggggaatgcgctgcaaactctaaggttttgggtgagcagaagatggtattgactgttgtcgaggctgatgcggcggacgacaagggttgcaggcacactatggaggacgcctgggtggtgctccccaatgctggtgcagaatccccaggaagcttgaggtgcgtacattttgcgatttatgacgggcatggtggtcgcttggcggcagattatgcacagaagcatttgcatcagaatgtcatcgctgcaggattaccacgtgagttgatggatattaaagctgcaaagaaggctgtaattgaaggtttccgtagaactgatgaatctttactgcaagaaagtactaagggaaattggcaagatggtgcaacagctgtatgcgtttggatcctgggacagacggttgtagttgcgaatgttggagatgctaaagcagtattggctcgttctatttcaactgagggtgaaggtgtggttgatgagaccaaaagtcaactaaaggctattgttttgacaagagaacataaagccatcttttcacaggagcgctcccgaatccagaaggctggaggttctgttggctctaatggaagattacaaggtcgtattgaagtatcaagagctttcggtgatcgccagtttaagaaggtttgctgatataagtatatttggtcgctacttaagtctgctcttttgtatctgtttatttggaaaaggtatggtgtttgattacctagttgaatatttcagcatcaataataaatggaggcattattttatgctgaaaataaagtacattttgagtgcaatgtacagaaacgattacaaagtctatttcctttggctatgcattctgttgatctagaccaaccagtgaagcgtccgatgacctttgctttgtatgctaaaaatgggggttttcctgattttgtgattgtatctactgttaagggcagtcctggtgcagtggtgagaactgtttcactgagtcaccaggtcgcggattcgaagcagcttttctgcacttgtggaaggcttgcctctgtttatccttttccagaccccactcatgtgcgagcctctcacactgggtctgccccctttatctactattaagaaataatataactgctgcttgaaacctttatagtcgataatgaggaactttgttagcttagttgtgttagaaagtaaacggcgacacgtagtgtccatgacgtgcgtctgtgtaccgcgctgtggtggtgtcgtgtgcatgtctgcatgcaagtgagctagctcgggctgattggtgttgggttagaaagagtccaggttgattggtgctagtcaagaaagagtccaggctgatttggagtggtttgcatggcgctgattcacatggtggaagccacatcgtccagatgaggaagtgggtcacggtgattgctgcacgagtcccgtggatcatggcacgaaggccggcatggaggcaagctccaagtctataagtagcgttgtacttctccatggtttctttgccaagtgcagtgagtaaaggagccaagataaaggtgagtttgacatcgtggcgttcatcaacggaaaacagtgtgcctgttgtgcttctgtctcttgccaagtgtgttggcgtgtctgtgttcaagtggttcctggacgaagccatcatttggtatgagagccgaagatgacgactttgttgaagaactcaggatcccgtgatctctgttcttaaggcgtcgcctaggcgacgcctagg

SEQ ID NO: 209748 - DNA, 2506 bp, Zea Mays
cacgcttagcgatctagtctcctcttcatcccacctcttctccctccctgcttcgctgttccctttccccgcccctacctggggcatctgcctctgaatcgcggcggctcccgaggcgccgcctggcgagcggctaggcgccggtctacggcgacgatggaggtgtgatttggacgggagagagcgtggtggtgaggtctcggttttctcgatataggagatggcggcggcaaaggcgcggggaggggagttccccgtgggcatgaaggtgctggttgtggacgacgacccgacgtgcctcgttgtgctcaagaggatgctccttgagtgccgatatgacgtgacaacatgtcctcaggctacaagagcactaactatgttgcgagagaataggcgtggttttgatgttataataagtgatgtccacatgccggatatggacggattcaggctacttgaacttgtaggccttgagatggaccttccagttatcatgatgtctgctgattcaagaacggatattgtaatgaacggaattaagcatggagcatgtgactatttaataaaacctgtcagaatggaggagctgaaaaacatctggcaacatgttattaggaaaaaatttaatgaaaacaaggaccatgagcattctggtagcctagatgacaccgatcgtaacagaccaaccaataatgataatgaatacgcttcctccgcgaatgatggaggtgatggcagctggaaatctcagagaaagaaaagagagaaagaagatgatgaaactgacctcgaaaatggtgatccttcttctacatcaaagaaaccaagagttgtttggtcagttgagcttcatcaacaatttgtgaatgcagtcaatcacctcgggatagacaaagctgtcccaaagaaaattttggaattgatgaatgtcccaggcttaaccagggaaaatgttgccagccatttgcagaaattcagactctacctgaagagaattgctcagcatcatgcaggaatacctcatccatttgttgcgcctgtatctagtgctaacgttgctccgttaggaggactggaattccaagctttggctgcttctggtcagatccctcctcaagctctggctgctttgcaggatgaactccttggtcgacctacaagcagtttggcgttgcctggaagggaccagtcatctttgcgagtggctgcaatcaaaggaaacaagcaccatgaagaaagagaaatagcatttggtcaacccatatacaagtgtcagaataatgcatatggtgcattccctcaaaacagcccagcagttggaggattgcaaccttttgcagcttggcccaataacaaagttggtatgactgattcaacaagcacattgggaaatgtgggcaattctcaaaatagcaatatgctattgcatgaattgcagcaacagccagacaccttgctgttaggaacccttcacaatattgatgccaaaccttctggtgtagttatgccatctcagtcgttaaatacattcccggctagtgagggtatctcacctaatcaaaatcccttgattataccatctcaacccccaagttttgtgtcatcaattcctccatccatgaaacatgaatctcttcttggattaccttcaacgtcaaccagtctgttgggcgggcttgatatggttaatcaagcttcaacaagtcaggctttgattagtagccatggaacaaatcttcctggtctcatgaaccgtagctcaaatgcaatcccttcaccaggaattagtaattttcaaagtggaaatattcattatgttgttaatcagaacgctatgggagttagctctaagccaccaggtgttctaaagaccgagagcactgactcactgagttgtagttatggctatattggtggtagcaccagtgtggactctggcttgttctcttctcagtccaaaaatccacagtatgatctactgcagaatcaaaatgatgttaacggcagctggtcgccttcacaagattttgatagttttggaaattctcttgggcaaggccaccctggtaccacttcatctaacttccagagttccgcccttgggaagttgcctgaccaaggacgagggagaaatcatgggtttgtcgggaaaggcacttgcattccaagccgctttgcagtggatgaggttgaatctccaactaacaacttgagccacagcattggaaacagtggagacatagtgaaccccgacatatttggatttagtggacatatgtgaaactttcttgaatttgtaagtagcgttgatcagtgagcactggaaacaaatctagtggtttgatgaatggttgctagtaatttcgtttcttcttcttttttcttctgtaattggtttataaagggaataatctatgtggcagcatgtggaatcttactttatagaagtttgttcagttcaaaggacttaaaattgcctagtcgatttattcccggccatatatta

SEQ ID NO: 209749 - DNA, 2671 bp, Zea Mays
ggagccgcagccgcaggacgcggcagagccctgccagcggtgtcagtgactcgtaatcgctgcctgacccatggccaatcgcgtgatttgctttactaatcacgcttagcgatctagtctcctcttcatcccacctcttctccctccctgcttcgctgttccctttccccgcccctacctggggcatctgcctctgaatcgcggcggctcccgaggcgccgcctggcgagcggctaggcgccggtctacggcgacgatggaggtgtgatttggacgggagagagcgtggtggtgaggtctcggttttctcgatataggagatggcggcggcaaaggcgcggggaggggagttccccgtgggcatgaaggtgctggttgtggacgacgacccgacgtgcctcgttgtgctcaagaggatgctccttgagtgccgatatgacggctacaagagcactaactatgttgcgagagaataggcgtggttttgatgttataataagtgatgtccacatgccggatatggacggattcaggctacttgaacttgtaggccttgagatggaccttccagttatcatgatgtctgctgattcaagaacggatattgtaatgaacggaattaagcatggagcatgtgactatttaataaaacctgtcagaatggaggagctgaaaaacatctggcaacatgttattaggaaaaaatttaatgaaaacaaggaccatgagcattctggtagcctagatgacaccgatcgtaacagaccaaccaataatgataatgaatacgcttcctccgcgaatgatggaggtgatggcagctggaaatctcagagaaagaaaagagagaaagaagatgatgaaactgacctcgaaaatggtgatccttcttctacatcaaagaaaccaagagttgtttggtcagttgagcttcatcaacaatttgtgaatgcagtcaatcacctcgggatagacaaagctgtcccaaagaaaattttggaattgatgaatgtcccaggcttaaccagggaaaatgttgccagccatttgcagaaattcagactctacctgaagagaattgctcagcatcatgcaggaatacctcatccatttgttgcgcctgtatctagtgctaacgttgctccgttaggaggactggaattccaagctttggctgcttctggtcagatccctcctcaagctctggctgctttgcaggatgaactccttggtcgacctacaagcagtttggcgttgcctggaagggaccagtcatctttgcgagtggctgcaatcaaaggaaacaagcaccatgaagaaagagaaatagcatttggtcaacccatatacaagtgtcagaataatgcatatggtgcattccctcaaaacagcccagcagttggaggattgcaaccttttgcagcttggcccaataacaaagttggtatgactgattcaacaagcacattgggaaatgtgggcaattctcaaaatagcaatatgctattgcatgaattgcagcaacagccagacaccttgctgttaggaacccttcacaatattgatgccaaaccttctggtgtagttatgccatctcagtcgttaaatacattcccggctagtgagggtatctcacctaatcaaaatcccttgattataccatctcaacccccaagttttgtgtcatcaattcctccatccatgaaacatgaatctcttcttggattaccttcaacgtcaaccagtctgttgggcgggcttgatatggttaatcaagcttcaacaagtcaggctttgattagtagccatggaacaaatcttcctggtctcatgaaccgtagctcaaatgcaatcccttcaccaggaattagtaattttcaaagtggaaatattcattatgttgttaatcagaacgctatgggagttagctctaagccaccaggtgttctaaagaccgagagcactgactcactgagttgtagttatggctatattggtggtagcaccagtgtggactctggcttgttctcttctcagtccaaaaatccacagtatgatctactgcagaatcaaaatgatgttaacggcagctggtcgccttcacaagattttgatagttttggaaattctcttgggcaaggccaccctggtaccacttcatctaacttccagagttccgcccttgggaagttgcctgaccaaggacgagggagaaatcatgggtttgtcgggaaaggcacttgcattccaagccgctttgcagtggatgaggttgaatctccaactaacaacttgagccacagcattggaaacagtggagacatagtgaaccccgacatatttggatttagtggacatatgtgaaactttcttgaatttcgttgatcagtgagcactggaaacaaatctagtggtttgatgaatggttgctagtaatttcgtttcttcttcttttttcttctgtaattggtttataaagggaataatctatgtggcagcatgtggaatcttactttatagaagtttgttcagttcaaaggacttaaaattggtcagtcccttgtcatatagcttcttttctttgttctctttttctgtaattaccaattgtagcattatttttatgaccgtcgtaattcagcctagtcgatttattcccggccatatatta

SEQ ID NO: 209750 - DNA, 1836 bp, Zea Mays
acacataacgatggtccacaatgattattttccatcactattagctgtccataatatctgggatagtcaacagcagaaggaaccacactgattttgctgtattatattgagagtgttacaacattgtttttttgagacctctcacctctgttttaaatgtggcggcatctagatttttagatattttattttaaatatcagttcattttttcttgcagaatgtaaatcctgttgatttttctgtattatatttagagtggtacgatattgtttttttggagatctacgttttaaatgcgaggatattcagatttttagatattttattttaaatgtcagttcatatttttttccttgcagaatgttacccctaagaaggcagaagagactgctttgatatctgatgttgttgcagattcaccatacaagattttcatagcgggcattgctggagtgatctcatctaagatgctaatggagattgttagtgcatttggcccattggctgcataccgctttctttttaacaatgagctcggtggaccctgtgcatttcttgagtacgccgaccgctccgttacttctaaggcatgtgctggcctcaatgggatgatgcttggtggacgtgtactgactgctgtgcatgtgtttcctaatcctcatgtggagtttgaacgagaagagtatatgctactttcaaaatctgagctggaagaaacattggaagatgtacgtgttgaatgtacgaggtttggagcagtcaaatctgtaaatgtagttgagtatcctgctgctggtgtcagtgctgcagaggagaacatagttgagctcaagattgaatgcactgaattttctgatacggaaaacattgcaaaggctgtatcagaatattctgtaccgattattccgagcatagatgttctaaatcattctgtcgcttcggatactaaagatgtggatcttattccagagagtcaggatcagaaggacaaacacctcccttcaaatgcagcactttgtgagagtgaggcacctgtagcagatgaggacgcagagcttgatgaaactcagtctagagctgctctccccacaccgcaacatgctgaagctgatcatacggaagcagctgtggatgagaataaacatacaggagcagggaaggttactgctactgcaacggacgacgatgcagtagaaaagagtcatggagacccaagaacctcagagacctgcaatcctgctggacctacagacaaagcggagaaacctggaaggtactccgaacaaggcgctggtgatgtgactgaagatcgtccagaaaaagaagcccaagctgttgggaccagcgacactggtttcgtgtttgaacctggttctgtgcttgtggagtttttgcgggaggaggctgcttgcatggccgcacattccttacatgggcgtcgcttcgggaacagaactgtgcatgctggatatgctccgtatgatctctacttgcagaaataccccaggtgattctgcgtttgcgactgcatgagttgcgatacgagctttgcctatgtgccagtatttcacagaaacttcagacttgtagttttggcttttgagcctttggatggttcttccggtccagatagtggtaccattagttgaacgaaatatttggaaatgttgttccacagtagatatcggatggacaataggatataagtactggatagagacacaagttgtcgttaacatcgttctttacttcgctattaatgtttttgatgacgtcagacattagtgtggatggatggatggaatggatttattgcaagattttgactgctataa

SEQ ID NO: 209751 - DNA, 3532 bp, Zea Mays
  misc_feature (1)..(2): n is a, c, g, or t
nnagatagaaatgctggaaggaatgagtatgcaacaccataccatggagaatcagagttgaaaaggagaaggtccagaagcagggatcatgatcgagaaagatacagtaggtctatctcaccgccactaagggaacaaaggtataattaccgtggacgtgattttggcaatcctccttactactctatggagaaatcaagggggaagtatgctgaagttgataaacaaagatcgtcggggagtggtggatacattggtgggttgcaccagagatatgaaagccggcttggtggatactcaccaaggaaaaagaaaacatcactgcaagctgagcaggcaactaccaagactccttccaaggtcattcagtccccagaaaaaaaatcagccacatgggatcagcctcctgttaaagcaaaccaatctaactttcctaccactttcctgccaactgttggccagatggctcctactccattcagtttcagcgtgataaaggacccttcaactacagctgtgacaatgttggcaggtaatagtttgactgcagattctgtccagcttacacaagcaacgcgcccactcaggaggttgcacattgaaaatttgcctgattcagctacagaggataagttgattgactgcttgaatgacttcttattgtctactggcagtaaactccagcggtctaaaccatgcctcagttgtacgataaacagagaaaaacgtcaggcttttgtggaatttcttacaccagaggatgctacagcagctatttcttttgatggaaggtctctaaatggatctgtgttgagaattcgacgccccaaagaatatgttgaaacggtgggtattttaattgggtgtgtcataattcacgttcagcagcatcgtgaagcaaaggaattgtaaagcaggcttcctggtgtagtgcaaatactatgtgattgctgctacttcagattttcattggctgattacagtactgcagacaggcagagtccttatggtgttcagttcatggaaacattaggaagacagcttgtacagcatggttcaagtaaatgtaatattagcaaagatttgagtatgatggttgctaagtgctaaccttaattgtgcaaatatctacagccgagtgcaatttggcagcaagggctgtcatttagacattgataaacttcaaagttattctgcatttagtttaacaaactttgactttactttttctcttgtttgtgttcaatctctaacattttcctgttcagcttatttcatggatattgccttacatcttagttcctctatttttgtctctggcctcaacttggtctctttacttctaaaaagacaagattagttcctttacttgtataggtagatatggttagtcgttccacccatagccaataatggaatatatatcacagaaaataccagtgagatagaatcatagaaggagataggttattagtctggtccagtttggtttgcttgactagattgctttgttttgtgctgtatcactataccaacatgaatagctaaacactaggatcatgcaaatatgtgatatgtctcctcaaggaccaggctttcctctacacataacgatggtccacaatgattattttccatcactattagctgtccataatatctgggatagtcaacagcagaaggaaccacactgattttgctgtattatattgagagtgttacaacattgtttttttgagacctctcacctctgttttaaatgtggcggcatctagatttttagatattttattttaaatatcagttcattttttcttgcagaatgtaaatcctgttgatttttctgtattatatttagagtggtacgatattgtttttttggagatctacgttttaaatgcgaggatattcagatttttagatattttattttaaatgtcagttcatatttttttccttgcagaatgttacccctaagaaggcagaagagactgctttgatatctgatgttgttgcagattcaccatacaagattttcatagcgggcattgctggagtgatctcatctaagatgctaatggagattgttagtgcatttggcccattggctgcataccgctttctttttaacaatgagctcggtggaccctgtgcatttcttgagtacgccgaccgctccgttacttctaaggcatgtgctggcctcaatgggatgatgcttggtggacgtgtactgactgctgtgcatgtgtttcctaatcctcatgtggaggctgctaatgaggcttccccattttatggtattcctgacaatgctaaattgcttctgaaagaaccaacaaaggtcctgcagctaaaaaatgtgtttgaacgagaagagtatatgctactttcaaaatctgagctggaagaaacattggaagatgtacgtgttgaatgtacgaggtttggagcagtcaaatctgtaaatgtagttgagtatcctgctgctggtgtcagtgctgcagaggagaacatagttgagctcaagattgaatgcactgaattttctgatacggaaaacattgcaaaggctgtatcagaatattctgtaccgattattccgagcatagatgttctaaatcattctgtcgcttcggatactaaagatgtggatcttattccagagagtcaggatcagaaggacaaacacctcccttcaaatgcagcactttgtgagagtgaggcacctgtagcagatgaggacgcagagcttgatgaaactcagtctagagctgctctccccacaccgcaacatgctgaagctgatcatacggaagcagctgtggatgagaataaacatacaggagcagggaaggttactgctactgcaacggacgacgatgcagtagaaaagagtcatggagacccaagaacctcagagacctgcaatcctgctggacctacagacaaagcggagaaacctggaaggtactccgaacaaggcgctggtgatgtgactgaagatcgtccagaaaaagaagcccaagctgttgggaccagcgacactggtttcgtgtttgaacctggttctgtgcttgtggagtttttgcgggaggaggctgcttgcatggccgcacattccttacatgggcgtcgcttcgggaacagaactgtgcatgctggatatgctccgtatgatctctacttgcagaaataccccaggtgattctgcgtttgcgactgcatgagttgcgatacgagctttgcctatgtgccagtatttcacagaaacttcagacttgtagttttggcttttgagcctttggatggttcttccggtccagatagtggtaccattagttgaacgaaatatttggaaatgttgttccacagtagatatcggatggacaataggatataagtactggatagagacacaagttgtcgttaacatcgttctttacttcgctattaatgtttttgatgacgtcagacattagtgtggatggatggatggaatggatttattgcaagattttgactgctataa

SEQ ID NO: 209752 - DNA, 2629 bp, Zea Mays
  misc_feature (1)..(2): n is a, c, g, or t
nnagatagaaatgctggaaggaatgagtatgcaacaccataccatggagaatcagagttgaaaaggagaaggtccagaagcagggatcatgatcgagaaagatacagtaggtctatctcaccgccactaagggaacaaaggtataattaccgtggacgtgattttggcaatcctccttactactctatggagaaatcaagggggaagtatgctgaagttgataaacaaagatcgtcggggagtggtggatacattggtgggttgcaccagagatatgaaagccggcttggtggatactcaccaaggaaaaagaaaacatcactgcaagctgagcaggcaactaccaagactccttccaaggtcattcagtccccagaaaaaaaatcagccacatgggatcagcctcctgttaaagcaaaccaatctaactttcctaccactttcctgccaactgttggccagatggctcctactccattcagtttcagcgtgataaaggacccttcaactacagctgtgacaatgttggcaggtaatagtttgactgcagattctgtccagcttacacaagcaacgcgcccactcaggaggttgcacattgaaaatttgcctgattcagctacagaggataagttgattgactgcttgaatgacttcttattgtctactggcagtaaactccagcggtctaaaccatgcctcagttgtacgataaacagagaaaaacgtcaggcttttgtggaatttcttacaccagaggatgctacagcagctatttcttttgatggaaggtctctaaatggatctgtgttgagaattcgacgccccaaagaatatgttgaaacggtgggtattttaattgggtgtgtcataattcacgttcagcagcatcgtgaagcaaaggaattgtaaagcaggcttcctggtgtagtgcaaatactatgtgattgctgctacttcagattttcattggctgattacagtactgcagacaggcagagtccttatggtgttcagttcatggaaacattaggaagacagcttgtacagcatggttcaaaatgttacccctaagaaggcagaagagactgctttgatatctgatgttgttgcagattcaccatacaagattttcatagcgggcattgctggagtgatctcatctaagatgctaatggagattgttagtgcatttggcccattggctgcataccgctttctttttaacaatgagctcggtggaccctgtgcatttcttgagtacgccgaccgctccgttacttctaaggcatgtgctggcctcaatgggatgatgcttggtggacgtgtactgactgctgtgcatgtgtttcctaatcctcatgtggaggctgctaatgaggcttccccattttatggtattcctgacaatgctaaattgcttctgaaagaaccaacaaaggtcctgcagctaaaaaatgtgtttgaacgagaagagtatatgctactttcaaaatctgagctggaagaaacattggaagatgtacgtgttgaatgtacgaggtttggagcagtcaaatctgtaaatgtagttgagtatcctgctgctggtgtcagtgctgcagaggagaacatagttgagctcaagattgaatgcactgaattttctgatacggaaaacattgcaaaggctgtatcagaatattctgtaccgattattccgagcatagatgttctaaatcattctgtcgcttcggatactaaagatgtggatcttattccagagagtcaggatcagaaggacaaacacctcccttcaaatgcagcactttgtgagagtgaggcacctgtagcagatgaggacgcagagcttgatgaaactcagtctagagctgctctccccacaccgcaacatgctgaagctgatcatacggaagcagctgtggatgagaataaacatacaggagcagggaaggttactgctactgcaacggacgacgatgcagtagaaaagagtcatggagacccaagaacctcagagacctgcaatcctgctggacctacagacaaagcggagaaacctggaaggtactccgaacaaggcgctggtgatgtgactgaagatcgtccagaaaaagaagcccaagctgttgggaccagcgacactggtttcgtgtttgaacctggttctgtgcttgtggagtttttgcgggaggaggctgcttgcatggccgcacattccttacatgggcgtcgcttcgggaacagaactgtgcatgctggatatgctccgtatgatctctacttgcagaaataccccaggtgattctgcgtttgcgactgcatgagttgcgatacgagctttgcctatgtgccagtatttcacagaaacttcagacttgtagttttggcttttgagcctttggatggttcttccggtccagatagtggtaccattagttgaacgaaatatttggaaatgttgttccacagtagatatcggatggacaataggatataagtactggatagagacacaagttgtcgttaacatcgttctttacttcgctattaatgtttttgatgacgtcagacattagtgtggatggatggatggaatggatttattgcaagattttgactgctataa

SEQ ID NO: 209753 - DNA, 2276 bp, Zea Mays
  misc_feature (1)..(2): n is a, c, g, or t
nnagatagaaatgctggaaggaatgagtatgcaacaccataccatggagaatcagagttgaaaaggagaaggtccagaagcagggatcatgatcgagaaagatacagtaggtctatctcaccgccactaagggaacaaaggtataattaccgtggacgtgattttggcaatcctccttactactctatggagaaatcaagggggaagtatgctgaagttgataaacaaagatcgtcggggagtggtggatacattggtgggttgcaccagagatatgaaagccggcttggtggatactcaccaaggaaaaagaaaacatcactgcaagctgagcaggcaactaccaagactccttccaaggtcattcagtccccagaaaaaaaatcagccacatgggatcagcctcctgttaaagcaaaccaatctaactttcctaccactttcctgccaactgttggccagatggctcctactccattcagtttcagcgtgataaaggacccttcaactacagctgtgacaatgttggcagtaaactccagcggtctaaaccatgcctcagttgtacgataaacagagaaaaacgtcaggcttttgtggaatttcttacaccagaggatgctacagcagctatttcttttgatggaaggtctctaaatggatctgtgttgagaattcgacgccccaaagaatatgttgaaacggtgaatgttacccctaagaaggcagaagagactgctttgatatctgatgttgttgcagattcaccatacaagattttcatagcgggcattgctggagtgatctcatctaagatgctaatggagattgttagtgcatttggcccattggctgcataccgctttctttttaacaatgagctcggtggaccctgtgcatttcttgagtacgccgaccgctccgttacttctaaggcatgtgctggcctcaatgggatgatgcttggtggacgtgtactgactgctgtgcatgtgtttcctaatcctcatgtggaggctgctaatgaggcttccccattttatggtattcctgacaatgctaaattgcttctgaaagaaccaacaaaggtcctgcagctaaaaaatgtgtttgaacgagaagagtatatgctactttcaaaatctgagctggaagaaacattggaagatgtacgtgttgaatgtacgaggtttggagcagtcaaatctgtaaatgtagttgagtatcctgctgctggtgtcagtgctgcagaggagaacatagttgagctcaagattgaatgcactgaattttctgatacggaaaacattgcaaaggctgtatcagaatattctgtaccgattattccgagcatagatgttctaaatcattctgtcgcttcggatactaaagatgtggatcttattccagagagtcaggatcagaaggacaaacacctcccttcaaatgcagcactttgtgagagtgaggcacctgtagcagatgaggacgcagagcttgatgaaactcagtctagagctgctctccccacaccgcaacatgctgaagctgatcatacggaagcagctgtggatgagaataaacatacaggagcagggaaggttactgctactgcaacggacgacgatgcagtagaaaagagtcatggagacccaagaacctcagagacctgcaatcctgctggacctacagacaaagcggagaaacctggaaggtactccgaacaaggcgctggtgatgtgactgaagatcgtccagaaaaagaagcccaagctgttgggaccagcgacactggtttcgtgtttgaacctggttctgtgcttgtggagtttttgcgggaggaggctgcttgcatggccgcacattccttacatgggcgtcgcttcgggaacagaactgtgcatgctggatatgctccgtatgatctctacttgcagaaataccccaggtgattctgcgtttgcgactgcatgagttgcgatacgagctttgcctatgtgccagtatttcacagaaacttcagacttgtagttttggcttttgagcctttggatggttcttccggtccagatagtggtaccattagttgaacgaaatatttggaaatgttgttccacagtagatatcggatggacaataggatataagtactggatagagacacaagttgtcgttaacatcgttctttacttcgctattaatgtttttgatgacgtcagacattagtgtggatggatggatggaatggatttattgcaagattttgactgctataa

SEQ ID NO: 209754 - DNA, 2331 bp, Zea Mays
  misc_feature (1)..(2): n is a, c, g, or t
nnagatagaaatgctggaaggaatgagtatgcaacaccataccatggagaatcagagttgaaaaggagaaggtccagaagcagggatcatgatcgagaaagatacagtaggtctatctcaccgccactaagggaacaaaggtataattaccgtggacgtgattttggcaatcctccttactactctatggagaaatcaagggggaagtatgctgaagttgataaacaaagatcgtcggggagtggtggatacattggtgggttgcaccagagatatgaaagccggcttggtggatactcaccaaggaaaaagaaaacatcactgcaagctgagcaggcaactaccaagactccttccaaggtcattcagtccccagaaaaaaaatcagccacatgggatcagcctcctgttaaagcaaaccaatctaactttcctaccactttcctgccaactgttggccagatggctcctactccattcagtttcagcgtgataaaggacccttcaactacagctgtgacaatgttggcagctacagaggataagttgattgactgcttgaatgacttcttattgtctactggcagtaaactccagcggtctaaaccatgcctcagttgtacgataaacagagaaaaacgtcaggcttttgtggaatttcttacaccagaggatgctacagcagctatttcttttgatggaaggtctctaaatggatctgtgttgagaattcgacgccccaaagaatatgttgaaacggtgaatgttacccctaagaaggcagaagagactgctttgatatctgatgttgttgcagattcaccatacaagattttcatagcgggcattgctggagtgatctcatctaagatgctaatggagattgttagtgcatttggcccattggctgcataccgctttctttttaacaatgagctcggtggaccctgtgcatttcttgagtacgccgaccgctccgttacttctaaggcatgtgctggcctcaatgggatgatgcttggtggacgtgtactgactgctgtgcatgtgtttcctaatcctcatgtggaggctgctaatgaggcttccccattttatggtattcctgacaatgctaaattgcttctgaaagaaccaacaaaggtcctgcagctaaaaaatgtgtttgaacgagaagagtatatgctactttcaaaatctgagctggaagaaacattggaagatgtacgtgttgaatgtacgaggtttggagcagtcaaatctgtaaatgtagttgagtatcctgctgctggtgtcagtgctgcagaggagaacatagttgagctcaagattgaatgcactgaattttctgatacggaaaacattgcaaaggctgtatcagaatattctgtaccgattattccgagcatagatgttctaaatcattctgtcgcttcggatactaaagatgtggatcttattccagagagtcaggatcagaaggacaaacacctcccttcaaatgcagcactttgtgagagtgaggcacctgtagcagatgaggacgcagagcttgatgaaactcagtctagagctgctctccccacaccgcaacatgctgaagctgatcatacggaagcagctgtggatgagaataaacatacaggagcagggaaggttactgctactgcaacggacgacgatgcagtagaaaagagtcatggagacccaagaacctcagagacctgcaatcctgctggacctacagacaaagcggagaaacctggaaggtactccgaacaaggcgctggtgatgtgactgaagatcgtccagaaaaagaagcccaagctgttgggaccagcgacactggtttcgtgtttgaacctggttctgtgcttgtggagtttttgcgggaggaggctgcttgcatggccgcacattccttacatgggcgtcgcttcgggaacagaactgtgcatgctggatatgctccgtatgatctctacttgcagaaataccccaggtgattctgcgtttgcgactgcatgagttgcgatacgagctttgcctatgtgccagtatttcacagaaacttcagacttgtagttttggcttttgagcctttggatggttcttccggtccagatagtggtaccattagttgaacgaaatatttggaaatgttgttccacagtagatatcggatggacaataggatataagtactggatagagacacaagttgtcgttaacatcgttctttacttcgctattaatgtttttgatgacgtcagacattagtgtggatggatggatggaatggatttattgcaagattttgactgctataa

SEQ ID NO: 209755 - DNA, 2635 bp, Zea Mays
  misc_feature (1)..(2): n is a, c, g, or t
nnagatagaaatgctggaaggaatgagtatgcaacaccataccatggagaatcagagttgaaaaggagaaggtccagaagcagggatcatgatcgagaaagatacagtaggtctatctcaccgccactaagggaacaaaggtataattaccgtggacgtgattttggcaatcctccttactactctatggagaaatcaagggggaagtatgctgaagttgataaacaaagatcgtcggggagtggtggatacattggtgggttgcaccagagatatgaaagccggcttggtggatactcaccaaggaaaaagaaaacatcactgcaagctgagcaggcaactaccaagactccttccaaggtcattcagtccccagaaaaaaaatcagccacatgggatcagcctcctgttaaagcaaaccaatctaactttcctaccactttcctgccaactgttggccagatggctcctactccattcagtttcagcgtgataaaggacccttcaactacagctgtgacaatgttggcaggtaatagtttgactgcagattctgtccagcttacacaagcaacgcgcccactcaggaggttgcacattgaaaatttgcctgattcagctacagaggataagttgattgactgcttgaatgacttcttattgtctactggcagtaaactccagcggtctaaaccatgcctcagttgtacgataaacagagaaaaacgtcaggcttttgtggaatttcttacaccagaggatgctacagcagctatttcttttgatggaaggtctctaaatggatctgtgttgagaattcgacgccccaaagaatatgttgaaacggtgggtattttaattgggtgtgtcataattcacgttcagcagcatcgtgaagcaaaggaattgtaaagcaggcttcctggtgtagtgcaaatactatgtgattgctgctacttcagattttcattggctgattacagtactgcagacaggcagagtccttatggtgttcagttcatggaaacattaggaagacagcttgtacagcatggttcaagtaaataatgttacccctaagaaggcagaagagactgctttgatatctgatgttgttgcagattcaccatacaagattttcatagcgggcattgctggagtgatctcatctaagatgctaatggagattgttagtgcatttggcccattggctgcataccgctttctttttaacaatgagctcggtggaccctgtgcatttcttgagtacgccgaccgctccgttacttctaaggcatgtgctggcctcaatgggatgatgcttggtggacgtgtactgactgctgtgcatgtgtttcctaatcctcatgtggaggctgctaatgaggcttccccattttatggtattcctgacaatgctaaattgcttctgaaagaaccaacaaaggtcctgcagctaaaaaatgtgtttgaacgagaagagtatatgctactttcaaaatctgagctggaagaaacattggaagatgtacgtgttgaatgtacgaggtttggagcagtcaaatctgtaaatgtagttgagtatcctgctgctggtgtcagtgctgcagaggagaacatagttgagctcaagattgaatgcactgaattttctgatacggaaaacattgcaaaggctgtatcagaatattctgtaccgattattccgagcatagatgttctaaatcattctgtcgcttcggatactaaagatgtggatcttattccagagagtcaggatcagaaggacaaacacctcccttcaaatgcagcactttgtgagagtgaggcacctgtagcagatgaggacgcagagcttgatgaaactcagtctagagctgctctccccacaccgcaacatgctgaagctgatcatacggaagcagctgtggatgagaataaacatacaggagcagggaaggttactgctactgcaacggacgacgatgcagtagaaaagagtcatggagacccaagaacctcagagacctgcaatcctgctggacctacagacaaagcggagaaacctggaaggtactccgaacaaggcgctggtgatgtgactgaagatcgtccagaaaaagaagcccaagctgttgggaccagcgacactggtttcgtgtttgaacctggttctgtgcttgtggagtttttgcgggaggaggctgcttgcatggccgcacattccttacatgggcgtcgcttcgggaacagaactgtgcatgctggatatgctccgtatgatctctacttgcagaaataccccaggtgattctgcgtttgcgactgcatgagttgcgatacgagctttgcctatgtgccagtatttcacagaaacttcagacttgtagttttggcttttgagcctttggatggttcttccggtccagatagtggtaccattagttgaacgaaatatttggaaatgttgttccacagtagatatcggatggacaataggatataagtactggatagagacacaagttgtcgttaacatcgttctttacttcgctattaatgtttttgatgacgtcagacattagtgtggatggatggatggaatggatttattgcaagattttgactgctataa

SEQ ID NO: 209756 - DNA, 2585 bp, Zea Mays
atataacattgacaccctttaaaggcggtttcaaggcaattcattccaaggtccacttccaagcactcttgctaatcttgttcagctaacaagcttaattttaaggaattgcaggatatttggtactttggcattagtgaacttttcaaaatttacaggattaacattattggatttgagttttaataatatcataggtgaagtaccacaagctctactaaatatgaattcactcaccttgttagacttttcctacaactacctctcaggaaaccttccttcttgggctagtcataatttgcaatttgtcttacctgcggggctggagtgccttcagcgaaacacgtcatgctttcttggctctccacaatcttcctcctttactgtagactgtgggagtagtagatctgtatttgcttcagataattccatgtatcaacctgatgatgccaatcttggtgttgcatcatattatatttcaagcccaccaagatggggtgttagtaatgtcgggagattcatggatacatcaaacgggagttacatagtcaacagttcacgccggtttcagaataccctagattccaaacttttccaaacagcaaggatgtcagcatcaactttaagatactatggttttggacttgaaaatggggactacacagtcacacttcaatttggagaatttgactttgaagatttacaaacttggaagagcgttgggagaagggttttcgatatctatctccagggtgagcgtaaggagcagaactttaacataaagaaggcagcaaaagaagctggcgaagcaagcacatcgtacactgctgtcaagaaacaatatactgtacctgtcacaaaaaacatcctagaaattcatctcttttgggctggaaagggcacttgttgcatccctaatcaaggcgattatgggcctacaatatcagctttgagtgcaactctaaatacaaaaaagaagggtaataaaataggtgtaattattggagtcgtgattggtgcaacagttttaggactagcaatacttgctacactctgtgtgtggaggcacaaaaggagaaaagtatcactagagcagcaagagctctacaatattgttcgaatacctaatgtattctgttacacttatggtgaactaaggaccgctactgaaaattttagttctgctaatcttcttggtgaagggggatatggatcagtttataagggtaaattagttgatggcagtgtggtggcaattaaacaactatctgaaacatctcgccaagggaagaaggaattcgtagctgaaatagaaactatttcccgagtgcagcaccgtaatcttgtgaagttgtttggtttttgccttgagggaaataaaccacttttggtttatgagtacatggagagtggaagccttgataaagcattgtttggaaatggaagattgaacttgaattggtcaacacgatataaaatatgcttggggattgcaagaggcttagcttatctccacgaagagtctagcatccgcattgtgcatagggacataaaggccagcaatgtattacttgatgccactttgaaccctaagatttcggatttcgggctcgccaaactttatgacgataaaaagacacatgttagcacaaaagttgctggtacatttggctatctttcacctgagtacgccatgagaggtcacatgactgagaaagttgatatttttgcttttggtgtggtcatgttggagattattgctggaaggccgaactatgatggtaagcttgaccaagacatggcttatcttttagaatgggtctggcaactttacgaggaagaccatccgctggacattgcggatcccaagctcacagaattcgatagtgtcgagttgctccgtgccatccgcatcgccctcctctgcatccagagctcacctcgtcaaaggccatccatgtcgagagtggtgtcaatgctcacaggagacagcgaggcgcctgaggcagtgtccaagcctagctatgttgccgaatggcagagcaacactgaagggacgtcaagctcagtgtccacagcagaggctgtgtccgtggctccattcctaaaccccgttgtggacgatggccggtgatgatggccatcgctaagatcatcttatgtcaagcactcaagccacagattgttttcttggagatccacctttaaaggccccattatttaggttgaatgtggatgacagatttatgttgttgactggatgagatgtcctagggtttcctcacgttgtagaatacaactctcacaagtataagaatctaggaacatattccttcgatgtaacatacctcttttgtttaatctgttttgtaagagaaaccagaagaacaccttgtatttcggttgatattttgaaacccacagccaattgaatgctgggtgtgtaggcatatatatgaccaataggttgattgtaagctttactacaatagtggggcggtctcgaagtatattgccagatatgttgcagttcattttctaacacgagaaacccttgatatgctcgaacagaaagcaacaactga

SEQ ID NO: 209757 - DNA, 4345 bp, Zea Mays
ctcgagtgttcttgtcgcctacggagacctccacgcgacgcttcgtctctcctcacctgcactcgcgatttcaagaaccgactgtattttctatcctcgcactttctggaaccggatgggcagctacttttcgatggccggctagggttccacacaccaaccatgatgttcccctcaacctctgtcaacatttgagactggttcaactcgcttgtgtgccgaagttcccctgcggcggccgtcatcaccatggtctcccctcgtgtggctctggtcttatcgtggtgaccatcatgggtcgagaggagtgcgacgacctggggttcactgtctcacccttagctttagtgcaaagttccctcccagctcatcgcagaccaaggtacgatagtgtggaggcctacatcgtgcaacctgggcttcaccctctgcaccgcctgcaacaatatctaatttcgtcttagatcaagcttttggatccccacgctcccccacccattcttctgtaatgcggtgttctccaagctcgggctgcaggtgtggtcgccatggttcaaaggcgacccgtgcgtcggcgcggccacggacggcacgtccatctacgccgacaaaatgaacccgggcatcaagtgcgactgctccgaccacaacaacaccatctgccacattaccgagctgcagcattaacgacctgttcgttttaatctcaatccacgtggatcgaaggcaattgaggccttattcgtttgtgtcggattgcacccggaatcgtttcagctaatcaaagtttatataaattagagaatcaattcagttaggaatcgttccgacccaccaatccgacacaaaggaacaaggcctgagtaagttaaagtccctcctgatctcttctaaccccctcccccttccatgaaatgtgaataaccgaataagtcctacaaggcaaagtcttgtaatggttatgaactgcactcttgtgactgcaggaaaatgaacaaactggatgtggttggtcctatacctgaggagctgaggaacctcagccacttgacaactctgaatttacaacagaattacttaacagggcctttgccatcgttccttggagaattaactgctttgcagcagatgtcgctttctggcaatgcattatcaggaactattccaaaggagctggggaaccttgtgaatctcataatcctgagtttaggcacgaacaatttaactggctcccttccttctgaattgggtaacctggttaaactagagcatatgtacattgatagtgctggcttaagtggtcctataccatcatcattttcgaaacttacacgattgaaaacattgtatatccattagacacattttttcaatagtattgttctatgccactcaacgttatatgttattccactttttgtttaggtgcgcatcagataatgactttactgggaaaataccagattacattggaagctggagtaatttaacagatttgcggtttcaaggcaattcattccaaggtccacttccaagcactcttgctaatcttgttcagctaacaagcttacgaataggtgacattgtaactgggagttcttcgctggcattcatcagtaacatgacatctttgaacttattgtattcccaattaatcattcactttatgaatcaaactgcgccttcatttgctccattgtaaccgagttgttatatacttaaattggtgacattattcattgcagaattttaaggaattgcaggatatttggtactttggcattagtgaacttttcaaaatttacaggattaacattattggatttgagttttaataatatcataggtgaagtaccacaagctctactaaatatgaattcactcaccttgttatttcttgggaacaatagtcttacaggaggccttccaagctctataggaccttctattaagtacttagacttttcctacaactacctctcaggaaaccttccttcttgggctagtcataatttgcaattaaatttggtggcaaactacttcgtgatcaacaagtccaaagatagtgtcttacctgcggggctggagtgccttcagcgaaacacgtcatgctttcttggctctccacaatcttcctcctttactgtagactgtgggagtagtagatctgtatttgcttcagataattccatgtatcaacctgatgatgccaatcttggtgttgcatcatattatatttcaagcccaccaagatggggtgttagtaatgtcgggagattcatggatacatcaaacgggagttacatagtcaacagttcacgccggtttcagaataccctagattccaaacttttccaaacagcaaggatgtcagcatcaactttaagatactatggttttggacttgaaaatggggactacacagtcacacttcaatttggagaatttgactttgaagatttacaaacttggaagagcgttgggagaagggttttcgatatctatctccagggtgagcgtaaggagcagaactttaacataaagaaggcagcaaaagaagctggcgaagcaagcacatcgtacactgctgtcaagaaacaatatactgtacctgtcacaaaaaacatcctagaaattcatctcttttgggctggaaagggcacttgttgcatccctaatcaaggcgattatgggcctacaatatcagctttgagtgcaactctaaatacaaaaaagaagggtaataaaataggtgtaattattggagtcgtgattggtgcaacagttttaggactagcaatacttgctacactctgtgtgtggaggcacaaaaggagaaaagtatcactagagcagcaagagctctacaatattgttcgaatacctaatgtattctgttacacttatggtgaactaaggaccgctactgaaaattttagttctgctaatcttcttggtgaagggggatatggatcagtttataagggtaaattagttgatggcagtgtggtggcaattaaacaactatctgaaacatctcgccaagggaagaaggaattcgtagctgaaatagaaactatttcccgagtgcagcaccgtaatcttgtgaagttgtttggtttttgccttgagggaaataaaccacttttggtttatgagtacatggagagtggaagccttgataaagcattgtttggaaatggaagattgaacttgaattggtcaacacgatataaaatatgcttggggattgcaagaggcttagcttatctccacgaagagtctagcatccgcattgtgcatagggacataaaggccagcaatgtattacttgatgccactttgaaccctaagatttcggatttcgggctcgccaaactttatgacgataaaaagacacatgttagcacaaaagttgctggtacatttggctatctttcacctgagtacgccatgagaggtcacatgactgagaaagttgatatttttgcttttggtgtggtcatgttggagattattgctggaaggccgaactatgatggtaagcttgaccaagacatggcttatcttttagaatgggtctggcaactttacgaggaagaccatccgctggacattgcggatcccaagctcacagaattcgatagtgtcgagttgctccgtgccatccgcatcgccctcctctgcatccagagctcacctcgtcaaaggccatccatgtcgagagtggtgtcaatgctcacaggagacagcgaggcgcctgaggcagtgtccaagcctagctatgttgccgaatggcagagcaacactgaagggacgtcaagctcagtgtccacagcagaggctgtgtccgtggctccattcctaaaccccgttgtggacgatggccggtgatgatggccatcgctaagatcatcttatgtcaagcactcaagccacagattgttttcttggagatccacctttaaaggccccattatttaggttgaatgtggatgacagatttatgttgttgactggatgagatgtcctagggtttcctcacgttgtagaatacaactctcacaagtataagaatctaggaacatattccttcgatgtaacatacctcttttgtttaatctgttttgtaagagaaaccagaagaacaccttgtatttcggttgatattttgaaacccacagccaattgaatgctgggtgtgtaggcatatatatgaccaataggttgattgtaagctttactacaatagtggggcggtctcgaagtatattgccagatatgttgcagttcattttctaacacgagaaacccttgatatgctcgaacagaaagcaacaactga

SEQ ID NO: 209758 - DNA, 4125 bp, Zea Mays
ctcgagtgttcttgtcgcctacggagacctccacgcgacgcttcgtctctcctcacctgcactcgcgatttcaagaaccgactgtattttctatcctcgcactttctggaaccggatgggcagctacttttcgatggccggctagggttccacacaccaaccatgatgttcccctcaacctctgtcaacatttgagactggttcaactcgcttgtgtgccgaagttcccctgcggcggccgtcatcaccatggtctcccctcgtgtggctctggtcttatcgtggtgaccatcatgggtcgagaggagtgcgacgacctggggttcactgtctcacccttagctttagtgcaaagttccctcccagctcatcgcagaccaaggtacgatagtgtggaggcctacatcgtgcaacctgggcttcaccctctgcaccgcctgcaacaatatctaatttcgtcttagatcaagcttttggatccccacgctcccccacccattcttctgtaatgcggtgttctccaagctcgggctgcaggtgtggtcgccatggttcaaaggcgacccgtgcgtcggcgcggccacggacggcacgtccatctacgccgacaaaatgaacccgggcatcaagtgcgactgctccgaccacaacaacaccatctgccacattaccgagctgaaaatgaacaaactggatgtggttggtcctatacctgaggagctgaggaacctcagccacttgacaactctgaatttacaacagaattacttaacagggcctttgccatcgttccttggagaattaactgctttgcagcagatgtcgctttctggcaatgcattatcaggaactattccaaaggagctggggaaccttgtgaatctcataatcctgagtttaggcacgaacaatttaactggctcccttccttctgaattgggtaacctggttaaactagagcatatgtacattgatagtgctggcttaagtggtcctataccatcatcattttcgaaacttacacgattgaaaacattgtgcgcatcagataatgactttactgggaaaataccagattacattggaagctggagtaatttaacagatttgcggtttcaaggcaattcattccaaggtccacttccaagcactcttgctaatcttgttcagctaacaagcttacgaataggtgacattgtaactgggagttcttcgctggcattcatcagtaacatgacatctttgaacttattgtattcccaattaatcattcactttatgaatcaaactgcgccttcatttgctccattgtaaccgagttgttatatacttaaattggtgacattattcattgcagaattttaaggaattgcaggatatttggtactttggcattagtgaacttttcaaaatttacaggattaacattattgtaaggcatttcgtttcttccaaattttttgttaaatctgctttgtgcaagatgcttcctatggatatgcatcgcgagatgtttcctttcacacatattctcgtcttttacttacttatgcagggatttgagttttaataatatcatagcacatgcattccgatcagatttcttgggaacaatagtcttacaggaggccttccaagctctataggaccttctattaagtacttagacttttcctacaactacctctcaggaaaccttccttcttgggctagtcataatttgcaattgaaataaacacactgttaatatgctccaagtccaaagacctctcaagttttttgcgtgtctcattatgcatagaaatttggtggcaaactacttcgtgatcaacaagtccaaagatagtgtcttacctgcggggctggagtgccttcagcgaaacacgtcatgctttcttggctctccacaatcttcctcctttactgtagactgtgggagtagtagatctgtatttgcttcagataattccatgtatcaacctgatgatgccaatcttggtgttgcatcatattatatttcaagcccaccaagatggggtgttagtaatgtcgggagattcatggatacatcaaacgggagttacatagtcaacagttcacgccggtttcagaataccctagattccaaacttttccaaacagcaaggatgtcagcatcaactttaagatactatggttttggacttgaaaatggggactacacagtcacacttcaatttggagaatttgactttgaagatttacaaacttggaagagcgttgggagaagggttttcgatatctatctccagggtgagcgtaaggagcagaactttaacataaagaaggcagcaaaagaagctggcgaagcaagcacatcgtacactgctgtcaagaaacaatatactgtacctgtcacaaaaaacatcctagaaattcatctcttttgggctggaaagggcacttgttgcatccctaatcaaggcgattatgggcctacaatatcagctttgagtgcaactctaaatacaaaaaagaagggtaataaaataggtgtaattattggagtcgtgattggtgcaacagttttaggactagcaatacttgctacactctgtgtgtggaggcacaaaaggagaaaagtatcactagagcagcaagagctctacaatattgttcgaatacctaatgtattctgttacacttatggtgaactaaggaccgctactgaaaattttagttctgctaatcttcttggtgaagggggatatggatcagtttataagggtaaattagttgatggcagtgtggtggcaattaaacaactatctgaaacatctcgccaagggaagaaggaattcgtagctgaaatagaaactatttcccgagtgcagcaccgtaatcttgtgaagttgtttggtttttgccttgagggaaataaaccacttttggtttatgagtacatggagagtggaagccttgataaagcattgtttggaaatggaagattgaacttgaattggtcaacacgatataaaatatgcttggggattgcaagaggcttagcttatctccacgaagagtctagcatccgcattgtgcatagggacataaaggccagcaatgtattacttgatgccactttgaaccctaagatttcggatttcgggctcgccaaactttatgacgataaaaagacacatgttagcacaaaagttgctggtacatttggctatctttcacctgagtacgccatgagaggtcacatgactgagaaagttgatatttttgcttttggtgtggtcatgttggagattattgctggaaggccgaactatgatggtaagcttgaccaagacatggcttatcttttagaatgggtctggcaactttacgaggaagaccatccgctggacattgcggatcccaagctcacagaattcgatagtgtcgagttgctccgtgccatccgcatcgccctcctctgcatccagagctcacctcgtcaaaggccatccatgtcgagagtggtgtcaatgctcacaggagacagcgaggcgcctgaggcagtgtccaagcctagctatgttgccgaatggcagagcaacactgaagggacgtcaagctcagtgtccacagcagaggctgtgtccgtggctccattcctaaaccccgttgtggacgatggccggtgatgatggccatcgctaagatcatcttatgtcaagcactcaagccacagattgttttcttggagatccacctttaaaggccccattatttaggttgaatgtggatgacagatttatgttgttgactggatgagatgtcctagggtttcctcacgttgtagaatacaactctcacaagtataagaatctaggaacatattccttcgatgtaacatacctcttttgtttaatctgttttgtaagagaaaccagaagaacaccttgtatttcggttgatattttgaaacccacagccaattgaatgctgggtgtgtaggcatatatatgaccaataggttgattgtaagctttactacaatagtggggcggtctcgaagtatattgccagatatgttgcagttcattttctaacacgagaaacccttgatatgctcgaacagaaagcaacaactga

SEQ ID NO: 209759 - DNA, 4875 bp, Zea Mays
ctcgagtgttcttgtcgcctacggagacctccacgcgacgcttcgtctctcctcacctgcactcgcgatttcaagaaccgactgtattttctatcctcgcactttctggaaccggatgggcagctacttttcgatggccggctagggttccacacaccaaccatgatgttcccctcaacctctgtcaacatttgagactggttcaactcgcttgtgtgccgaagttcccctgcggcggccgtcatcaccatggtctcccctcgtgtggctctggtcttatcgtggtgaccatcatgggtcgagaggagtgcgacgacctggggttcactgtctcacccttagctttagtgcaaagttccctcccagctcatcgcagaccaaggtacgatagtgtggaggcctacatcgtgcaacctgggcttcaccctctgcaccgcctgcaacaatatctaatttcgtcttagatcaagcttttggatccccacgctcccccacccattcttctgtaatgcggtgttctccaagctcgggctgcaggtgtggtcgccatggttcaaaggcgacccgtgcgtcggcgcggccacggacggcacgtccatctacgccgacaaaatgaacccgggcatcaagtgcgactgctccgaccacaacaacaccatctgccacattaccgagctgaaaatgaacaaactggatgtggttggtcctatacctgaggagctgaggaacctcagccacttgacaactctgaatttacaacagaattacttaacagggcctttgccatcgttccttggagaattaactgctttgcagcagatgtcgctttctggcaatgcattatcaggaactattccaaaggagctggggaaccttgtgaatctcataatcctgagtttaggcacgaacaatttaactggctcccttccttctgaattgggtaacctggttaaactagagcatatgtacattgatagtgctggcttaagtggtcctataccatcatcattttcgaaacttacacgattgaaaacattgtgcgcatcagataatgactttactgggaaaataccagattacattggaagctggagtaatttaacagatttgcggtttcaaggcaattcattccaaggtccacttccaagcactcttgctaatcttgttcagctaacaagcttacgaataggtgacattgtaactgggagttcttcgctggcattcatcagtaacatgacatctttgaacttattgtattcccaattaatcattcactttatgaatcaaactgcgccttcatttgctccattgtaaccgagttgttatatacttaaattggtgacattattcattgcagaattttaaggaattgcaggatatttggtactttggcattagtgaacttttcaaaatttacaggattaacattattggatttgagttttaataatatcataggtgaagtaccacaagctctactaaatatgaattcactcaccttgttatttcttgggaacaatagtcttacaggaggccttccaagctctataggaccttctattaagtacttagacttttcctacaactacctctcaggaaaccttccttcttgggctagtcataatttgcaattgtaagtattaagttatgtaatttattgttggtcaaccgaacttttagcccaattgtcttttcaaagcataatgtagcccaacttgaaatatatgcttatagtacatgtatttattaaaatatatttttgaatgttcaatacatctaaaaaaacttgtgttgaggcatttagcttatatttctttttagatttgttgcattttgaagcaacctattattctgaatctttgaagaagtagacatacattcccttactgcttaactccaaaaaggcaaaaaaaaagtttgttgctttagtgtatcttgattctaggaaataaacacactgttaatatgctccaagtccaaagacctctcaagttttttgcgtgtctcattatgcatagaaatttggtggcaaactacttcgtgatcaacaagtccaaagatagtgtcttacctgcggggctggagtgccttcagcgaaacacgtcatgctttcttggctctccacaatcttcctcctttactgtagactgtgggagtagtagatctgtatttgcttcagataattccatgtatcaacctgatgatgccaatcttggtgttgcatcatattatatttcaagcccaccaagatggggtgttagtaatgtcgggagattcatggatacatcaaacgggagttacatagtcaacagttcacgccggtttcagaataccctagattccaaacttttccaaacagcaaggatgtcagcatcaactttaagatactatggttttggacttgaaaatggggactacacagtcacacttcaatttggagaatttgactttgaagatttacaaacttggaagagcgttgggagaagggttttcgatatctatctccagggtgagcgtaaggagcagaactttaacataaagaaggcagcaaaagaagctggcgaagcaagcacatcgtacactgctgtcaagaaacaatatactgtacctgtcacaaaaaacatcctagaaattcatctcttttgggctggaaagggcacttgttgcatccctaatcaaggcgattatgggcctacaatatcagctttgagtgcaactctaagtattctcttttgatacaatcatggctttaatattgttcagataatgtccttacgttcaacaatttcattatatacaatttctaccacgagaagtactgaagactaaaaagactggaattttagaaatgcctaacataaaagccaaatattgtttatattgatgtataatcatgctttctaacaaatgcctctcctacagatacaaaaaagaagggtaataaaataggtgtaattattggagtcgtgattggtgcaacagttttaggactagcaatacttgctacactctgtgtgtggaggcacaaaaggagaaaagtatcactagagcagcaagagctctacaatattgttcgaatacctaatgtattctgttacacttatggtgaactaaggaccgctactgaaaattttagttctgctaatcttcttggtgaagggggatatggatcagtttataaggtttgttcatttgtagtacacaatgcatgatttgaatctgctagggatcttttgtggcactgtaggttaatagtgaacaacgaatttgttttcattgtgcaaatttggctagagttgtgttgtttaattctactttgttcaatgaaaattccttttatcatttactcatttaacgtacttctccaattatcttactaacatcagtgcataataaatctgggatattccctgttattttccttttccccctgttttgcacgtggtcagtaaaatgagattgattgggtactctagtgcatttactctattacatgatattgattttacttggtgcttataactcttttttagaaaaattcaccttctggcagggtaaattagttgatggcagtgtggtggcaattaaacaactatctgaaacatctcgccaagggaagaaggaattcgtagctgaaatagaaactatttcccgagtgcagcaccgtaatcttgtgaagttgtttggtttttgccttgagggaaataaaccacttttggtttatgagtacatggagagtggaagccttgataaagcattgtttggaaatggaagattgaacttgaattggtcaacacgatataaaatatgcttggggattgcaagaggcttagcttatctccacgaagagtctagcatccgcattgtgcatagggacataaaggccagcaatgtattacttgatgccactttgaaccctaagatttcggatttcgggctcgccaaactttatgacgataaaaagacacatgttagcacaaaagttgctggtacatttggctatctttcacctgagtacgccatgagaggtcacatgactgagaaagttgatatttttgcttttggtgtggtcatgttggagattattgctggaaggccgaactatgatggtctggcaactttacgaggaagaccatccgctggacattgcggatcccaagctcacagaattcgatagtgtcgagttgctccgtgccatccgcatcgccctcctctgcatccagagctcacctcgtcaaaggccatccatgtcgagagtggtgtcaatgctcacaggagacagcgaggcgcctgaggcagtgtccaagcctagctatgttgccgaatggcagagcaacactgaagggacgtcaagctcagtgtccacagcagaggctgtgtccgtggctccattcctaaaccccgttgtggacgatggccggtgatgatggccatcgctaagatcatcttatgtcaagcactcaagccacagattgttttcttggagatccacctttaaaggccccattatttaggttgaatgtggatgacagatttatgttgttgactggatgagatgtcctagggtttcctcacgttgtagaatacaactctcacaagtataagaatctaggaacatattccttcgatgtaacatacctcttttgtttaatctgttttgtaagagaaaccagaagaacaccttgtatttcggttgatattttgaaacccacagccaattgaatgctgggtgtgtaggcatatatatgaccaataggttgattgtaagctttactacaatagtggggcggtctcgaagtatattgccagatatgttgcagttcattttctaacacgagaaacccttgatatgctcgaacagaaagcaacaactga

SEQ ID NO: 209760 - DNA, 4898 bp, Zea Mays
ctcgagtgttcttgtcgcctacggagacctccacgcgacgcttcgtctctcctcacctgcactcgcgatttcaagaaccgactgtattttctatcctcgcactttctggaaccggatgggcagctacttttcgatggccggctagggttccacacaccaaccatgatgttcccctcaacctctgtcaacatttgagactggttcaactcgcttgtgtgccgaagttcccctgcggcggccgtcatcaccatggtctcccctcgtgtggctctggtcttatcgtggtgaccatcatgggtcgagaggagtgcgacgacctggggttcactgtctcacccttagctttagtgcaaagttccctcccagctcatcgcagaccaaggtacgatagtgtggaggcctacatcgtgcaacctgggcttcaccctctgcaccgcctgcaacaatatctaatttcgtcttagatcaagcttttggatccccacgctcccccacccattcttctgtaatgcggtgttctccaagctcgggctgcaggtgtggtcgccatggttcaaaggcgacccgtgcgtcggcgcggccacggacggcacgtccatctacgccgacaaaatgaacccgggcatcaagtgcgactgctccgaccacaacaacaccatctgccacattaccgagctgaaaatgaacaaactggatgtggttggtcctatacctgaggagctgaggaacctcagccacttgacaactctgaatttacaacagaattacttaacagggcctttgccatcgttccttggagaattaactgctttgcagcagatgtcgctttctggcaatgcattatcaggaactattccaaaggagctggggaaccttgtgaatctcataatcctgagtttaggcacgaacaatttaactggctcccttccttctgaattgggtaacctggttaaactagagcatatgtacattgatagtgctggcttaagtggtcctataccatcatcattttcgaaacttacacgattgaaaacattgtgcgcatcagataatgactttactgggaaaataccagattacattggaagctggagtaatttaacagatttgcggtttcaaggcaattcattccaaggtccacttccaagcactcttgctaatcttgttcagctaacaagcttacgaataggtgacattgtaactgggagttcttcgctggcattcatcagtaacatgacatctttgaacttattaattttaaggaattgcaggatatttggtactttggcattagtgaacttttcaaaatttacaggattaacattattggatttgagttttaataatatcataggtgaagtaccacaagctctactaaatatgaattcactcaccttgttatttcttgggaacaatagtcttacaggaggccttccaagctctataggaccttctattaagtacttagacttttcctacaactacctctcaggaaaccttccttcttgggctagtcataatttgcaattgtaagtattaagttatgtaatttattgttggtcaaccgaacttttagcccaattgtcttttcaaagcataatgtagcccaacttgaaatatatgcttatagtacatgtatttattaaaatatatttttgaatgttcaatacatctaaaaaaacttgtgttgaggcatttagcttatatttctttttagatttgttgcattttgaagcaacctattattctgaatctttgaagaagtagacatacattcccttactgcttaactccaaaaaggcaaaaaaaaagtttgttgctttagtgtatcttgattctaggaaataaacacactgttaatatgctccaagtccaaagacctctcaagttttttgcgtgtctcattatgcatagaaatttggtggcaaactacttcgtgatcaacaagtccaaagatagtgtcttacctgcggggctggagtgccttcagcgaaacacgtcatgctttcttggctctccacaatcttcctcctttactgtagactgtgggagtagtagatctgtatttgcttcagataattccatgtatcaacctgatgatgccaatcttggtgttgcatcatattatatttcaagcccaccaagatggggtgttagtaatgtcgggagattcatggatacatcaaacgggagttacatagtcaacagttcacgccggtttcagaataccctagattccaaacttttccaaacagcaaggatgtcagcatcaactttaagatactatggttttggacttgaaaatggggactacacagtcacacttcaatttggagaatttgactttgaagatttacaaacttggaagagcgttgggagaagggttttcgatatctatctccagggtgagcgtaaggagcagaactttaacataaagaaggcagcaaaagaagctggcgaagcaagcacatcgtacactgctgtcaagaaacaatatactgtacctgtcacaaaaaacatcctagaaattcatctcttttgggctggaaagggcacttgttgcatccctaatcaaggcgattatgggcctacaatatcagctttgagtgcaactctaagtattctcttttgatacaatcatggctttaatattgttcagataatgtccttacgttcaacaatttcattatatacaatttctaccacgagaagtactgaagactaaaaagactggaattttagaaatgcctaacataaaagccaaatattgtttatattgatgtataatcatgctttctaacaaatgcctctcctacagatacaaaaaagaagggtaataaaataggtgtaattattggagtcgtgattggtgcaacagttttaggactagcaatacttgctacactctgtgtgtggaggcacaaaaggagaaaagtatcactagagcagcaagagctctacaatattgttcgaatacctaatgtattctgttacacttatggtgaactaaggaccgctactgaaaattttagttctgctaatcttcttggtgaagggggatatggatcagtttataaggtttgttcatttgtagtacacaatgcatgatttgaatctgctagggatcttttgtggcactgtaggttaatagtgaacaacgaatttgttttcattgtgcaaatttggctagagttgtgttgtttaattctactttgttcaatgaaaattccttttatcatttactcatttaacgtacttctccaattatcttactaacatcagtgcataataaatctgggatattccctgttattttccttttccccctgttttgcacgtggtcagtaaaatgagattgattgggtactctagtgcatttactctattacatgatattgattttacttggtgcttataactcttttttagaaaaattcaccttctggcagggtaaattagttgatggcagtgtggtggcaattaaacaactatctgaaacatctcgccaagggaagaaggaattcgtagctgaaatagaaactatttcccgagtgcagcaccgtaatcttgtgaagttgtttggtttttgccttgagggaaataaaccacttttggtttatgagtacatggagagtggaagccttgataaagcattgtttggtatcaaccatttcattcagtttatccagcggcgactagtctaggactcttatataaatctgacatctgaaatgttcattggcatgcaggaaatggaagattgaacttgaattggtcaacacgatataaaatatgcttggggattgcaagaggcttagcttatctccacgaagagtctagcatccgcattgtgcatagggacataaaggccagcaatgtattacttgatgccactttgaaccctaagatttcggatttcgggctcgccaaactttatgacgataaaaagacacatgttagcacaaaagttgctggtacatttggctatctttcacctgagtacgccatgagaggtcacatgactgagaaagttgatatttttgcttttggtgtggtcatgttggagattattgctggaaggccgaactatgatggtaagcttgaccaagacatggcttatcttttagaatgggtctggcaactttacgaggaagaccatccgctggacattgcggatcccaagctcacagaattcgatagtgtcgagttgctccgtgccatccgcatcgccctcctctgcatccagagctcacctcgtcaaaggccatccatgtcgagagtggtgtcaatgctcacaggagacagcgaggcgcctgaggcagtgtccaagcctagctatgttgccgaatggcagagcaacactgaagggacgtcaagctcagtgtccacagcagaggctgtgtccgtggctccattcctaaaccccgttgtggacgatggccggtgatgatggccatcgctaagatcatcttatgtcaagcactcaagccacagattgttttcttggagatccacctttaaaggccccattatttaggttgaatgtggatgacagatttatgttgttgactggatgagatgtcctagggtttcctcacgttgtagaatacaactctcacaagtataagaatctaggaacatattccttcgatgtaacatacctcttttgtttaatctgttttgtaagagaaaccagaagaacaccttgtatttcggttgatattttgaaacccacagccaattgaatgctgggtgtgtaggcatatatatgaccaataggttgattgtaagctttactacaatagtggggcggtctcgaagtatattgccagatatgttgcagttcattttctaacacgagaaacccttgatatgctcgaacagaaagcaacaactga

SEQ ID NO: 209761 - DNA, 4427 bp, Zea Mays
ctcgagtgttcttgtcgcctacggagacctccacgcgacgcttcgtctctcctcacctgcactcgcgatttcaagaaccgactgtattttctatcctcgcactttctggaaccggatgggcagctacttttcgatggccggctagggttccacacaccaaccatgatgttcccctcaacctctgtcaacatttgagactggttcaactcgcttgtgtgccgaagttcccctgcggcggccgtcatcaccatggtctcccctcgtgtggctctggtcttatcgtggtgaccatcatgggtcgagaggagtgcgacgacctggggttcactgtctcacccttagctttagtgcaaagttccctcccagctcatcgcagaccaaggtacgatagtgtggaggcctacatcgtgcaacctgggcttcaccctctgcaccgcctgcaacaatatctaatttcgtcttagatcaagcttttggatccccacgctcccccacccattcttctgtaatgcggtgttctccaagctcgggctgcaggtgtggtcgccatggttcaaaggcgacccgtgcgtcggcgcggccacggacggcacgtccatctacgccgacaaaatgaacccgggcatcaagtgcgactgctccgaccacaacaacaccatctgccacattaccgagctgaaaatgaacaaactggatgtggttggtcctatacctgaggagctgaggaacctcagccacttgacaactctgaatttacaacagaattacttaacagggcctttgccatcgttccttggagaattaactgctttgcagcagatgtcgctttctggcaatgcattatcaggaactattccaaaggagctggggaaccttgtgaatctcataatcctgagtttaggcacgaacaatttaactggctcccttccttctgaattgggtaacctggttaaactagagcatatgtacattgatagtgctggcttaagtggtcctataccatcatcattttcgaaacttacacgattgaaaacattgtgcgcatcagataatgactttactgggaaaataccagattacattggaagctggagtaatttaacagatttgcggtttcaaggcaattcattccaaggtccacttccaagcactcttgctaatcttgttcagctaacaagcttacgaataggtgacattgtaactgggagttcttcgctggcattcatcaaattttaaggaattgcaggatatttggtactttggcattagtgaacttttcaaaatttacaggattaacattattgtaaggcatttcgtttcttccaaattttttgttaaatctgctttgtgcaagatgcttcctatggatatgcatcgcgagatgtttcctttcacacatattctcgtcttttacttacttatgcagggatttgagttttaataatatcataggtgaagtaccacaagctctactaaatatgaattcactcaccttgttgtatgttttgtatccctttcaatgcttattttgggggcataatgaatttcattgtttatcttgctaattgtagcacatgcattccgatcagatttcttgggaacaatagtcttacaggaggccttccaagctctataggaccttctattaagtacttagacttttcctacaactacctctcaggaaaccttccttcttgggctagtcataatttgcaattgtaagtattaagttatgtaatttattgttggtcaaccgaacttttagcccaattgtcttttcaaagcataatgtagcccaacttgaaatatatgcttatagtacatgtatttattaaaatatatttttgaatgttcaatacatctaaaaaaacttgtgttgaggcatttagcttatatttctttttagatttgttgcattttgaagcaacctattattctgaatctttgaagaagtagacatacattcccttactgcttaactccaaaaaggcaaaaaaaaagtttgttgctttagtgtatcttgattctaggaaataaacacactgttaatatgctccaagtccaaagacctctcaagttttttgcgtgtctcattatgcatagaaatttggtggcaaactacttcgtgatcaacaagtccaaagatagtgtcttacctgcggggctggagtgccttcagcgaaacacgtcatgctttcttggctctccacaatcttcctcctttactgtagactgtgggagtagtagatctgtatttgcttcagataattccatgtatcaacctgatgatgccaatcttggtgttgcatcatattatatttcaagcccaccaagatggggtgttagtaatgtcgggagattcatggatacatcaaacgggagttacatagtcaacagttcacgccggtttcagaataccctagattccaaacttttccaaacagcaaggatgtcagcatcaactttaagatactatggttttggacttgaaaatggggactacacagtcacacttcaatttggagaatttgactttgaagatttacaaacttggaagagcgttgggagaagggttttcgatatctatctccagggtgagcgtaaggagcagaactttaacataaagaaggcagcaaaagaagctggcgaagcaagcacatcgtacactgctgtcaagaaacaatatactgtacctgtcacaaaaaacatcctagaaattcatctcttttgggctggaaagggcacttgttgcatccctaatcaaggcgattatgggcctacaatatcagctttgagtgcaactctaaatacaaaaaagaagggtaataaaataggtgtaattattggagtcgtgattggtgcaacagttttaggactagcaatacttgctacactctgtgtgtggaggcacaaaaggagaaaagtatcactagagcagcaagagctctacaatattgttcgaatacctaatgtattctgttacacttatggtgaactaaggaccgctactgaaaattttagttctgctaatcttcttggtgaagggggatatggatcagtttataagggtaaattagttgatggcagtgtggtggcaattaaacaactatctgaaacatctcgccaagggaagaaggaattcgtagctgaaatagaaactatttcccgagtgcagcaccgtaatcttgtgaagttgtttggtttttgccttgagggaaataaaccacttttggtttatgagtacatggagagtggaagccttgataaagcattgtttggaaatggaagattgaacttgaattggtcaacacgatataaaatatgcttggggattgcaagaggcttagcttatctccacgaagagtctagcatccgcattgtgcatagggacataaaggccagcaatgtattacttgatgccactttgaaccctaagatttcggatttcgggctcgccaaactttatgacgataaaaagacacatgttagcacaaaagttgctggtacatttggctatctttcacctgagtacgccatgagaggtcacatgactgagaaagttgatatttttgcttttggtgtggtcatgttggagattattgctggaaggccgaactatgatggtaagcttgaccaagacatggcttatcttttagaatgggtctggcaactttacgaggaagaccatccgctggacattgcggatcccaagctcacagaattcgatagtgtcgagttgctccgtgccatccgcatcgccctcctctgcatccagagctcacctcgtcaaaggccatccatgtcgagagtggtgtcaatgctcacaggagacagcgaggcgcctgaggcagtgtccaagcctagctatgttgccgaatggcagagcaacactgaagggacgtcaagctcagtgtccacagcagaggctgtgtccgtggctccattcctaaaccccgttgtggacgatggccggtgatgatggccatcgctaagatcatcttatgtcaagcactcaagccacagattgttttcttggagatccacctttaaaggccccattatttaggttgaatgtggatgacagatttatgttgttgactggatgagatgtcctagggtttcctcacgttgtagaatacaactctcacaagtataagaatctaggaacatattccttcgatgtaacatacctcttttgtttaatctgttttgtaagagaaaccagaagaacaccttgtatttcggttgatattttgaaacccacagccaattgaatgctgggtgtgtaggcatatatatgaccaataggttgattgtaagctttactacaatagtggggcggtctcgaagtatattgccagatatgttgcagttcattttctaacacgagaaacccttgatatgctcgaacagaaagcaacaactga

SEQ ID NO: 209762 - DNA, 979 bp, Zea Mays
ttacaaaaaaaaaccacgctgtgcggcgaagatttgacaagcgtatctacattccgctacctgacacgaaagcaaggcagcatatgtttaaggtccatctcggggatacaccacacagtttaactgaaagcgatttcgagagcttggcccgtcgaacagatggattttctggttctgatgttgctgtttgtgttaaggatgtcttatttgaacctgtgcgcaaaacacaggatgccatgttcttcttcaaggcagacggtgacatgtggatgccatgtggaccaaaacaaccggggtctgtacagaccacaatgcaggagcttgcatccaagggcctcgctgcaaagattcttccaccacctatctcaaggacggattttgagaaggtcttgtcgaggcagaggccgacagttagcaagaaggatctggaggtgcatgagaggttcactaaggagttcggcgaggagggctgatacaccgcgcgcggacacacacccatgcacagctgcaccacagaaatgtatattgtttatcacttcgattgttctgcttggaagttgcattcacaggattgtacatttggtagcccaactatgagtaatcatggcagctgctttaccgtgttgggctaccgatgggcctctgttgtcaacttatttcaatttttatttatgcacatgaaaattttccgcaggtgtattattgaataataattcttaacgtggagcccttgtggttgctagtttctttttctaacgttccttagttttcacgccgagtttcttttccttcagtttggtttacttgcagggccattttattagacgctacatactgaaggtgaacttcttgttctcaggcgttttatttgaggtatctagctctggtagaatctggccatgtcagtaatggtttacatttttatagtttgtatgtatctaccacaaacttcatcagttttgaatgatctgaatctaca

SEQ ID NO: 209763 - DNA, 1258 bp, Zea Mays
cttttgcaaaactccgaaagttgtcgcttgaaagtatatcttcttcagatctggtttcaaagtggatgggtgaaagcgagaaattagtcgcaaatcttttccaaatggctcgtgaaaatgccccttccattatctttattgatgaaattgattctttatgcggtcaacgtggagaaggtaatgaaagtgaagcatctaggaggattaagactgaacttcttgtgcaaatgcagggtgttggtcataatgatgataaagttcttgttcttgctgccacgaatacgccatatgctctggaccaggctgtgcggcgaagatttgacaagcgtatctacattccgctacctgacacgaaagcaaggcagcatatgtttaaggtccatctcggggatacaccacacagtttaactgaaagcgatttcgagagcttggcccgtcgaacagatggattttctggttctgatgttgctgttaaggatgtcttatttgaacctgtgcgcaaaacacaggatgccatgttcttcttcaaggcagacggtgacatgtggatgccatgtggaccaaaacaaccggggtctgtacagaccacaatgcaggagcttgcatccaagggcctcgctgcaaagattcttccaccacctatctcaaggacggattttgagaaggtcttgtcgaggcagaggccgacagttagcaagaaggatctggaggtgcatgagaggttcactaaggagttcggcgaggagggctgatacaccgcgcgcggacacacacccatgcacagctgcaccacagaaatgtatattgtttatcacttcgattgttctgcttggaagttgcattcacaggattgtacatttggtagcccaactatgagtaatcatggcagctgctttaccgtgttgggctaccgatgggcctctgttgtcaacttatttcaatttttatttatgcacatgaaaattttccgcaggtgtattattgaataataattcttaacgtggagcccttgtggttgctagtttctttttctaacgttccttagttttcacgccgagtttcttttccttcagtttggtttacttgcagggccattttattagacgctacatactgaaggtgaacttcttgttctcaggcgttttatttgaggtatctagctctggtagaatctggccatgtcagtaatggtttacatttttatagtttgtatgtatctaccacaaacttcatcagttttgaatgatctgaatctaca

SEQ ID NO: 209764 - DNA, 2389 bp, Zea Mays
cagcgaccgacgcacgcaccgacgaaaaatggcccacgacctaacgaaactatttacacaaatctcccaaaatgtatcgaccgaggcagcagtagtatcgtcaccaaggaagagggccgaagggcggaggaaggcgggtataaaatttggcgggttctcggttccgccggcgaagcgtttacttcttcggccgcgatctcgaggagggagggagcgagcgagcgggaagaaagaggggggcgcgcgcgcgcccatgttttgacctcgcccggcgtcgtctcggcagcgatctagatctgaggttctgaggttcttgattgagcggtcacaagacctgtcactgcaatggtcgccaagatgttgccatgctcatggatctcggcgtgcgtgctcgtgctgctcttgagcctgcacccgcgtgtccatgccttctacctccccggcaccttcatgcacacctactcccctggagaggtgatctcggccaaggtcaactcgctcacctctatcgagaccgagctgcccttcagctactacagcctgccatactgcaagcctctggatggcgtcaagaagagtgccgagaaccttggtgagatcctcatgggtgaccagatcgacaactctccataccgcttccaagttaatgtcaatgagtcagtattcctttgcaccacggacccgctcaccaaggagcaggccgagctgctcaagaggagggcacgagatctgtaccaggtcaacatggtcctggacaatttaccggtcatgcggttcaccgagcagaacggcgtgataatccagtggactgggttcccagttgggtacaacccgatagggagcaacgaggattatatcattaaccacctcaagttcagagtcttggtccatcagtaccaggcgcagggcgacgttgtggtcacgagtgaggatggtgttgcaatggtagagtctgatcgcaagagtgggttccagattgttgggtttgaggtcgtgccttgcagcgtaagacgtgatcctgagtccatgtccaagctcaagatgtatgacaaggtcgactctgtgaattgcccgttggagcttgagaaatctcaggcgatccgtgagaatgagcggatcacatttacctatgaggttgagtatgtcaagagcaacatcaagtggccgtccaggtgggatgcgtatctgaagatggatggtgccaaggtccactggttctcgatcatgaactcgatgatggttgtcttcttcctggctggtatcgtgtttgtcatattcttgaggacggttcgaagggacctgacaaggtatgaggagatggacaaggaggcacaagctcagatgaacgaggagctctcaggatggaaacttgttgttggggatgtcttcagagagcccagctttccaaagttgctgtgcgttatggtcgctgatggtatccagatcactggtatggcagttgttacaattgtgtttgctgccctgggatttctctcacctgcttccaggggaatgctcctgaccggaatgatcattctctacctcttccttggtatcattgccggatacgttggtgtccgtgtctggaggactatcaagggaacctcggaagggtggaaatctgttgcttggctgactgcatgcttcttccctgggattgtgttcatcatcctcactgtgcttaactccattctgtggggcaagaagagcactggagctctacccatctcactgttcttcaccctcctggccctgtggttctgcatctctgtgccactcacacttattggaggcttgctaggcacacgtgctgcaagcatcgactaccctgtccgaaccaaccagatcccacgagagatccctgagcgcaagttcccctcatggttgcttgtgctcggtgcgggaacattgccatttggtactctcttcattgagctcttcttcatcctttccagcatttggttgggaaggttctactatgtctttggcttcctgttcattgtcctcttcctgctggtcatagtctgtggtgaggtttctctggtcctgacctacatgcacctttgcgtggaggactggaaatggtggtggaaggccttctttgcttctggctctgtcgcattctatgtgttcctctactctattaactacctggtgttcgatctcaggagcctgagcggaccagtttctgccacactctaccttggctattccctgatcatggcccttgcaatcatgctctccactggcgccattggtttcctgctctccttctacttcgtccactacctcttctcgtctgttaagattgattagaggtgtgccccgctgcctctttctgcaatagagtcatctgatcatgggcgttgtctttggtcgtgaaccaccg

SEQ ID NO: 209765 - DNA, 2107 bp, Zea Mays
gggatttcatttcttcatccgttggttctgaggttcttgattgagcggtcacaagacctgtcactgcaatggtcgccaagatgttgccatgctcatggatctcggcgtgcgtgctcgtgctgctcttgagcctgcacccgcgtgtccatgccttctacctccccggcaccttcatgcacacctactcccctggagaggtgatctcggccaaggtcaactcgctcacctctatcgagaccgagctgcccttcagctactacagcctgccatactgcaagcctctggatggcgtcaagaagagtgccgagaaccttggtgagatcctcatgggtgaccagatcgacaactctccataccgcttccaagttaatgtcaatgagtcagtattcctttgcaccacggacccgctcaccaaggagcaggccgagctgctcaagaggagggcacgagatctgtaccaggtcaacatggtcctggacaatttaccggtcatgcggttcaccgagcagaacggcgtgataatccagtggactgggttcccagttgggtacaacccgatagggagcaacgaggattatatcattaaccacctcaagttcagagtcttggtccatcagtaccaggcgcagggcgacgttgtggtcacgagtgaggatggtgttgcaatggtagagtctgatcgcaagagtgggttccagattgttgggtttgaggtcgtgccttgcagcgtaagacgtgatcctgagtccatgtccaagctcaagatgtatgacaaggtcgactctgtgaattgcccgttggagcttgagaaatctcaggcgatccgtgagaatgagcggatcacatttacctatgaggttgagtatgtcaagagcaacatcaagtggccgtccaggtgggatgcgtatctgaagatggatggtgccaaggtccactggttctcgatcatgaactcgatgatggttgtcttcttcctggctggtatcgtgtttgtcatattcttgaggacggttcgaagggacctgacaaggtatgaggagatggacaaggaggcacaagctcagatgaacgaggagctctcaggatggaaacttgttgttggggatgtcttcagagagcccagctttccaaagttgctgtgcgttatggtcgctgatggtatccagatcactggtatggcagttgttacaattgtgtttgctgccctgggatttctctcacctgcttccaggggaatgctcctgaccggaatgatcattctctacctcttccttggtatcattgccggatacgttggtgtccgtgtctggaggactatcaagggaacctcggaagggtggaaatctgttgcttggctgactgcatgcttcttccctgggattgtgttcatcatcctcactgtgcttaactccattctgtggggcaagaagagcactggagctctacccatctcactgttcttcaccctcctggccctgtggttctgcatctctgtgccactcacacttattggaggcttgctaggcacacgtgctgcaagcatcgactaccctgtccgaaccaaccagatcccacgagagatccctgagcgcaagttcccctcatggttgcttgtgctcggtgcgggaacattgccatttggtactctcttcattgagctcttcttcatcctttccagcatttggttgggaaggttctactatgtctttggcttcctgttcattgtcctcttcctgctggtcatagtctgtggtgaggtttctctggtcctgacctacatgcacctttgcgtggaggactggaaatggtggtggaaggccttctttgcttctggctctgtcgcattctatgtgttcctctactctattaactacctggtgttcgatctcaggagcctgagcggaccagtttctgccacactctaccttggctattccctgatcatggcccttgcaatcatgctctccactggcgccattggtttcctgctctccttctacttcgtccactacctcttctcgtctgttaagattgattagagaaaccggtgcagcagcatctccaacgacaaagctgagcggacaagacacggctagagaaagctccg

SEQ ID NO: 209766 - DNA, 2351 bp, Zea Mays
cgaccgaggcagcagtagtatcgtcaccaaggaagagggccgaagggcggaggaaggcgggtataaaatttggcgggttctcggttccgccggcgaagcgtttacttcttcggccgcgatctcgaggagggagggagcgagcgagcgggaagaaagaggggggcgcgcgcgcgcccatgttttgacctcgcccggcgtcgtctcggcagcgatctagatctgaggttctgaggttcttgattgagcggtcacaagacctgtcactgcaatggtcgccaagatgttgccatgctcatggatctcggcgtgcgtgctcgtgctgctcttgagcctgcacccgcgtgtccatgccttctacctccccggcaccttcatgcacacctactcccctggagaggtgatctcggccaaggtcaactcgctcacctctatcgagaccgagctgcccttcagctactacagcctgccatactgcaagcctctggatggcgtcaagaagagtgccgagaaccttggtgagatcctcatgggtgaccagatcgacaactctccataccgcttccaagttaatgtcaatgagtcagtattcctttgcaccacggacccgctcaccaaggagcaggccgagctgctcaagaggagggcacgagatctgtaccaggtcaacatggtcctggacaatttaccggtcatgcggttcaccgagcagaacggcgtgataatccagtggactgggttcccagttgggtacaacccgatagggagcaacgaggattatatcattaaccacctcaagttcagagtcttggtccatcagtaccaggcgcagggcgacgttgtggtcacgagtgaggatggtgttgcaatggtagagtctgatcgcaagagtgggttccagattgttgggtttgaggtcgtgccttgcagcgtaagacgtgatcctgagtccatgtccaagctcaagatgtatgacaaggtcgactctgtgaattgcccgttggagcttgagaaatctcaggcgatccgtgagaatgagcggatcacatttacctatgaggttgagtatgtcaagagcaacatcaagtggccgtccaggtgggatgcgtatctgaagatggatggtgccaaggtccactggttctcgatcatgaactcgatgatggttgtcttcttcctggctggtatcgtgtttgtcatattcttgaggacggttcgaagggacctgacaaggtatgaggagatggacaaggaggcacaagctcagatgaacgaggagctctcaggatggaaacttgttgttggggatgtcttcagagagcccagctttccaaagttgctgtgcgttatggtcgctgatggtatccagatcactggtatggcagttgttacaattgtgtttgctgccctgggatttctctcacctgcttccaggggaatgctcctgaccggaatgatcattctctacctcttccttggtatcattgccggatacgttggtgtccgtgtctggaggactatcaagggaacctcggaagggtggaaatctgttgcttggctgactgcatgcttcttccctgggattgtgttcatcatcctcactgtgcttaactccattctgtggggcaagaagagcactggagctctacccatctcactgttcttcaccctcctggccctgtggttctgcatctctgtgccactcacacttattggaggcttgctaggcacacgtgctgcaagcatcgactaccctgtccgaaccaaccagatcccacgagagatccctgagcgcaagttcccctcatggttgcttgtgctcggtgcgggaacattgccatttggtactctcttcattgagctcttcttcatcctttccagcatttggttgggaaggttctactatgtctttggcttcctgttcattgtcctcttcctgctggtcatagtctgtggtgaggtttctctggtcctgacctacatgcacctttgcgtggaggactggaaatggtggtggaaggccttctttgcttctggctctgtcgcattctatgtgttcctctactctattaactacctggtgttcgatctcaggagcctgagcggaccagtttctgccacactctaccttggctattccctgatcatggcccttgcaatcatgctctccactggcgccattggtttcctgctctccttctacttcgtccactacctcttctcgtctgttaagattgattagaggtgtgccccgctgcctctttctgcaatagagtcatctgatcatgaaaccggtgcagcagcatctccaacgacaaagctgagcggacaagacacggctagagaaagctccg

SEQ ID NO: 209767 - DNA, 2503 bp, Zea Mays
cactcctcggccacagatccaggcgtgtctgtcactagggcttgggatttcatttcttcatccgttggttctgaggttcttgattgagcggtcacaagacctgtcactgcaatggtcgccaagatgttgccatgctcatggatctcggcgtgcgtgctcgtgctgctcttgagcctgcacccgcgtgtccatgccttctacctccccggcaccttcatgcacacctactcccctggagaggtgatctcggccaaggtcaactcgctcacctctatcgagaccgagctgcccttcagctactacagcctgccatactgcaagcctctggatggcgtcaagaagagtgccgagaaccttggtgagatcctcatgggtgaccagatcgacaactctccataccgcttccaagttaatgtcaatgagtcagtattcctttgcaccacggacccgctcaccaaggagcaggccgagctgctcaagaggagggcacgagatctgtaccaggtcaacatggtcctggacaatttaccggtcatgcggttcaccgagcagaacggcgtgataatccagtggactgggttcccagttgggtacaacccgatagggagcaacgaggattatatcattaaccacctcaagttcagagtcttggtccatcagtaccaggcgcagggcgacgttgtggtcacgagtgaggatggtgttgcaatggtagagtctgatcgcaagagtgggttccagattgttgggtttgaggtcgtgccttgcagcgtaagacgtgatcctgagtccatgtccaagctcaagatgtatgacaaggtcgactctgtgaattgcccgttggagcttgagaaatctcaggcgatccgtgagaatgagcggatcacatttacctatgaggttgagtatgtcaagagcaacatcaagtggccgtccaggtgggatgcgtatctgaagatggatggtgccaaggtccactggttctcgatcatgaactcgatgatggttgtcttcttcctggctggtatcgtgtttgtcatattcttgaggacggttcgaagggacctgacaaggtatgaggagatggacaaggaggcacaagctcagatgaacgaggagctctcaggatggaaacttgttgttggggatgtcttcagagagcccagctttccaaagttgctgtgcgttatggtcgctgatggtatccagatcactggtatggcagttgttacaattgtgtttgctgccctgggatttctctcacctgcttccaggggaatgctcctgaccggaatgatcattctctacctcttccttggtatcattgccggatacgttggtgtccgtgtctggaggactatcaagggaacctcggaagggtggaaatctgttgcttggctgactgcatgcttcttccctgggattgtgttcatcatcctcactgtgcttaactccattctgtggggcaagaagagcactggagctctacccatctcactgttcttcaccctcctggccctgtggttctgcatctctgtgccactcacacttattggaggcttgctaggcacacgtgctgcaagcatcgactaccctgtccgaaccaaccagatcccacgagagatccctgagcgcaagttcccctcatggttgcttgtgctcggtgcgggaacattgccatttggtactctcttcattgagctcttcttcatcctttccagcatttggttgggaaggttctactatgtctttggcttcctgttcattgtcctcttcctgctggtcatagtctgtggtgaggtttctctggtcctgacctacatgcacctttgcgtggaggactggaaatggtggtggaaggccttctttgcttctggctctgtcgcattctatgtgttcctctactctattaactacctggtgttcgatctcaggagcctgagcggaccagtttctgccacactctaccttggctattccctgatcatggcccttgcaatcatgctctccactggcgccattggtttcctgctctccttctacttcgtccactacctcttctcgtctgttaagattgattagaggtgtgccccgctgcctctttctgcaatagagtcatctgatcatggtaatagttaccctcttagaaatactacacaataaatcaaatggaaaaaatggatacatggcaacgcccatggcttttggtcatgattaattcaatcatttagcgcagcacagtcactcaagttgaaacttaattcttaggaatgattgtaagttcttcagctatgtttattgcactttgtaataccattcagttttgcttgctctgggcatttgtgagcagcctttggttttggaacacttgagatctattcaatatgaaaatgaagctattcatttacagttcgttactattctgggaaggttatattgtaacatgggtgccacattagctgtgatgctcgctgttcgttaatagtaacaccaatacggctga

SEQ ID NO: 209768 - DNA, 120 bp, Zea Mays
ctccccacttgcttttggtgacattccaatcatcagcctagacttgtgggagcacgcttactacttagactacaagagtcttttgtgaaccttggtgagccaaatatcccagaggcttga

SEQ ID NO: 209769 - DNA, 867 bp, Zea Mays
gcgagaattacggcccattagggttcacttccaaactcggcatctataaacacttctctcacgccccgccgccgcctccgctcgccaccgtcgtctaagttaggctagggttcgaccagctagcggaaatggtggccttcaggttccatcagtaccaggtggtggggcgcgcgctgccgacgcccggcgatgagcaccccaagatctaccgcatgaagctctgggccaccaacgaggtccgcgccaagagcaagttctggtacttcttgaggaagttgaagaaggttaagaagagcaacggccaggtcctggccatcaacgagatctttgagcgtaacccgacgacaatcaagaactacggcatctggctgcgctaccagagcagaaccggctaccacaacatgtacaaggagtaccgcgacacaaccctgaatggcgctgtggagcagatgtacaacgagatggcctctcgccaccgcgtgaggtccccctgcatccagatcatcaagactgcgacggtgcacttcaagctctgcaagagggacaacactaagcagttccacaacagtgagatcaagttcccgctcgtgcaccgcaaggtcaggccgccgaccaggaagctgaggaccacgttcaaggcttcgaggcccaacctgttcatgtgatttagctgtggtcagtgtatgcgatcataagagtcacaagtgtttctgtttttttttaagttttgacttcctaatagtaatacttaatcggtttgatgattcaactcgttttgaagcgagcttggtgaaccaatcgacgtgttgcgggttgttcgctctcggcatacttgaagtggtgtgggtcgtggctgatgatgcggac

SEQ ID NO: 209770 - DNA, 1646 bp, Zea Mays
atgtcaccaaggttgcaggttggctacagaaataggagaagaatagtatgtgagccccatataatcctccccacgtcgtcgtgctcgttttgcgcgtcaaccagcccgccccccaaccccacccagcgcgacgaagccggggggcgatcgctccagcgccgccgcgccagcgacctcaccccccgggagccgccggcggtacccccctccctatcacgcctcatcgaatcctcagatctaagttttttttggttttgtgagttatccaaagttggaccgcaaagatgagtactgctaatcactatcagcacatcaagtcaaccaagcctgttgtaggcaaagcaagaaaattgaaggatctcatgataaaaagtgataataggatatgcgctgactgtggtgcacctgatcccaaatgggcatctactaatattggagtgtttctttgcttaaaatgtggagatgttcatagggcacttggacctgacatttcaaaggttttatctgtaactttggatgattggtctgacagtgatatcgactccatggttgaggttggtggaaactcatatgcaaattcaatttatgaggcttttcttccaaaagatcacccaaaacccaaaccagattcaacgatggaatataggacgaaatttataagagctaagtatgagacacaagattttttgaagccaagtttgcgcatttcatcaagatcatcttttaaatctaccaattctgtgaagagtgtagatagcaatttctctagcacttcaaggaaggatatctctgaagatacaagagaatttgttggagagctgaatattacagtcgtgaaaggtactaacttggccgttagagacatgctaacaagtgatccatatgttgttttaacactcggagggcagttaaaaaaagtgatcttaatccggtatggaatgaaatgcttaagatttctgttcctcgaaattacggacctctaaaacttgaagtgtatgaccatgatacgttctcagccgatgatatcatgggtgaagcagagatagatctccaaccaatgatcacagccgccatggcctttggagatacttcacgtcttggtgacatgcaaattgggcggtggttcacgaccaaagacaacgccctgatgaaagatagcacagtgaatgtcgttgcaggcaaggtaaaacaggaggtgcacttaaagctgcagaacgtagaatctggtgagctggagttagagctagaatgggttccgatcctctagactatgataactcccctgatccttttgtctaaaaaactatcctcaagatgcatcaaaattttcaagctgtccactttgatgatcttggacatttttgctggatggcttgaatttgttaaaaaaatgtcattgttaaatatcctggtgtaactgtcagctataatcacagcctttcattttcccccctttggttgtcatgccttgtaactactcgccgtctcttgattgttgttgtattgtcccattgaaaggacatgtgtattataagagatgggcaattatagctagtgaactctttatgctgattcctttttggcgcgcgctgcagtagctatcgtgttattggttttcccggagctttctctagccgtgtcttgtc

SEQ ID NO: 209771 - DNA, 2229 bp, Zea Mays
gaccaaccgcctcgcctgccgttcccctccacgtctccccattcccgcctcccgagacctgaaccctgttggggacacatgggccccacaacccgcgctcacttcgtctacaatcgccgccgccgccgccgccgaggcgggcggcacgctgtcgaggaggcttccgacgaggagcagcagcagatggatagctcctcctcatcctccgacgaagaaggagatcaggaagaagatgccgaagcctccggagaggacgtcgatgacgaggaagaagaggaagcggtcgctgccgagcctgcgcccaagcagccacccgcagctgcggcggcgggggagaagaggggccgaaggaagggctcgatcaccattagcctgaagaaagtgtgcaaggcgtgcaaaaggacagggcaccaggcagggttcaagggggctgtgtacatcgactgccccatgaagccttgcttcttatgcaagatgccaggtcatacaaccttgacttgcccacatagagtaacaatggagcatggtgttatcccagcgcctaaaaggaatgcaaacacttctctggattatgtcttccagagccaagtcaagggaaagattcccatggttaagcctaagtttctgatacccaaccaactagagcatggaaacataaaatttcatcagagacgtgtgacatgcttggagtttcatccaactaagaacagtgttcttttatcaggagacaagaaaggacttctgggtatctgggattatgttaagttgcatgagaaaatcacttatgattctgtgcactcctgcattctgaatagcatgaagattgataccaccaacgatggtatgatatatacagcttcctctgatggtactatcagttgcactgatttggatactggtattggctctcccttgttaaatctcaacccaaatggttggaatgtaagtttactttggtcatgttctatagatcactttgttcaaaaagaatttatgaagatgttatttcagtctctctctaccttcccccatcttgttctggtccaagctcttggcacatgatatacgggatggacttaaacactgacaaaggtcttcttttggtggcagataactttggttttctttacttcctggatagacgatcaaagacgagaattggacatccaattcttatccataaaaagggtagcaaggtaaccagcctacattgtaaccctgcacgacctgaagtgcttctaagcagcggaaatgatcactatgcccgtatttgggatacaaggaagcttgaagccaactctccccttgccagccttgctcatggacgggttgttaattcaggatacttttctccacgaagcggaaataagatcttgacaacttgtcaggacaaccgaattcgtgtatgggactatattcttggtgatctgcaatccccaagtagagaaattgtgcacagtcatgatttcaatcgtcacctgactcccttcaaagctgagtgggatccaaaggattacaccgaaacagttgcagtgattggccgttacataagtgagaactacaatggtgttgctctgcatccaattgattttatagatactagttctgggaagcttctggctgaggtgatggaccctgacataataacaatcagcccagtgaacaagctacatccgcaagatgacatcctagctacaggaagctcaaggtctattttcatatggaagccaaaaattgaagatgaacttactgaagaaagagccaagcatgacaatagtagtgatgacgactcaggtggtgattctggcggaaagaacaagaaagcaaagaagactcgcttcactcatgcagtaaagggaaagggcaaatccaaagtctgatgcttggtgtacatagtcggcagcattttgacaagaaagcgtccattaaccagctcctgatgcatctccttttgtaccatcttgccaactccctcaccccccccagctaaggtgctgaagacccgtatgaaacgcatgctgatagaccccatagttgtctcctgcatcaatgctcctaaggagttagccagttaggtttcggactcttttgaatcctgacatgcttatgatcacttgtcatttgtcaacgaggccttttaacggtttaatcctgtatcaacatataaatctcctgtacagttgcctgaatgcaatttgtgcttgtaaaatgtttattggtgctctcatc

SEQ ID NO: 209772 - DNA, 2478 bp, Zea Mays
gaccaaccgcctcgcctgccgttcccctccacgtctccccattcccgcctcccgagacctgaaccctgttggggacacatgggccccacaacccgcgctcacttcgtctacaatcgccgccgccgccgccgccgaggcgggcggcacgctgtcgaggaggcttccgacgaggagcagcagcagatggatagctcctcctcatcctccgacgaagaaggagatcaggaagaagatgccgaagcctccggagaggacgtcgatgacgaggaagaagaggaagcggtcgctgccgagcctgcgcccaagcagccacccgcagctgcggcggcgggggagaagaggggccgaaggaagggctcgatcaccattagcctgaagaaagtgtgcaaggcgtgcaaaaggacagggcaccaggcagggttcaagggggctgtgtacatcgactgccccatgaagccttgcttcttatgcaagatgccaggtcatacaaccttgacttgcccacatagagtaacaatggagcatggtgttatcccagcgcctaaaaggaatgcaaacacttctctggattatgtcttccagagccaagtcaagggaaagattcccatggttaagcctaagtttctgatacccaaccaactagagcatggaaacataaaatttcatcagagacgtgtgacatgcttggagtttcatccaactaagaacagtgttcttttatcaggagacaagaaaggacttctgggtatctgggattatgttaagttgcatgagaaaatcacttatgattctgtgcactcctgcattctgaatagcatgaagattgataccaccaacgatggtatgatatatacagcttcctctgatggtactatcagttgcactgatttggatactggtattggctctcccttgttaaatctcaacccaaatggttggaatggtccaagctcttggcacatgatatacgggatggacttaaacactgacaaaggtcttcttttggtggcagataactttggttttctttacttgtgagtatctttaggaaagtgggtggtaccttcatgagatttattcctaacagtgctaaatattgctatatatgcagcttcctttgaaacaactgatcagtttgttcttgtggtccattttatgcatttatttggcagcttaattccaaatggtttgacatcagtgatcgttttacacttgaattcagagatattgttgtacactaccacacttgcatgcatcaaatgtgccttggcattctgttgtaagctattattaattcttgcagcctggatagacgatcaaagacgagaattggacatccaattcttatccataaaaagggtagcaaggtaaccagcctacattgtaaccctgcacgacctgaagtgcttctaagcagcggaaatgatcactatgtgagtgtgttctgcatatgtaaagatccgctttttctcgtcttgtatttgatatctccacatctctgtaattattaggcccgtatttgggatacaaggaagcttgaagccaactctccccttgccagccttgctcatggacgggttgttaattcaggatacttttctccacgaagcggaaataagatcttgacaacttgtcaggacaaccgaattcgtgtatgggactatattcttggtgatctgcaatccccaagtagagaaattgtgcacagtcatgatttcaatcgtcacctgactcccttcaaagctgagtgggatccaaaggattacaccgaaacagttgcagtgattggccgttacataagtgagaactacaatggtgttgctctgcatccaattgattttatagatactagttctgggaagcttctggctgaggtgatggaccctgacataataacaatcagcccagtgaacaagctacatccgcaagatgacatcctagctacaggaagctcaaggtctattttcatatggaagccaaaaattgaagatgaacttactgaagaaagagccaagcatgacaatagtagtgatgacgactcaggtggtgattctggcggaaagaacaagaaagcaaagaagactcgcttcactcatgcagtaaagggaaagggcaaatccaaagtctgatgcttggtgtacatagtcggcagcattttgacaagaaagcgtccattaaccagctcctgatgcatctccttttgtaccatcttgccaactccctcaccccccccagctaaggtgctgaagacccgtatgaaacgcatgctgatagaccccatagttgtctcctgcatcaatgctcctaaggagttagccagttaggtttcggactcttttgaatcctgacatgcttatgatcacttgtcatttgtcaacgaggccttttaacggtttaatcctgtatcaacatataaatctcctgtacagttgcctgaatgcaatttgtgcttgtaaaatgtttattggtgctctcatc

SEQ ID NO: 209773 - DNA, 2183 bp, Zea Mays
gaccaaccgcctcgcctgccgttcccctccacgtctccccattcccgcctcccgagacctgaaccctgttggggacacatgggccccacaacccgcgctcacttcgtctacaatcgccgccgccgccgccgccgaggcgggcggcacgctgtcgaggaggcttccgacgaggagcagcagcagatggatagctcctcctcatcctccgacgaagaaggagatcaggaagaagatgccgaagcctccggagaggacgtcgatgacgaggaagaagaggaagcggtcgctgccgagcctgcgcccaagcagccacccgcagctgcggcggcgggggagaagaggggccgaaggaagggctcgatcaccattagcctgaagaaagtgtgcaaggcgtgcaaaaggacagggcaccaggcagggttcaagggggctgtgtacatcgactgccccatgaagccttgcttcttatgcaagatgccaggtcatacaaccttgacttgcccacatagagtaacaatggagcatggtgttatcccagcgcctaaaaggaatgcaaacacttctctggattatgtcttccagagccaagtcaagggaaagattcccatggttaagcctaagtttctgatacccaaccaactagagcatggaaacataaaatttcatcagagacgtgtgacatgcttggagtttcatccaactaagaacagtgttcttttatcaggagacaagaaaggacttctgggtatctgggattatgttaagttgcatgagaaaatcacttatgattctgtgcactcctgcattctgaatagcatgaacttcctctgatggtactatcagttgcactgatttggatactggtattggctctcccttgttaaatctcaacccaaatggttggaatgtaagtttactttggtcatgttctatagatcactttgttcaaaaagaatttatgaagatgttatttcagtctctctctaccttcccccatcttgttctgtaagcatgcattcctcagatgtcattgatctgaattaatttctatccattttgagcttgtttttaatgaaccctggtccttcgttgctcacaacagggtccaagctcttggcacatgatatacgggatggacttaaacactgacaaaggtcttcttttggtggcagataactttggttttctttacttcctggatagacgatcaaagacgagaattggacatccaattcttatccataaaaagggtagcaaggtaaccagcctacattgtaaccctgcacgacctgaagtgcttctaagcagcggaaatgatcactatgcccgtatttgggatacaaggaagcttgaagccaactctccccttgccagccttgctcatggacgggttgttaattcaggatacttttctccacgaagcggaaataagatcttgacaacttgtcaggacaaccgaattcgtgattacaccgaaacagttgcagtgattggccgttacataagtgagaactacaatggtgttgctctgcatccaattgattttatagatactagttctgggaagcttctggctgaggtgatggaccctgacataataacaatcagcccagtgaacaagctacatccgcaagatgacatcctagctacaggaagctcaaggtctattttcatatggaagccaaaaattgaagatgaacttactgaagaaagagccaagcatgacaatagtagtgatgacgactcaggtggtgattctggcggaaagaacaagaaagcaaagaagactcgcttcactcatgcagtaaagggaaagggcaaatccaaagtctgatgcttggtgtacatagtcggcagcattttgacaagaaagcgtccattaaccagctcctgatgcatctccttttgtaccatcttgccaactccctcaccccccccagctaaggtgctgaagacccgtatgaaacgcatgctgatagaccccatagttgtctcctgcatcaatgctcctaaggagttagccagttaggtttcggactcttttgaatcctgacatgcttatgatcacttgtcatttgtcaacgaggccttttaacggtttaatcctgtatcaacatataaatctcctgtacagttgcctgaatgcaatttgtgcttgtaaaatgtttattggtgctctcatc

SEQ ID NO: 209774 - DNA, 2091 bp, Zea Mays
gaccaaccgcctcgcctgccgttcccctccacgtctccccattcccgcctcccgagacctgaaccctgttggggacacatgggccccacaacccgcgctcacttcgtctacaatcgccgccgccgccgccgccgaggcgggcggcacgctgtcgaggaggcttccgacgaggagcagcagcagatggatagctcctcctcatcctccgacgaagaaggagatcaggaagaagatgccgaagcctccggagaggacgtcgatgacgaggaagaagaggaagcggtcgctgccgagcctgcgcccaagcagccacccgcagctgcggcggcgggggagaagaggggccgaaggaagggctcgatcaccattagcctgaagaaagtgtgcaaggcgtgcaaaaggacagggcaccaggcagggttcaagggggctgtgtacatcgactgccccatgaagccttgcttcttatgcaagatgccaggtcatacaaccttgacttgcccacatagagtaacaatggagcatggtgttatcccagcgcctaaaaggaatgcaaacacttctctggattatgtcttccagagccaagtcaagggaaagattcccatggttaagcctaagtttctgatacccaaccaactagagcatggaaacataaaatttcatcagagacgtgtgacatgcttggagtttcatccaactaagaacagtgttcttttatcaggagacaagaaaggacttctgggtatctgggattatgttaagttgcatgagaaaatcacttatgattctgtgcactcctgcattctgaatagcatgaagattgataccaccaacgatggtatgatatatacagcttcctctgatggtactatcagttgcactgatttggatactggtattggctctcccttgttaaatctcaacccaaatggttggaatggtccaagctcttggcacatgatatacgggatggacttaaacactgacaaagcctggatagacgatcaaagacgagaattggacatccaattcttatccataaaaagggtagcaaggtaaccagcctacattgtaaccctgcacgacctgaagtgcttctaagcagcggaaatgatcactatgcccgtatttgggatacaaggaagcttgaagccaactctccccttgccagccttgctcatggacgggttgttaattcaggatacttttctccacgaagcggaaataagatcttgacaacttgtcaggacaaccgaattcgtgtatgggactatattcttggtgatctgcaatccccaagtagagaaattgtgcacagtcatgatttcaatcgtcacctgactcccttcaaagctgagtgggatccaaaggattacaccgaaacagttgcagtgattggccgttacataagtgagaactacaatggtgttgctctgcatccaattgattttatagatactagttctgggaagcttctggctgaggtgatggaccctgacataataacaatcagcccagtgaacaagctacatccgcaagatgacatcctagctacaggaagctcaaggtctattttcatatggaagccaaaaattgaagatgaacttactgaagaaagagccaagcatgacaatagtagtgatgacgactcaggtggtgattctggcggaaagaacaagaaagcaaagaagactcgcttcactcatgcagtaaagggaaagggcaaatccaaagtctgatgcttggtgtacatagtcggcagcattttgacaagaaagcgtccattaaccagctcctgatgcatctccttttgtaccatcttgccaactccctcaccccccccagctaaggtgctgaagacccgtatgaaacgcatgctgatagaccccatagttgtctcctgcatcaatgctcctaaggagttagccagttaggtttcggactcttttgaatcctgacatgcttatgatcacttgtcatttgtcaacgaggccttttaacggtttaatcctgtatcaacatataaatctcctgtacagttgcctgaatgcaatttgtgcttgtaaaatgtttattggtgctctcatc

SEQ ID NO: 209775 - DNA, 2117 bp, Zea Mays
cgccgaactcataaaccccaccacagcccagaccaaccgcctcgcctgccgttcccctccacgtctccccattcccgcctcccgagacctgaaccctgttggggacacatgggccccacaacccgcgctcacttcgtctacaatcgccgccgccgccgccgccgaggcgggcggcacgctgtcgaggaggcttccgacgaggagcagcagcagatggatagctcctcctcatcctccgacgaagaaggagatcaggaagaagatgccgaagcctccggagaggacgtcgatgacgaggaagaagaggaagcggtcgctgccgagcctgcgcccaagcagccacccgcagctgcggcggcgggggagaagaggggccgaaggaagggctcgatcaccattagcctgaagaaagtgtgcaaggcgtgcaaaaggacagggcaccaggcagggttcaagggggctgtgtacatcgactgccccatgaagccttgcttcttatgcaagatgccaggtcatacaaccttgacttgcccacatagagtaacaatggagcatggtgttatcccagcgcctaaaaggaatgcaaacacttctctggattatgtcttccagagccaagtcaagggaaagattcccatggttaagcctaagtttctgatacccaaccaactagagcatggaaacataaaatttcatcagagacgtgtgacatgcttggagtttcatccaactaagaacagtgttcttttatcaggagacaagaaaggacttctgggtatctgggattatgttaagttgcatgagaaaatcacttatgattctgtgcactcctgcattctgaatagcatgaagattgataccaccaacgatggtatgatatatacagcttcctctgatggtactatcagttgcactgatttggatactgggtccaagctcttggcacatgatatacgggatggacttaaacactgacaaaggtcttcttttggtggcagataactttggttttctttacttcctggatagacgatcaaagacgagaattggacatccaattcttatccataaaaagggtagcaaggtaaccagcctacattgtaaccctgcacgacctgaagtgcttctaagcagcggaaatgatcactatgcccgtatttgggatacaaggaagcttgaagccaactctccccttgccagccttgctcatggacgggttgttaattcaggatacttttctccacgaagcggaaataagatcttgacaacttgtcaggacaaccgaattcgtgtatgggactatattcttggtgatctgcaatccccaagtagagaaattgtgcacagtcatgatttcaatcgtcacctgactcccttcaaagctgagtgggatccaaaggattacaccgaaacagttgcagtgattggccgttacataagtgagaactacaatggtgttgctctgcatccaattgattttatagatactagttctgggaagcttctggctgaggtgatggaccctgacataataacaatcagcccagtgaacaagctacatccgcaagatgacatcctagctacaggaagctcaaggtctattttcatatggaagccaaaaattgaagatgaacttactgaagaaagagccaagcatgacaatagtagtgatgacgactcaggtggtgattctggcggaaagaacaagaaagcaaagaagactcgcttcactcatgcagtaaagggaaagggcaaatccaaagtctgatgcttggtgtacatagtcggcagcattttgacaagaaagcgtccattaaccagctcctgatgcatctccttttgtaccatcttgccaactccctcaccccccccagctaaggtgctgaagacccgtatgaaacgcatgctgatagaccccatagttgtctcctgcatcaatgctcctaaggagttagccagttaggtttcggactcttttgaatcctgacatgcttatgatcacttgtcatttgtcaacgaggccttttaacggtttaatcctgtatcaacatataaatctcctgtacagttgcctgaatgcaatttgtgcttgtaaaatgtttattggtgctctcatc

SEQ ID NO: 209776 - DNA, 2481 bp, Zea Mays
ccccactcccgatgcgtccgccccaacgccgatagtcctcgcccctcccctccccgttgcgcccacccatgccccctccgcgcccgcgcctcccctcaaccaccgcaccgagatcgccgccgatctgagctcccctccccgttgcgcccacccatggtcgctgcttcgacttgctgttgctgctgctcctgcacgacgaccaatgaagggaacaacgtggtctgcgcgggcatggtgggcgcgtggaaggagaagtcgttgaaggcgccgccgaccgcagctcggctgtcgtcttgctgtcgtcttgctgagactgagacgcgatcaggtcggcggcctgcttccagtcgaacctctgcgccgggatggcgccggtggtgggcgacgcgaagaagttcgaggaagagtggagcgggacgggcgagtccagcagctcggcggggctgagcccgggcgggatggagaagtaggaggagggcgacatcggcggcggcgagatgggcaggctgggcggctgcacggacttgaacttgggcacgcctacgccgccgcccctggtggcgccgcggtggaacagccccctcggtgatggtggccaaccccaagatctatgtggccaaggccgtcgatgcctttgtggagttggcggaggcgagcaggttaatttttaggtaccagatcatctgatttctcagaagcaaaatgttgtttggagctcagtgacaccatcttgtaatgcctgtgattttacgggaaatggaggatcattctgtccatcccatgtctaagtctaaccatggctccttgtcaggaaatggttatgagatgaaacattcaggccataaagtttgcgattgggattcatcatcgaagtctgatcggtctcaccaagaagcatcagcagcaagtgaaagcagtccaaatgaacacacatcgactcaatcagacaatgatgaagatcatgggaaagataatcaggacacaatgaagccagtattgtccttggggaaggaaggctctgcctttttggccccaaaattacattacagcccatcttttgcttgtattccttatactgttgatgcttattatagtggggttggggtcttgacaggatatgctccacatgccattgtccatccccagcaaaatgatacaacgaacactccgggtatgttacctgtggaacctgcagaagaaccaatatatgttaatgcaaaacaataccatgcaatccttaggaggaggcaaacacgtgctaaattggaggcccaaaacaagatggtgaaaaatcggaaggctgcaaaggagggcgagcctttttgggatagcccttggggccgtggaagaccgggatggcatattgaatgcagcgcaatgagtgctcactatttaggacatgtattcgatattcatggtggggggaaagatttgatttttcctcatcatgagaatgagcttgcacaaagccaagctgcttatcctgagagtgaggtgaagtgctggatgcataatggctttgttaacaaggatgataaaaaaatggcaaaatcagataataacttttcacgattagagatatcactgctctttaccatccattggctttaagatttttcttgatgcgcactcattatagatcagatgtgaaccattctgatcaagcacttgagattgcatctgatcgtgtctattacatttatcagttagtgcttctgcatctcatcacagatcctgaatacttcctttgtcaaagctttcacttgtctgaaggaagacgtcggccttctgcttctccatcaccatcgttatcatgcaacctgctggaatgccacagcgggacaggagcatggggatgagcaggcgcaagatgatagcaagtggcgccggatcccgacgttcgacgactggaacctgcgggacgacatgcccgtcacccaatacttgcaagcagggacttcttcatcattgtgccgccgacagagaaggacgacgacgaggatctgttcaaggtgcccctgtgttccctgccaagccctacaactacaagaaggtgaaacaaaataggacgctgcattagtttctctcgccaattaattacactcagggggaaaaagttttctttcaccagctctgaagatagtatcagttaacattgtttcatatctccatttccatatacattatacccagtcggcactagcgagcgatgagaaagatactgaacaattctatgatccaagcatggaattataatcattgaaactctgttgctactgttacttggttcataggctgatatatacatccaagctcgcccgcaccgccacctccacagtttatcatggtgcttttgaccctgcttgacagaaccagcagtgatgtatatataggtcattttgcctaatttgcatgaatatgacaatgtttagttgtaaggttgtataaatggtcgattggggctgttggtttatgattgtg

SEQ ID NO: 209777 - DNA, 2330 bp, Zea Mays
ccccactcccgatgcgtccgccccaacgccgatagtcctcgcccctcccctccccgttgcgcccacccatgccccctccgcgcccgcgcctcccctcaaccaccgcaccgagatcgccgccgatctgagctcccctccccgttgcgcccacccatggtcgctgcttcgacttgctgttgctgctgctcctgcacgacgaccaatgaagggaacaacgtggtctgcgcgggcatggtgggcgcgtggaaggagaagtcgttgaaggcgccgccgaccgcagctcggctgtcgtcttgctgtcgtcttgctgagactgagacgcgatcaggtcggcggcctgcttccagtcgaacctctgcgccgggatggcgccggtggtgggcgacgcgaagaagttcgaggaagagtggagcgggacgggcgagtccagcagctcggcggggctgagcccgggcgggatggagaagtaggaggagggcgacatcggcggcggcgagatgggcaggctgggcggctgcacggacttgaacttgggcacgcctacgccgccgcccctggtggcgccgcggtggaacagccccctcggtgatggtggccaaccccaagatctatgtggccaaggccgtcgatgcctttgtggagttggcggaggcgagcaggttaatttttaggtaccagatcatctgatttctcagaagcaaaatgttgtttggagctcagtgacaccatcttgtaatgcctgtgattttacgggaaatggaggatcattctgtccatcccatgtctaagtctaaccatggctccttgtcaggaaatggttatgagatgaaacattcaggccataaagtttgcgattgggattcatcatcgaagtctgatcggtctcaccaagaagcatcagcagcaagtgaaagcagtccaaatgaacacacatcgactcaatcagacaatgatgaagatcatgggaaagataatcaggacacaatgaagccagtattgtccttggggaaggaaggctctgcctttttggccccaaaattacattacagcccatcttttgcttgtattccttatactgttgatgcttattatagtggggttggggtcttgacaggatatgctccacatgccattgtccatccccagcaaaatgatacaacgaacactccgggtatgttacctgtggaacctgcagaagaaccaatatatgttaatgcaaaacaataccatgcaatccttaggaggaggcaaacacgtgctaaattggaggcccaaaacaagatggtgaaaaatcggaaggctgcaaaggagggcgagcctttttgggatagcccttggggccgtggaagaccgggatggcatattgaatgcagcgcaatgagtgctcactatttaggacatgtattcgatattcatggtggggggaaagatttgatttttcctcatcatgagaatgagcttgcacaaagccaagctgcttatcctgagagtgaggtgaagtgctggatgcataatggctttgttaacaaggatgataaaaaaatggcaaaatcagataataacttttcacgattagagatatcctgaatacttcctttgtcaaagctttcacttgtctgaaggaagacgtcggccttctgcttctccatcaccatcgttatcatgcaacctgctggaatgccacagcgggacaggagcatggggatgagcaggcgcaagatgatagcaagtggcgccggatcccgacgttcgacgactggaacctgcgggacgacatgcccgtcacccaatacttgcaagcagggacttcttcatcattgtgccgccgacagagaaggacgacgacgaggatctgttcaaggtgcccctgtgttccctgccaagccctacaactacaagaaggtgaaacaaaataggacgctgcattagtttctctcgccaattaattacactcagggggaaaaagttttctttcaccagctctgaagatagtatcagttaacattgtttcatatctccatttccatatacattatacccagtcggcactagcgagcgatgagaaagatactgaacaattctatgatccaagcatggaattataatcattgaaactctgttgctactgttacttggttcataggctgatatatacatccaagctcgcccgcaccgccacctccacagtttatcatggtgcttttgaccctgcttgacagaaccagcagtgatgtatatataggtcattttgcctaatttgcatgaatatgacaatgtttagttgtaaggttgtataaatggtcgattggggctgttggtttatgattgtg

SEQ ID NO: 209778 - DNA, 3054 bp, Zea Mays
ccccactcccgatgcgtccgccccaacgccgatagtcctcgcccctcccctccccgttgcgcccacccatgccccctccgcgcccgcgcctcccctcaaccaccgcaccgagatcgccgccgatctgagctcccctccccgttgcgcccacccatggtcgctgcttcgacttgctgttgctgctgctcctgcacgacgaccaatgaagggaacaacgtggtctgcgcgggcatggtgggcgcgtggaaggagaagtcgttgaaggcgccgccgaccgcagctcggctgtcgtcttgctgtcgtcttgctgagactgagacgcgatcaggtcggcggcctgcttccagtcgaacctctgcgccgggatggcgccggtggtgggcgacgcgaagaagttcgaggaagagtggagcgggacgggcgagtccagcagctcggcggggctgagcccgggcgggatggagaagtaggaggagggcgacatcggcggcggcgagatgggcaggctgggcggctgcacggacttgaacttgggcacgcctacgccgccgcccctggtggcgccgcggtggaacagccccctcggtgatggtggccaaccccaagatctatgtggccaaggccgtcgatgcctttgtggagttggcggaggcgagcaggtaaacagatatgcatatatcagggtccatgattttttgcatggcgtagctgatacctgggaacaaagccctggagtctggagaacgtgaactgcgtgacatgaggcaccgttaatttatcatcttacctttttttgactgcctgtttggtgggtgaacgtggtcgtcggatcggatgcgatgtttgctggggccgcgatcatgcgtcacccagtgattattccaggcaggcacttggcaagattgcctatttcttctctggaccacgatttatggtggccataattgttctcaaaacgttgctgccacaccagatccgcttggatttctggacacccccaataaatgattactgttaatccagtggatcagaaaatgacgtctctcttgttttctttgtttttctcctttgtccgtctgctttttgctcttgttctgctgctctaatcaggtggcttccatcctaatccgagtgtactcaacaaggttgagggagagactttggatacccattactgttagggagtcggtctagctacattcgtgataggccaataagttggagtttaatacgtaattcagatgtctatatctttaggaatctcttagtttctgcctaagatgtgggaatctatcaggaattcagctaattcaatgcgggctacttgccacaaaggttaatttttaggtaccagatcatctgatttctcagaagcaaaatgttgtttggagctcagtgacaccatcttgtaatgcctgtgattttacgggaaatggaggatcattctgtccatcccatgtctaagtctaaccatggctccttgtcaggaaatggttatgagatgaaacattcaggccataaagtttgcgattgggattcatcatcgaagtctgatcggtctcaccaagaagcatcagcagcaagtgaaagcagtccaaatgaacacacatcgactcaatcagacaatgatgaagatcatgggaaagataatcaggacacaatgaagccagtattgtccttggggaaggaaggctctgcctttttggccccaaaattacattacagcccatcttttgcttgtattccttatactgttgatgcttattatagtggggttggggtcttgacaggatatgctccacatgccattgtatgttcactcttaatttttcagtttctgtcttcctggccacattctgtccatccccagcaaaatgatacaacgaacactccgggtatgttacctgtggaacctgcagaagaaccaatatatgttaatgcaaaacaataccatgcaatccttaggaggaggcaaacacgtgctaaattggaggcccaaaacaagatggtgaaaaatcggaaggctgcaaaggagggcgagcctttttgggatagcccttggggccgtggaagaccgggatggcatattgaatgcagcgcaatgagtgctcactatttaggacatgtattcgatattcatggtggggggaaagatttgatttttcctcatcatgagaatgagcttgcacaaagccaagctgcttatcctgagagtgaggtgaagtgctggatgcataatggctttgttaacaaggatgataaaaaaatggcaaaatcagataataacttttcacgattagagatatcctgaatacttcctttgtcaaagctttcacttgtctgaaggaagacgtcggccttctgcttctccatcaccatcgttatcatgcaacctgctggaatgccacagcgggacaggagcatggggatgagcaggcgcaagatgatagcaagtggcgccggatcccgacgttcgacgactggaacctgcgggacgacatgcccgtcacccaatacttgcaagcagggacttcttcatcattgtgccgccgacagagaaggacgacgacgaggatctgttcaaggtgcccctgtgttccctgccaagccctacaactacaagaaggtgaaacaaaataggacgctgcattagtttctctcgccaattaattacactcagggggaaaaagttttctttcaccagctctgaagatagtatcagttaacattgtttcatatctccatttccatatacattatacccagtcggcactagcgagcgatgagaaagatactgaacaattctatgatccaagcatggaattataatcattgaaactctgttgctactgttacttggttcataggctgatatatacatccaagctcgcccgcaccgccacctccacagtttatcatggtgcttttgaccctgcttgacagaaccagcagtgatgtatatataggtcattttgcctaatttgcatgaatatgacaatgtttagttgtaaggttgtataaatggtcgattggggctgttggtttatgattgtg

SEQ ID NO: 209779 - DNA, 2127 bp, Zea Mays
ccccactcccgatgcgtccgccccaacgccgatagtcctcgcccctcccctccccgttgcgcccacccatgccccctccgcgcccgcgcctcccctcaaccaccgcaccgagatcgccgccgatctgagctcccctccccgttgcgcccacccatggtcgctgcttcgacttgctgttgctgctgctcctgcacgacgaccaatgaagggaacaacgtggtctgcgcgggcatggtgggcgcgtggaaggagaagtcgttgaaggcgccgccgaccgcagctcggctgtcgtcttgctgtcgtcttgctgagactgagacgcgatcaggtcggcggcctgcttccagtcgaacctctgcgccgggatggcgccggtggtgggcgacgcgaagaagttcgaggaagagtggagcgggacgggcgagtccagcagctcggcggggctgagcccgggcgggatggagaagtaggaggagggcgacatcggcggcggcgagatgggcaggctgggcggctgcacggacttgaacttgggcacgcctacgccgccgcccctggtggcgccgcggtggaacagccccctcggtgatggtggccaaccccaagatctatgtggccaaggccgtcgatgcctttgtggagttggcggaggcgagcaggttaatttttaggtaccagatcatctgatttctcagaagcaaaatgttgtttggagctcagtgacaccatcttgtaatgcctgtgattttacgggaaatggaggatcattctgtccatcccatgtctaagtctaaccatggctccttgtcaggaaatggttatgagatgaaacattcaggccataaagtttgcgattgggattcatcatcgaagtctgatcggtctcaccaagaagcatcagcagcaagtgaaagcagtccaaatgaacacacatcgactcaatcagacaatgatgaagatcatgggaaagataatcaggacacaatgaagccagtattgtccttggggaaggaaggctctgcctttttggccccaaaattacattacagcccatcttttgcttgtattccttatactgttgatgcttattatagtggggttggggtcttgacaggatatgctccacatgccattgtccatccccagcaaaatgatacaacgaacactccgggtatgttacctgtggaacctgcagaagaaccaatatatgttaatgcaaaacaataccatgcaatccttaggaggaggcaaacacgtgctaaattggaggcccaaaacaagatggtgaaaaatcggaaggctgcaaaggagggcgagcctttttgggatagcccttggggccgtggaagaccgggatggcatattgaatgcagcgcaatgagtgctcactatttaggacatgtattcgatattcatggtggggggaaagatttgatttttcctcatcatgagaatgagcttgcacaaagccaagctgcttatcctgagagtgaggtgaagtgctggatgcataatggctttgttaacaaggatgataaaaaaatggcaaaatcagataataacttttcacgattagagatgtacttgacttactttaggttcaaattatagtcattttgtgacttattggatttaaatttgagctgagcagataacaagcgacttgggggtattgatatttatttttctgtcttgtttaatctatttgttcaactaatttcaaaacagttagtgcttctgcatctcatcacagatcctgaatacttcctttgtcaaagctttcacttgtctgaaggaagacgtcggccttctgcttctccatcaccatcgttatcatgcaacctgctggaatgccacagcgggacaggagcatggggatgagcaggcgcaagatgatagcaagtggcgccggatcccgacgttcgacgactggaacctgcgggacgacatgcccgtcacccaatacttgcaagcagggacttcttcatcattgtgccgccgacagagaaggacgacgacgaggatctgttcaaggtgcccctgtgttccctgccaagccctacaactacaagaaggagctaactcaggcttacgaggtcctcagtgatcttgaaaatcaagagatct

SEQ ID NO: 209780 - DNA, 2742 bp, Zea Mays
ccccactcccgatgcgtccgccccaacgccgatagtcctcgcccctcccctccccgttgcgcccacccatgccccctccgcgcccgcgcctcccctcaaccaccgcaccgagatcgccgccgatctgagctcccctccccgttgcgcccacccatggtcgctgcttcgacttgctgttgctgctgctcctgcacgacgaccaatgaagggaacaacgtggtctgcgcgggcatggtgggcgcgtggaaggagaagtcgttgaaggcgccgccgaccgcagctcggctgtcgtcttgctgtcgtcttgctgagactgagacgcgatcaggtcggcggcctgcttccagtcgaacctctgcgccgggatggcgccggtggtgggcgacgcgaagaagttcgaggaagagtggagcgggacgggcgagtccagcagctcggcggggctgagcccgggcgggatggagaagtaggaggagggcgacatcggcggcggcgagatgggcaggctgggcggctgcacggacttgaacttgggcacgcctacgccgccgcccctggtggcgccgcggtggaacagccccctcggtgatggtggccaaccccaagatctatgtggccaaggccgtcgatgcctttgtggagttggcggaggcgagcaggttaatttttaggtaccagatcatctgatttctcagaagcaaaatgttgtttggagctcagtgacaccatcttgtaatgcctgtgattttacgggaaatggaggatcattctgtccatcccatgtctaagtctaaccatggctccttgtcaggaaatggttatgagatgaaacattcaggccataaagtttgcgattgggattcatcatcgaagtctgatcggtctcaccaagaagcatcagcagcaagtgaaagcagtccaaatgaacacacatcgactcaatcagacaatgatgaagatcatgggaaagataatcaggacacaatgaagccagtattgtccttggggaaggaaggctctgcctttttggccccaaaattacattacagcccatcttttgcttgtattccttatactgttgatgcttattatagtggggttggggtcttgacaggatatgctccacatgccattgtccatccccagcaaaatgatacaacgaacactccgggtatgttacctgtggaacctgcagaagaaccaatatatgttaatgcaaaacaataccatgcaatccttaggaggaggcaaacacgtgctaaattggaggcccaaaacaagatggtgaaaaatcggaaggctgcaaaggagggcgagcctttttgggatagcccttggggccgtggaagaccgggatggcatattgaatgcagcgcaatgagtgctcactatttaggacatgtattcgatattcatggtggggggaaagatttgatttttcctcatcatgagaatgagcttgcacaaagccaagctgcttatcctgagagtgaggtgaagtgctggatgcataatggctttgttaacaaggatgataaaaaaatggcaaaatcagataataacttttcacgattagagatatcactgctctttaccatccattggctttaagatttttcttgatgcgcactcattatagatcagatgtgaaccattctgatcaagcacttgagattgcatctgatcgtgtctattacatttatcagatcctgaatacttcctttgtcaaagctttcacttgtctgaaggaagacgtcggccttctgcttctccatcaccatcgttatcatgcaacctgctggaatgccacagcgggacaggagcatggggatgagcaggcgcaagatgatagcaagtggcgccggatcccgacgttcgacgactggaacctgcgggacgacatgcccgtcacccaatacttgcaagcagggacttcttcatcattgtgccgccgacagagaaggacgacgacgaggatctgttcaaggtgcccctgtgttccctgccaagccctacaactacaagaaggtgaaacaaaataggacgctgcattagtttctctcgccaattaattacactcagggggaaaaagttttctttcaccagctctgaagatagtatcagttaacattgtttcatatctccatttccatatacattatacccagtcggcactagcgagcgatgagaaagatactgaacaattctatgatccaagcatggaattataatcattgaaactctgttgctactgttacttggttcataggctgatatatacatccaagctcgcccgcaccgccacctccacagtttatcatggtgcttttgaccctgcttgacagaaccagcagtgatgtatatataggtcattttgcctaatttgcatgaatatgacaatgtttagttgtaaggttgtataaatggtcgattggggctgttggtttatgattgtgatgaaaactaagaactcatgaatttgttttagttctaggagctaactcaggcttacgaggtcctcagtgatcttgaaaatcaagagatctatgatgacagagacaacataatcctacacctgtttcattattggagtaatgcggtgctacatgtatggttctcttcttaaagctgtaagactaaggatcaccttttcctcttcgaacaagagcccaggaactgcgacgaggcgtgcgaggccgacctcggcgccacgcccgactgcccactgacgttgctgctcat

SEQ ID NO: 209781 - DNA, 736 bp, Zea Mays
ttataaatagcttgcattaaattctgtgaaaattatataaaaataagagtgttgataaaaaactaagaacgttgataaaaggctatttatgatctctagataaaagatctaaggagtacaaaaccataatgcataggctccttcaaatccaaaaacatttttgttgccaaacaaatgagcctgcattaataccgtcattcctgtaatgtgcatttaggtccatccccagcaaaatgatacaacgaacactccgggtatgttacctgtggaacctgcagaagaaccaatatatgttaatgcaaaacaataccatgcaatccttaggaggaggcaaacacgtgctaaattggaggcccaaaacaagatggtgaaaaatcggaaggctgcaaaggagggcgagcctttttgggatagcccttggggccgtggaagaccgggatggcatattgaatgcagcgcaatgagtgctcactatttaggacatgtattcgatattcatggtggggggaaagatttgatttttcctcatcatgagaatgagcttgcacaaagccaagctgcttatcctgagagtgaggtgaagtgctggatgcataatggctttgttaacaaggatgataaaaaaatggcaaaatcagataataacttttcacgattagagatatgtgaaccattctgatcaagcacttgagattgcatctgatcgtgtctattacatttatcagttagtgcttct

SEQ ID NO: 209782 - DNA, 1564 bp, Zea Mays
ttataaatagcttgcattaaattctgtgaaaattatataaaaataagagtgttgataaaaaactaagaacgttgataaaaggctatttatgatctctagataaaagatctaaggagtacaaaaccataatgcataggctccttcaaatccaaaaacatttttgttgccaaacaaatgagcctgcattaataccgtcattcctgtaatgtgcatttaggtccatccccagcaaaatgatacaacgaacactccgggtatgttacctgtggaacctgcagaagaaccaatatatgttaatgcaaaacaataccatgcaatccttaggaggaggcaaacacgtgctaaattggaggcccaaaacaagatggtgaaaaatcggaaggctgcaaaggagggcgagcctttttgggatagcccttggggccgtggaagaccgggatggcatattgaatgcagcgcaatgagtgctcactatttaggacatgtattcgatattcatggtggggggaaagatttgatttttcctcatcatgagaatgagcttgcacaaagccaagctgcttatcctgagagtgaggtgaagtgctggatgcataatggctttgttaacaaggatgataaaaaaatggcaaaatcagataataacttttcacgattagagatatcactgctctttaccatccattggctttaagatttttcttgatgcgcactcattatagatcagatgtgaaccattctgatcaagcacttgagattgcatctgatcgtgtctattacatttatcagttagtgcttctgcatctcatcacagatcctgaatacttcctttgtcaaagctttcacttgtctgaaggaagacgtcggccttctgcttctccatcaccatcgttatcatgcaacctgctggaatgccacagcgggacaggagcatggggatgagcaggcgcaagatgatagcaagtggcgccggatcccgacgttcgacgactggaacctgcgggacgacatgcccgtcacccaatacttgcaagcagggacttcttcatcattgtgccgccgacagagaaggacgacgacgaggatctgttcaaggtgcccctgtgttccctgccaagccctacaactacaagaaggtgaaacaaaataggacgctgcattagtttctctcgccaattaattacactcagggggaaaaagttttctttcaccagctctgaagatagtatcagttaacattgtttcatatctccatttccatatacattatacccagtcggcactagcgagcgatgagaaagatactgaacaattctatgatccaagcatggaattataatcattgaaactctgttgctactgttacttggttcataggctgatatatacatccaagctcgcccgcaccgccacctccacagtttatcatggtgcttttgaccctgcttgacagaaccagcagtgatgtatatataggtcattttgcctaatttgcatgaatatgacaatgtttagttgtaaggttgtataaatggtcgattggggctgttggtttatgattgtg

SEQ ID NO: 209783 - DNA, 1242 bp, Zea Mays
ttataaatagcttgcattaaattctgtgaaaattatataaaaataagagtgttgataaaaaactaagaacgttgataaaaggctatttatgatctctagataaaagatctaaggagtacaaaaccataatgcataggctccttcaaatccaaaaacatttttgttgccaaacaaatgagcctgcattaataccgtcattcctgtaatgtgcatttaggtccatccccagcaaaatgatacaacgaacactccgggtatgttacctgtggaacctgcagaagaaccaatatatgttaatgcaaaacaataccatgcaatccttaggaggaggcaaacacgtgctaaattggaggcccaaaacaagatggtgaaaaatcggaaggctgcaaaggagggcgagcctttttgggatagcccttggggccgtggaagaccgggatggcatattgaatgcagcgcaatgagtgctcactatttaggacatgtattcgatattcatggtggggggaaagatttgatttttcctcatcatgagaatgagcttgcacaaagccaagctgcttatcctgagagtgaggtgaagtgctggatgcataatggctttgttaacaaggatgataaaaaaatggcaaaatcagataataacttttcacgattagagatatcactgctctttaccatccattggctttaagatttttcttgatgcgcactcattatagatcagatgtgaaccattctgatcaagcacttgagattgcatctgatcgtgtctattacatttatcagatcctgaatacttcctttgtcaaagctttcacttgtctgaaggaagacgtcggccttctgcttctccatcaccatcgttatcatgcaacctgctggaatgccacagcgggacaggagcatggggatgagcaggcgcaagatgatagcaagtggcgccggatcccgacgttcgacgactggaacctgcgggacgacatgcccgtcacccaatacttgcaagcagggacttcttcatcattgtgccgccgacagagaaggacgacgacgaggatctgttcaaggtgcccctgtgttccctgccaagccctacaactacaagaagttctaggagctaactcaggcttacgaggtcctcagtgatcttgaaaatcaagagatctatgatgacagagacaacataatcctacacctgtttcattattggagtaatgcggtgctacatgtatggttctc

SEQ ID NO: 209784 - DNA, 844 bp, Zea Mays
cacagacaatctaccccaccacacacacacatcctcctctcaactcaagcagactcggatcaccccaccttatcgcgcgcgaagcctttctccctttgtctccactcccgaccgcgatcgcgcgcgcggcgttcgtggccacagacccagcaagccttgcactcgttgcaccaccagccggcggcgaccgcgcgatgagggccaggaaggcgaagacggcgacgtcgtcgtcgttttggaggtcgctcctgggcggctgcctcggcggaggcggcggcggagggcgggcggcgggggacaggcagcggaaggtgcggccgggcggcgggggcgggcggctgtcgttcacggacctgagcggcgccgcggaccaggacctgtcggcgtcgctggtgggctccaacctgcacgtgttcagcgtggcggagctgcgcgaggccacgcgcggcttcgtctccggcaacttcctcggcgagggcggcttcggccccgtctacaggggcttcgtcgccgacggcgccaagaaggggctcaaggcgcaggccatcgccgtcaagctctgggaccccgagggcgcccaggggcacaaggagtggctggcggaggtgatcttcctggggcagctgcggcatcccaacctggtgaagctggtgggctactgctgcgaggacgagcaccgcctgctcgtctacgagtacatggagcacggcagcctggagaaccacctcttcaaacgtctgaccaagccaagatttgactgtactcgctgcccaaatgcaggacgcatggcgttgttattgtattattagcaggatgccgagctagcatttgaccagtaatggta

SEQ ID NO: 209785 - DNA, 1352 bp, Zea Mays
gtcacgtatagttgctggatcaatgtcgacgatcaccggctgatccgttcttgcccagattcctgccgtgctgccctggtcgacccgactaaacattgcagtaggcgccgccaagggtttggcgttcctccacgacgccgagaagccggtcatctaccgtgacttcaaggcctccaacatcttgctcgactcggactacaaggccaagctgtcagacttcgggctggccaaggacgggccggagggcgacgacacgcacgtgtcgacgcgcgtgatggggacgcacggctacgcggcgccggagtacatcatgacgggccacctcacggccaagagcgacgtgtacagcttcggcgtggtgctgctggagatcctcacgggccgccggtccgtcgacaagacccgccccagccgggagcagaacctggtggactacgcgcggccgtgcctcaaggacccgctcaggctgggccggatcatggacccggccatggagggccagtactcgccgcgggcggcccagagcgcggcgctggtcgcgtaccggtgcctcagcgccagccccaagaaccggccggacatgtccgccgtcgtccgggcgctggagccgctgctcgacctccacgacgacgtgcccgtggcgcccctgggccacgccggccccgtcgtgctgttcgtagcggccgccgccgaggaggagaagaaggagcgggccccgaggaaggacgtccacgtccaccggcgcaggcccatgtcgcccaaggcgagccccaggaagcgccccggcaccggcgccggcaccaaggaggagttctgggtgtggcatctgccggtgccggccgaccataagacacgtccgaccttgggcggcggcgttgtgcaagcgtgtgcgtgagccaaggtgctattggggctcagattgtgccttggaccaaattgttgtgtttttcagtctgctgttacagtgagatgagatgcagagtgactcgagcaaattgtacaccggaagccatcgttctctactccagtatacccttgtatacgcttgtattcagatgaagcgacgatggcaattcgcaaacgaacagaaacgtttgcgtacgtacaggccatgggcatgtgacaagagggtataaatcatggagcagtgattggcttttggcatcatgatttcttctgattgactatactctcttggtgatttacaaaccaaacaaaacggtagtacaagaaaaatccttttcatggagatgtgacggtttttggatgtaatttcaaaaaaaaaaaagcaaaaaacttccttcttcgatacccgaatttcttgctccaattgttacaatacctttaatctt

SEQ ID NO: 209786 - DNA, 619 bp, Zea Mays
cttgtgtaccaaatcttgaagacgctttgatttcccattcaccccgacaaagtatattccattctatggaggagcagaataccatgactatcatcattatgtaggaggccagagccaaagcaattttgcttctgttttcacttactgtgattacttatatggcactgacaaaggttacagattccacaaaacatacctagcaaagctgaaggatctggggcataatgatggccagaaaggagacggcagcggacccagctatgtgaaactggattagattgcaagatatagtgcatcttgagtgtttctatggtcatcgacttcactgtggcatttcgaaatgggatattgctgagttgggctggtcacgtgtgttctcatttctgtagcaggcatacagctttcagctctgccttctttcttttttttttctagcgtttatgaaattctatggaacttgtacgctgacgaataacaacgcaactctcacgaataacaacgccaattcttaaagttcatcgagttcgctccgtgcttttattaatttggaccagttgctgtatagttttctagtataccatattgttttatgttttaaactaggtactcaacctagttt

SEQ ID NO: 209787 - DNA, 777 bp, Zea Mays
cttgtattgctcagtctaagtggatcatgttggaaatttatccttcttcattcatacttagtggctgggaagtttttttgttatcttggatgtttctactcagtcaacattgtctcaagtctcaaactctcaacatatgccatttgctggagccctatgaccttgcaacacagagtatttagctttgatttcccattcaccccgacaaagtatattccattctatggaggagcagaataccatgactatcatcattatgtaggaggccagagccaaagcaattttgcttctgttttcacttactgtgattacttatatggcactgacaaaggttacagattccacaaaacatacctagcaaagctgaaggatctggggcataatgatggccagaaaggagacggcagcggacccagctatgtgaaactggattagattgcaagatatagtgcatcttgagtgtttctatggtcatcgacttcactgtggcatttcgaaatgggatattgctgagttgggctggtcacgtgtgttctcatttctgtagcaggcatacagctttcagctctgccttctttcttttttttttctagcgtttatgaaattctatggaacttgtacgctgacgaataacaacgcaactctcacgaataacaacgccaattcttaaagttcatcgagttcgctccgtgcttttattaatttggaccagttgctgtatagttttctagtataccatattgttttatgttttaaactaggtactcaacctagttt

SEQ ID NO: 209788 - DNA, 2165 bp, Zea Mays
gccgggtgcgttgccttcttcatcctcgcacacggcaggcacgtgaccgacacccccagcgcacgaactccaaaatagcgagccgaagggggccacgaccacgagtcctccacctccctctccgccgcgtcgcacgcgcttgacgcgcgccgagagccgaatcggagccacgaggcagccgccccgggcggatcgatcctagggccagggcatgggcggaggggacgccgacgccggcggcgagcccgcggacgcgcaggccacgctccacatccggtgcaccaacggctccaagttcaccgtgcggaccgacctgggcgccaccgtcggggcgtttaaggcgatcgtcgcccacagctgcgacgtgccggcgccgcagcagcggctgatctacaagggccggatcttgaaggacgagcaaaccctagccagctacggtgtggagacagaccatacaatccacatggtacgtggtgctgtgctatcaccaacatctactgcacctgcagccaaccaagaacctaccactgctgctcctgccagttccccggcaacaggattgggtggcttgttgcaaagtctgggtactacaggcgctgctgctaacagtgaggggttgtttggatctgccccccctggattagaccaaatgcagcaacagctagctgaaaatccgaacttgatgagggaaatgatgaatatgccactcatgcagaatttgatgaacaatcctgaactcatacgcagtataataatgaacaatcctcaaatgcgcgagctcattgaccgcaatccggatcttgctcatgtcctcaatgatccaagcattatgcgccagacttttgaagcagttcggaatcctgaactcatgagggagatgatgcggaacacagacagagccatgagcaacatcgagtcttctccagaaggattcaacatgctccgtcgcatgtatgaaactgtccaagagccttttctgaatgcaacaacaatgggtagcgagggtgatcgaaattcgaatccattctctgctcttctaggaaatcaggggtctaaccaagcaagagactcagctgcaaatggaacaactagagcttcagaccccacatcagggtctccagctccaaatactaatccacttccgaatccttggggctcaaatgctggctctgcccaaggagcagcaaggtcctctcctgctagcaatgttaggagtactacagcaagtggcctaggagggttgggttcagcagatttgggaagtacgcatggtgccagtggtggtggctctgatgctaccttgttgactcaagttttgcaaaacccaactatgatgcagatgatgcagaacattatgtctaatcctcagtccatgaatcagctgcttaatatgaatccaaatgtacgtaacatgatggaatccaatactcaaatgagagaaatgattgagaatccagaatttcttcgccagttaacatctcctgaaacattgcagcaattaatttcgttccagcagtctttgatgtcacaacttggccaacaacaagctggacaggagcggacacaatcaggctctggtgcaggcaatgtcaacctcaacaccttgatgaacatgttcagcgggcttggtgctggtggtggcctaggtgttccaaatgctcctaatgcaccgccagaagaactgtacgccacacaattagctcagctccaagaaatgggtttctttgacacacaagagaacatccgagccttggccgctaccgctggaaatgttcatgctgcagtggagcgacttcttggaaatatgggctaatagaatatgatgatcataactgtactcagatattgtgatttttagttggcattgtgagatcatgtctggctcattggttttacacccgagggtgagaggcggcgtctagattttgtgttcaaggatgaataaagagtgtaccgggggaacctttcatatacatatgtgtacatggacaatgtcgtattctgtacaagagggagagggaatatgtagtgcagaccatgagaactaaaaaaactgtatttcgattgctcaagaaaatatatgagatgcatccataactcagagatgtattttgttgcaatagttgggattccttcattttttaaaaaaaatcattgattttttt

SEQ ID NO: 209789 - DNA, 3016 bp, Zea Mays
ttgcctttctcctccctcttcctctgcgcactgcagcagctgcagcgcagtgaagtgttgtgttgctcgaccacgagcataccagctgcttgctcacctttccctttctcgggtagttcgccatttttttaaaataatcagcagtaagcaagagctcggcgagctgagccgagcagcactgcggcaaagaactcccacttccattgcctgcttgcttctgctctgctgcacctgcgaccgttccagcggccgccgccggcccggccgacttggcggcgactggcgaccatgaagggcgtcgacgatgggttcctcggcgctggcgacaagccagggctggatatttggtgcatctttgggagcagtgtggtcccagttgcaaaatctcagcacggaaagttctacaccggcagcacctacatcatactaaacacaactcagctgaaatccggggttcgcagacacgatgtgcattactgggttggggaggaggctaaagagattgtttcatggcctcggacaaggctgttgagttggacgcagcactgggctccagcacggtccagtacagggaaacacagggtgaagaatctgacaagttcttgtcatacttcaaaccgtgtgtcatcccaatacaaggccgcttcttttcacacctgaaaggatctggtgatagatccagcgcgaccacgatgtttaggtgccaaggagagcacgttgctcgtgtcacacaagttccgttttcacggtcctctctggatcacaaatcggtttttatagtggacacgccgtcaaagcttttccttttcagtggctgtaattctcgtatgcaaacaagggctaaagcgttggatgttgttaagcatctgaaggagaatcgacacttgggaagatgtgagatcgcgacaatagaggatggaaagcttgttggtgattctgatgctggagagttctggaacttgtttggaggctatgcgcctattcctcgtgatctacctgacgcaatcaaggaagagccactaactgcaccatctaagaaacttttttggatcaataagaaaaaccttgttccactcgaggcacacccgttggatagagaaatgctgaactcagacagaagttacatgctggactgcagcactgaaatattcttatggatggggatgacaacactggtttcagagaggaagtcatctgttgctgtcttggaagattatgtgcactcccaaggcaggtcattcaacgttcacacatttataatgacagaaggccatgaaactgttgactttaagctgcactttcaacactggtccaggaatgttgagctaaagttatatgaggctggccgagagaaagtggcagctattttcaagcatcagggctatgatgtcacagaaattcctgaggataaacctcagcagttcatcaattgtaatggcagtctgaaggtttggttggtggaccatggttgtacaaaccttcttagtactgaggaccaggaaaaattgtacactggagactgttatatcatacggtatagctattttgaaaatggaaaaaattaccatctgttctttgcatggtctggtaagaatagtgtaaaggatgatagaatggcggcaacatcgttaatgtctagcatggttgattcagtcaaagggcatccagttgtggcacaagtttttgagggcggagaaccagaattatttctctcggtgttcaagtcactaatcatattcaaggggggcaggagtgctgcatataagagttctgttctacagaaaagtccgagaaatggatgtcatgagagtgaaggagtcgccctattccgtgttcaagggcttaaacattattgtgtgcaggccattcaagttgatctggttgcaagttcacttaattcctcgcactgttatattttgcaagacaacggtttgttccttacttggttaggaggcctgtcttcaccaagcgatcataatatacttgacatgatcatgagcaagttgtgtccaatggaacagtccttgctagtcagagaaggctctgaaccagatcacttctggaaagctttgggaggacgatcggagtactcgaaagaaaagcgtgtgaaaggttggcctgcagatccacatctgtatgcttgtagatttgaacaaggtttactcaaggtcaaggaggtattcagcttctgtaaggatgacctggcaactgaagagacgttgattctggactgcaatgaagaaatctacgtctgggttggcctacactcagatattacatccaaggagcaagctctcaatgttggcaagatgttccttaaggatgctgttcacggtggaaggtcaatggaaacgacagtgtatgctgtcacagaaggggacgagcctggatttttcaccagcttcttcgactgggacaattcgaagcaatcatatatggttggcaactcatttgagaggaagctcgccgtcctgaaaggggtctccccaaaactagagacaccggacagaagcctgcgcaggccgtctaggaggcccggggtatcgtcggagccgaccacgccggagcaccagcaaccgaccgcgagaagggccttcggctccacgtctgccgggcggtttgccagggagcgctctccggctgttgcaccgccaacgttgtcgccatctcccaaaagccgctcgtcgtcgtcgacgcccaccacggtggcacgacggctctttcctgcctcggtgcacgcatcggaggctgtgcacgtggtctccacggcgacagctcgacgacggtgagaggagaggtggctgtgtatgcatgcgtaatcgtgcacgattgaaatcatgtagagttgtactagacgatggatttatatgtccggcctacgtacgtgtctgtatacagaatttacctctcaaactgtcaaaccccgaaagtttcttgttttggagaacttgggagtgtgaatagtcgctactcgctactaataaatacgactgtcgttcaaaaacaaaagagtaaa

SEQ ID NO: 209790 - DNA, 1449 bp, Zea Mays
actcatctttctcgctcccgttcgttgcagccgccaggcaccgccgcccgccgcgcccccacgcccgcctgctggtgcccccgccgcgcccctccccgcaccgccggcacgcccgcttcgccccagcccgcagacacccccgcccgcgacgagctgtgctgctggtggcggtggagcgcagtgaggatgaggcgcgcgtcgcgcctggtggccgggtcatggaggcgcgccagcagagccctgagctcgccgtaggcggcatcgccagagggctcgcaccgctgcagggactccttgacgatgctgccgtcgtcatccgcctccacgcccacgctgcccatctgattccgatctgattccagtcgctgaggtccgccggagctagctagagcctatagcttggcttcttgtttgcttcttccagcctgtacgcaaggctgcatatgacgagacgatgtctagtcagcacggaccagactatgactggaggacctcacctattgatcctcaggttgtgtatgcaagtggtggaaaaggtcatggaaggtacacaatatttgctaacgtcaacgactcgatccaggtgagagttcagtgtggaggttcgtcgagatctgctgctcgtagctcccgtcgctccaatcaagatctagtagaagtggcgcaactgcaagaagaacttaggcgacatcaggattacttgagacaataagctgcgcaacatgaatactatgctacacagattcaacaacaacaaacactcatacaacaactagcacaggcccaagggatacatgtcccggtgtccccaccaccaccaccaccacctcccgtacattattcttggtcttcacatccacctacacctacatctccacctaccgaacatcagacccctccagctacctttccgacacatgaacgagaagacgggttagactttgtcaaaaccctcttcgctagtggaggtatcgaccatcactcatcactgtaccccaatggtgatcgacgatcgtgagcttccatgttatgtgttgtaatacttgagacttttattatgactatgtatgagatattgtctcttataatgactggatgagatgtgtcttattatgactatggatgagacttttgtgatgtaattgatgagactatggatttaaatatcgttatgtgattgtgtgtgagttgatttatgtgaaaatatgttgtgctatatagctgttgatatatttgttatgttgtggaatatggtgtaaaataaaaataaacaacatttgtaatgctggtcaaattaacttcctagaggccaactgggccgtaggaagttagtcagctaacttcctaggggctacagtcagccgtaggaagttagtcgtaggaagttagtcacctgacggtgctgacggcgtgaagctactaacttccgagaacctactaacttccgag

SEQ ID NO: 209791 - DNA, 2915 bp, Zea Mays
ccgcagtttcggtctccgctccactcagctgcaaattccattcttctccggcaccggccatgccaccaacataaaattcgcgatcttggcaggcgcatccatcgaagcacctttctgctctagagcttcagagacaacagacaactaactagcttcctcttccagttcccgactctcccgtcagtctgcccgagaatcaatgactaaccgcaaatacactaaaggcagaaggcacgagctagcacacagtcctctgctgaggactgaggttgactccagctaccgcgctcagtgactgtgactgaccggcgataaagcagtagcagactagcagtagaccagctgctcaatcagaggaaagcttccacaccaccagcccaccaccatgctgagcacaacgtgggcatcgccgaaggcgacccccatcccctcgtctccggcctctcagacggcgacccggctccatcccgcctccagcagcaaccgaacgctccgccttgtcgcgcttccctccccgtccgcgccgcggcggaggcggaggcccggccttcctcctcctgcgcgcgcggggctcgtcgccaccgcggcaatgccggcgccggagcccaaggcgcgggtcctggtggccggcggcggcatcggcggcctggccttcgcgctcgccgccaagcgcaaggggttcgaggtgctggtgctggagcgggacatgagcgcggtccgcggggaagggaggtaccgcggcccgatccagctgcagagcaacgcgctcgccgcgctcgaggccgtcgacgccgccgcggccgacgagatcatggacagcggctgcgtcacgggggaccgcgtcaacggcatcgtcgacggcgtttctggctcctgctgagcgggggctcccagtcacaagggtcattagccgcatgacactgcaacaaatccttgctcgagcagtcggcgatgatgcaatattgaatggaagccatgtagtcgattttatagatgatggcagtaaggttactgccatattggaggatggtagaaaatttgaaggtgaccttttggttggcgccgatggaatatggtcaaaggtgaggaagacactattcgggcattcggatgccacctattcaggttacacttgctacactggaattgcagattttgtgccacctgatatcgatacagttgggtaccgagtatttcttggccacaaacagtacttcgtctcttcggatgtcggtgctggtaaaatgcaatggtacgcttttcacaatgaagaggctggtggcactgaccctgaaaatgaagcagttcttcgccgagatatatacgaccgcccacctactatgaattgggggaaaggtcgtgtcaccttgcttggtgattctgtccatgctatgcagccaaatctgggccaaggtggctgcatggctattgaggatggttaccagctggctgtagagctagagaatgcctggcaagagagtgtcaaaactgaaactcctatagacatagtttcctccttgaggcgctacgagaaagagagaaggctgcgtgttgctattatacatggactggcaagaatggcagcaatcatggctaccacctatagaccgtacttgggtgttggtctagggcctttatcgtttttgaccaagttgcggataccacaccctggaagagtcggtggcagattcttcatcaagtatggaatgcctacgatgttgagctgggtgcttggtggcaacagctcaaaactagaaggaagacttttaagctgccgactttctgacaaggcaaatgaccagctttatcaatggtttgaggatgatgacgcactggaagaagctatgggtggagaatggtacctcatcgcaacaagtgaaggaaactgcaatagcttgcagcccattcatttaattagggatgagcagaggtcactctttgttggaagccggtcagatcctaatgattcagcttcttccctatcattgtcctctccacagatatcagaaagacatgctactatcacatgcaagaataaagctttctatctgactgatctcggaagcgaacatggtacctggattaccgacaatgaaggtagacgttaccgcgtgccaccaaacttcccagttcgtttccatccctccgatgtcattgagtttggttccgataagaaggctatgttccgggtgaaggtgctgaacacgctcccgtatgaatctgcaagaagtgggaatcggcagcaacagcaagtccttcaggcagcatgaatggagacactggctaccaccactatcatcagccacactgtactgtacagcatccggtaaagacacaacactgcatcacggaaaggatacactcgttctcgaatatttgtcgtctgctagttcaattttaaactaaaacgtgacaaatgaaaaaacgaaggaagtagaagatatgtcaaaacacatgcaatttttgcatccatgaagatgccaaacaggatcttgaatactagcacctagcggattgaaataatgaagttgcagttctgcgtgaactggattgtacgatagggatagacaatttagctgttgtcggactgtgtacatcgttgtaccatcaccggaaatattgtacaccgagaagccatattgtaattacggcatgagaacagtaacactttgatcatgtaatacagtatatagttgtttagcaattagctgagtcagataagatatgatttgttcttccacaagtgccagctcctcgaactgttgaaatttccttaaaatttctgcaggaattgaaaaacttgttcctataaaattatttcatgatccaattaaaaattttactatattatgttggatttaattgggcctagcccattttgaattagtaattaaataaaaaaaataaaaccatag

SEQ ID NO: 209792 - DNA, 3013 bp, Zea Mays
ccgcagtttcggtctccgctccactcagctgcaaattccattcttctccggcaccggccatgccaccaacataaaattcgcgatcttggcaggcgcatccatcgaagcacctttctgctctagagcttcagagacaacagacaactaactagcttcctcttccagttcccgactctcccgtcagtctgcccgagaatcaatgactaaccgcaaatacactaaaggcagaaggcacgagctagcacacagtcctctgctgaggactgaggttgactccagctaccgcgctcagtgactgtgactgaccggcgataaagcagtagcagactagcagtagaccagctgctcaatcagaggaaagcttccacaccaccagcccaccaccatgctgagcacaacgtgggcatcgccgaaggcgacccccatcccctcgtctccggcctctcagacggcgacccggctccatcccgcctccagcagcaaccgaacgctccgccttgtcgcgcttccctccccgtccgcgccgcggcggaggcggaggcccggccttcctcctcctgcgcgcgcggggctcgtcgccaccgcggcaatgccggcgccggagcccaaggcgcgggtcctggtggccggcggcggcatcggcggcctggccttcgcgctcgccgccaagcgcaaggggttcgaggtgctggtgctggagcgggacatgagcgcggtccgcggggaagggaggtaccgcggcccgatccagctgcagagcaacgcgctcgccgcgctcgaggccgtcgacgccgccgcggccgacgagatcatggacagcggctgcgtcacgggggaccgcgtcaacggcatcgtcgacggcgtttctggctcctggtacatcaagtttgatacgtttactcctgcagctgagcgggggctcccagtcacaagggtcattagccgcatgacactgcaacaaatccttgctcgagcagtcggcgatgatgcaatattgaatggaagccatgtagtcgattttatagatgatggcagtaaggttactgccatattggaggatggtagaaaatttgaaggtgaccttttggttggcgccgatggaatatggtcaaaggtgaggaagacactattcgggcattcggatgccacctattcaggttacacttgctacactggaattgcagattttgtgccacctgatatcgatacagttgggtaccgagtatttcttggccacaaacagtacttcgtctcttcggatgtcggtgctggtaaaatgcaatggtacgcttttcacaatgaagaggctggtggcactgaccctgaaaatggcaaaaagaaaaaattgcttgagatattcgacggatggtgtgataatgttattgatttgataaatgcaactgatgaagaagcagttcttcgccgagatatatacgaccgcccacctactatgaattgggggaaaggtcgtgtcaccttgcttggtgattctgtccatgctatgcagccaaatctgggccaaggtggctgcatggctattgaggatggttaccagctggctgtagagctagagaatgcctggcaagagagtgtcaaaactgaaactcctatagacatagtttcctccttgaggcgctacgagaaagagagaaggctgcgtgttgctattatacatggactggcaagaatggcagcaatcatggctaccacctatagaccgtacttgggtgttggtctagggcctttatcgtttttgaccaagttgcggataccacaccctggaagagtcggtggcagattcttcatcaagtatggaatgcctacgatgttgagctgggtgcttggtggcaacagctcaaaactagaaggaagacttttaagctgccgactttctgacaagctttatcaatggtttgaggatgatgacgcactggaagaagctatgggtggagaatggtacctcatcgcaacaagtgaaggaaactgcaatagcttgcagcccattcatttaattagggatgagcagaggtcactctttgttggaagccggtcagatcctaatgattcagcttcttccctatcattgtcctctccacagatatcagaaagacatgctactatcacatgcaagaataaagctttctatctgactgatctcggaagcgaacatggtacctggattaccgacaatgaaggtagacgttaccgcgtgccaccaaacttcccagttcgtttccatccctccgatgtcattgagtttggttccgataagaaggctatgttccgggtgaaggtgctgaacacgctcccgtatgaatctgcaagaagtgggaatcggcagcaacagcaagtccttcaggcagcatgaatggagacactggctaccaccactatcatcagccacactgtactgtacagcatccggtaaagacacaacactgcatcacggaaaggatacactcgttctcgaatatttgtcgtctgctagttcaattttaaactaaaacgtgacaaatgaaaaaacgaaggaagtagaagatatgtcaaaacacatgcaatttttgcatccatgaagatgccaaacaggatcttgaatactagcacctagcggattgaaataatgaagttgcagttctgcgtgaactggattgtacgatagggatagacaatttagctgttgtcggactgtgtacatcgttgtaccatcaccggaaatattgtacaccgagaagccatattgtaattacggcatgagaacagtaacactttgatcatgtaatacagtatatagttgtttagcaattagctgagtcagataagatatgatttgttcttccacaagtgccagctcctcgaactgttgaaatttccttaaaatttctgcaggaattgaaaaacttgttcctataaaattatttcatgatccaattaaaaattttactatattatgttggatttaattgggcctagcccattttgaattagtaattaaataaaaaaaataaaaccatag

SEQ ID NO: 209793 - DNA, 1425 bp, Zea Mays
atttttttaaataaaaaaaaacatgaggtgttttcccccaaacaccgctccacctccttcctcctcgttgcgctccggatccatccccattccccagtcgccgcccaagtcaaaaggagggaagcttcttccactacagtccttgaggccgcccatcaacgactagacgctggtcaagctgcaccaaccctagccccataaccctaggtccctcctccacgcccccttccagagaggcgaggaaggaggcgaaaggaaccatggattcctccggcggcggcggtggagcgcagatcaagggtatggcgacgcacgggggccgctacgtgctgtacaacgtgtacggaaacctcttcgaggtctcctccaagtacgccccacccatccgccccatcggtcgcggcgcctacggcattgtctgcgcggctgtcaactcgcagtcaggggaggaggttgcgatcaagaaggttggcaatgcgttcgacaaccacatcgacgccaagcggacgctcagggaaatcaagctgctgcgccacatggaccatgagaacatccttgccttaaaggatgtaattcggcccccaactagagagaactttaatgacgtgtacattgttactgagttaatggatacagatctccatcagatcgtacgctcaaatcagccattgactgatgatcattgccagtacttcttgtatcagttgttacgagggctaaaatatgtgcactcagcaaatatattgcaccgcgatctgaagccgagcaatttgttcctaaatgcaaattgtgacctcaagattgcagactttgggcttgcaaggaccacttcagagacagatctcatgacagagtatgtggtcactcgttggtaccgggcaccagagctgctgttgaactgttcacagtatactgctgccattgatgtctggtcagttggatgcatactaggtgaaatcgttactcgtcaacccctgtttcctggacgggattacatccagcaattaaaattgatcactgagctcataggctctccagatgatgcaagcctgggatttcttcgaagtgataatgcaaaaagatacatgaaacaactaccacagtttccaagacaggacttccgcctgcgtttccgcaacatgtctcctggcgcagtcgatttgttggaaaggatgcttgtgtttgatccaagcagacggattacagttgatgaggctctgcatcatccatacttggcttcacttcatgagatcaatgatgaacctacctgccctgcacctttcagctttgattttgagcaaccatcctttacagaagcgcatataaaagaactcatctggagggaatctttagcatttaacccagagcctccctactaatatcaaaagatgaaggcggtttgtcacagcaatctagatactgcat

SEQ ID NO: 209794 - DNA, 1086 bp, Zea Mays
acaggcccaaaacgcctccaagccgtccaagggtactcgagctcgagctacactcggcgtttacggcgccggcgatcacccaccgcgtcctccgccttgtcctctttcctcaacctaacccccatccagcgaggtttctccgctctcatatagaatcagatatgaagagggcggcgccgtctcaggagcccctcgacgtttcttccggggactcctcgggctcggattccgatcaattaggcggcaaggataagggcgggagcgcctctaaagctgctgcaggggctgaagatgtgaagagggtggtgctgcataaggaatcccaggacgtatcttctgatgatgaccttagctcggattctgatgatgatgctgggaaggggaatgcttggaatgcctttgggctgcccaattcctccaaagctgcttcgacggcagaagctctgtgaacagcagccaggtcaaagaagaagaagaaaaccggtgtggatttcagcgctctgagccggcacggataccatggcggcccatccgtcttgacagttcgtccggcagcggaggaaccgaactggtcctggtccactgggaaagaccgcgacggcaaagaggacgcacacgcacccgagtcctacgaggaacgcgagcgtaccagggccgcagtaaccgaaggggagaagttcatcgggctgcagaacgcgccgccgaaccagctgttgctggagaaagacaggaaggagaaggacgcctccttctcgcagaaagagaagcggaagagggaccggggccaagccagcagggggaagaactacgtcgaggaggagaagcggctcctgaggggcagcggcgtgtactctggctttgacacttagcaaataccaagagctctagcatgtgtgcataccgagggttagctgcctttcatcgtgtgctttggctgtgtttatttgggctttggatgtagctatgcattgcgttcaaatagtaccgctgccatattctgtgtgccatgtcttgctgcattcgcgagttgccattgatataaaaaaaattggaacttcaaatatcttatgaacatatttgcttcaa

SEQ ID NO: 209795 - DNA, 1772 bp, Zea Mays
cacgccgcactcacacatgcatccataaaccctcagcagagccttgtgtcgcgtcctctcctcgataacccaggccacatcgtccttccgcgccgcgccgccggcgacctaacaacccagaggcctcagcaccgcacgcttgcactgcaggggcaggccggtgaggtctgggagaggaggaggaggaggaggaggaggaggaggagatggccggtagggagagcggcgggatggcggcggcgctgcgctgcgctggaaggatcgggatcctggccaccgtcgcagtgaacctcgcgtggatcgcgacgtacatccgccggcgctacttcggcggcgggaaccgatccgacaacaacggtggcggcggggaggtggagccgtcaagagggaagccgccggtcacttcggactccatcgtcaacctcgatcatggcgacccgactatgtacgaggagttctggcgcggcacaggagatagcgcctcgatcttcatccctggttggcaaacaatgagctacttctccgacctcggcggcatctgttggttcctggagcctggattcgagcgcgaggtgcggcgtctccacaggctcgtggggaatgccgttgtagacgggtaccatgtgctcgtcgggacaggctccactcagctctttcaggccgtgctgtacgcgctctcacctgcaagtgacggcacacccatgaacgtcgtctcaccggcaccgtactactcgtcttacccatctgtgaccaactatctaaactctgcgctctaccgttgggctggtgatgccaatacatttgatggcgacacatgtattgagctcgtctgctccccaaacaaccctgatggtggcctccggaagcctgtcatcaaatccaagtctagcaagcctgtttatgacttcgcctactactggccgcagtacacacccatcaccgaggcagctgcccatgacatcatgctgttcaccgtctccaaatgcaccggccatgccggcaccaggctggggtgggcattggtgaaggatactaaggtggctcagaagatgatcaagtttatagagctcaacacaatcggtgtatccaaggactctcaacttcgtgccgctaagattatcggggcaatatgtaatggctatgagccggtaccatcctctggtaaaacaagccaactcttccatttcgccaaggaaaaaatggcggctcgctgggctagacttcgtgcagctgtggcagcctcagacatctttactctcccttatgagctatctggctattgtagcttttccaatgagactgtcaccgccaatcctccatttgcatggcttcgctacaacaaggatgatattgaagatctggaggccttcctactcgagaaaaagattatcactcgaggtggcacaaggtttggagtggatgcaagggctgtcagagttagtatggttgacacagaccaagccttcaatgtgttcatcaatcgtctggccacaatgaagtgaaatttcagtgcaaattaataaagcactttgtggctactacaaggatgaccgcgttctagatggaacaatcgatgctttggaaagcttaataatgttttatgttgttgaataattccgtgtgttttcgggtatgttgtgtaatactcaatgtcaaatcctatgcttaatcgatgttgtggtccatcctgttatcagcatggccaattatatatggatgaccgtcactgctcagtctttactcctaattacatggcaagtgtttaatggtgc

SEQ ID NO: 209796 - DNA, 1803 bp, Zea Mays
tctgcctagctacggcgtgtcggttgcttgtctcaccaaagcagcgacatggaagcctgacagctcgtcgcgtcgcgccatttccacccaacaaagcggcggcgccagcacgcactgcttctgcttgtgcgtgctcctccgttccgggcacgcctctaaagtctatacagcctcgaatccatcccggccgccgctcctgggggatactacagcgagccgaagcggggatggcggagatccctgtgatcgacctgcgcgccgccgtgcgcgcgctcttcgacctccccgacgacgccaagcgccgcaacgccgacgtcatcaccggcagcggctacgtcgcccccagcccgaccaacccgctctacgaggccttcgggctcctcgacgccgccgtgcccaccgacgtcgacgccttttgcgcgctcctcgacgcgccgcccaacatcagggagaccgtcaaggcctacgcggagaagatgcacgatgtgatcgttggcgtcgcccgcgagctggcgtctagcctggggctagtcgaggagcactcgttccaggactggccgtgccagttccgcatcaacaggtacaactacacgcgggagacggtgggctcctccggcgtgcagacccacacggactcgggcttcctcaccgtgctccatgaggacgagtgtgtcggcggcctcgaggtcctggacccgggcaccggcgagttcgtgcccgtggaccccgtcgcgggctcctttctcgtaaacatcggcgacgtcggcacggcgtggagcaacgggaggctgcacaacgtgaagcaccgggtgcggtgcgtcgcacccgtgccgcgcatctccatcgccatgttcctgctcgcacccaaggacgacagcgtgagcgcaccggcggcgttcgtggacgcggaccacccgcgcaggtacaaggtgttcaactacaacgactatcggaggctcagactgtccaccggcgagcacgcaggcgaggcgctcgcacggatggcggcgtgacgtggctggagctgcaaattggattggaagccgagacaagccgttagttatttaccatgcccgtgcgttcaccgcacacaatcatattcaaaagccataaaataaaaaataattttaatatcagtcaacatatggtttaaatatcatatggagtacaatattccgaatttttttttgtaatttagtctgtcttttgaaaaaaatgcacatctagacctccggatgacttaatgtcgtttttggactcttttctcggcgccatagtatacggcgccgaggtacctagtacactggactctttttgctgagctggcatctacgtggctgagttggcatctacgtggccgagctcaaacaattgctacacacgctgtctcgctctgactttgactctgcgcgcggcgcgtccttgtgaagagttgaagacaaaagcttggcacatgcactgcacgtataaaacaaaaagatacaggatgggggttgagtgaaagacgtaacttttttcctccttcgaaggccacacaggaagtgtccgtgagaccgtgacgtgctctcttgtagagagtgtactgccacagtggacgaggtgacatgaggcgatgtactgcacagtggacgaggtgacatgaggcgctgttgttgtactatatagctagccgcgcaatcccaattccaattccatagctgcgctccgcgtctggctcagatgcacggaccctcgaccaaaactcaaagctgagctccggccacgtagatgccagctcagcaaaatgagtccagcgtactaagt

SEQ ID NO: 209797 - DNA, 1850 bp, Zea Mays
ctttttgaacgtaactgacagaagctatctgcctagctacggcgtgtcggttgcttgtctcaccaaagcagcgacatggaagcctgacagctcgtcgcgtcgcgccatttccacccaacaaagcggcggcgccagcacgcactgcttctgcttgtgcgtgctcctccgttccgggcacgcctctaaagtctatacagcctcgaatccatcccggccgccgctcctgggggatactacagcgagccgaagcggggatggcggagatccctgtgatcgacctgcgcgccgccgtgcgcgcgctcttcgacctccccgacgacgccaagcgccgcaacgccgacgtcatcaccggcagcggctacgtcgcccccagcccgaccaacccgctctacgaggccttcgggctcctcgacgccgccgtgcccaccgacgtcgacgccttttgcgcgctcctcgacgcgccgcccaacatcagggagaccgtcaaggcctacgcggagaagatgcacgatgtgatcgttggcgtcgcccgcgagctggcgtctagcctggggctagtcgaggagcactcgttccaggactggccgtgccagttccgcatcaacaggtacaactacacgcgggagacggtgggctcctccggcgtgcagacccacacggactcgggcttcctcaccgtgctccatgaggacgagtgtgtcggcggcctcgaggtcctggacccgggcaccggcgagttcgtgcccgtggaccccgtcgcgggctcctttctcgtaaacatcggcgacgtcggcacggcgtggagcaacgggaggctgcacaacgtgaagcaccgggtgcggtgcgtcgcacccgtgccgcgcatctccatcgccatgttcctgctcgcacccaaggacgacagcgtgagcgcaccggcggcgttcgtggacgcggaccacccgcgcaggtacaaggtgttcaactacaacgactatcggaggctcagactgtccaccggcgagcacgcaggcgaggcgctcgcacggatggcggcgtgacgtggctggagctgcaaattggattggaagccgagacaagccgttagttatttaccatgcccgtgcgttcaccgcacacaatcatattcaaaagccataaaataaaaaataattttaatatcagtcaacatatggtttaaatatcatatggagtacaatattccgaatttttttttgtaatttagtctgtcttttgaaaaaaatgcacatctagacctccggatgacttaatgtcgtttttggactcttttctcggcgccatagtatacggcgccgaggtacctagtacactggactctttttgctgagctggcatctacgtggctgagttggcatctacgtggccgagctcaaacaattgctacacacgctgtctcgctctgactttgactctgcgcgcggcgcgtccttgtgaagagttgaagacaaaagcttggcacatgcactgcacgtataaaacaaaaagatacaggatgggggttgagtgaaagacgtaacttttttcctccttcgaaggccacacagggtatacactagagattttcaaagtgtccgtgagaccgtgacgtgctctcttgtagagagtgtactgccacagtggacgaggtgacatgaggcgatgtactgcacagtggacgaggtgacatgaggcgctgttgttgtactatatagctagccgcgcaatcccaattccaattccatagctgcgctccgcgtctggctcagatgcacggaccctcgaccaaaactcaaagctgagctccggccacgtagatgccagctcagcaaaatgagtccagcgtactaagt

SEQ ID NO: 209798 - DNA, 1777 bp, Zea Mays
cactgctctctgaatttctgctccctagctagctagctctccagtctccactgctgaaaggcgtccgtcgtcgtcgagatgaggcccgcccgcccgccgacgatggagatgcaaccaccaccgacggccatgcaaggccggagaagcccgcgaccgctggaggagtcgatcgagagctggcttcccatcagctccagcaggaacgccaagtggtggtactccgctttccacaatgtcacggccatggtcggcgccggcgtgctcagcctcccctacgccatgtcccagctcggctgggaggtcggcgtcacggtgctggttctgttgtgggccatcacgctctacacgctgtggcagatggtggagatgcacgagtgcgtcccggggaagcggttcgaccggtaccacgagctcgggcagcacgcgttcggcgagcgcctgggcctctggatcgtcgtgccgcagcagctggtggtggaggtgggcgtcaacatcgtctacatggtcaccggcggcacgtcgctgaagaagttccacgacacggtctgcggcgacagctgcacggacatcaagctcacctatttcatcatgatcttcgcctcctgccacttcgtcctctcccagctccccagcttccactccatctccggcgtctccctcgccgccgccgtcatgtcgctttgctactcgacgatcgcgtgggtcgcctcggcgcacaaggggaggtcgccggacgtgcactacggcctgcgcgcgacgacggcgccggggaaggtgttcggcttcttcggcgcgctgggggacgtggcgttcgcgtacgcggggcacaacgtggtgctggagatccaggccaccatcccgtccacgccggagaggccgtccaagaagcccatgtggaagggcgccatcgtcgcctacgccatcgtcgccgcgtgctacttccctgcctcgctcgtcggctactgggccttcggcaaccaggtcaacgacaacgtcctcgtcagcctcagcaaacccaagtggctcatcgccctcgccaacatgatggtcgttgttcatgtcattggaagctaccagatatttgcgatgccagtgtttgacatgatagaggcagtactggtgatgaagtttcggttccgtccaagcctgatgctccgcctcatttcccggagtgcatatggtttacaatgttcatagccatcaccttccctttctttggtgcattgctcagcttctttggtggatttgcctttgcaccaacgacatattttcttccttgcatcatgtggctcagaatatacaagcccaaaacttttagtgtttcatggtttaccaattggatctgtattgttctaggagtgatgttgatggtactatcaccgattggtggacttcgacagatcatctttaatgctaagacatacaacttctaccagtaaatataattcattcaacacaaaaccaaggtttatgccatagttaaaatgtgctcgacatgtctcaagttttgaatggggcttattgtttttcttcgacatggcagaaaattcatatcgtgtgatgtatttagtatataatgttacagttatccaagttttcatcgtgcaataagatggcatgtgtcatattcaaagcttgttgctactcaagacaatctgtgatgtgtcatggtcccgttaataatggcttaacctagaagtttgcttttgatttatcatgtgcatatatattgtttgtctatattatatataggttgcttatttgcatgttattagga

SEQ ID NO: 209799 - DNA, 3304 bp, Zea Mays
cacaccagcgaggagagaagccgcccgcgaagagagagagagagagagagggcgagaggggcggaggagagagaaacccctagtctccagccgcctcgcctccccccatcgccgcctcagcctccgcctcggcgcggggcgaggaggaggaggagagaggaagccctagaaggttcgcgccgcggacggcggcgcttgcgcctgcgccaggccacgagatctcgtggcagcgccgccggctggtgtatcggggtgcagcggctggcgggcgctgggcggtgctggttctcggtgagtccgctcgatcccctcgccgcgggagctttcgctcgagcttccccgccccctcgaatcgagggttctggttagggggtcgcctcctgctcccccggcgaccgcggaataagctagccccccctctcgtgtctcgcctcgggggggcttagggttaggttcttatccggaattgcgggcgaaattccacggccaaggcggcgcattgctacccgggaggaggaggctacgcagtgtgtctccgcagccgcagccagcaatgatggggaagacgaataggttctccaagggccaccagctcggcttcgtgcctgactaccggcatggcgtggaggctatgggggagtccaaggggctcgggagccccccgaggatcgactcggggagctcctgcgcgccgcccaagaggaagtgcgtcagtgtgaattcagaggagggggaaggcgcctcggggttcagcatgcctcgggcccgggaggtgttctcgctgcccaggatgactcgtctggacaagaaggacctagagatgaagctccgccatgagcttgcacaggtgagggacgtccagagtaggctgtttctgagagggtctgcggtcagcatgaatggtgcagcggtcgcgtcggtccccgcaggcgatgtgcaacccaagaaaaaggttgagaagctcaagcggagcgattcggtgcaaacggacaggggagcgccgccaccagcggccacggtcgtcgccgcacctgttgctagctctgttaactacacatcatcgtttaaacaatgtgccaaccttctcaagtccattatgagccatgtatgggcaggcccgtttcttgttccggttgatattgtgaagttgaacatacctgactatttccaaatagtcaagcagcccatggatttgggtacgatccagaaaaagttgaaggcagggatgtactctacacctcgggaatttgcagctgatgtgaggctcactttcagcaatgccatgaattataacccagtcaataatgatgttcatttaatggccaaaactttgagcaagaactttgaaactcgatggaagcttattgagaagaagctccctaaaccagacgataagcctcaaccagttgagaagcctcctgtgagggagcctacagaaaagaattcaactaagggagttgccgttgagaaagaagacatcaccaagaaaaaaccctcaaagaagagtgtacctaagcaagacatatttcaggaaggatattcagcggacaatccagttttgcaaccaaagaaaaggaaaacatctcctttgatacaagatgcttctttggtagaggatgttgttccaaccggaaagagaatgatgacgagtgagcaaaaatatgatattagtgcaagattacaatcatttggtgcattcattccagaccatgtagttgagttcataaggagtcgcgttgatgattgcgatgctgatgaagaggaaatggagcttgatattgatgttcttggagatgatactctttttgaattacagcagctacttgatgactatgacagggttaatccgtcgagaaaccttacaaaagaggaccctcacgaagctgagtctcggagtcaatatgaactcatcaatccatcagtgtgtaacgatggcaatgagctcattgacgaggatgttgatattggggagaatgaccccccaattttggctcttcctcctgtggtacttgaagatgaaacagcagacagaaacagcaagcatagtacatccagcagttctagtagtgactcagaatcatcctctagtgactcagattcaagtagctcttctggaagtgatgccgatgccaaagctcctcaacaaaacagcgggtcaaaggaaaaagttctacctgtcgatggcgtggatcaggaaaaggattcactgagcacattaaatttaccagagcaaagtacaaaccctatatctgtttctgctgatggtgaggggggaaatgtatctgagaagcaggtctcccctgacaagcaaatacgagctgcccttctgagaagccgctttgctgatacgatccttaaggctcgtgaaaaggcccttgatcagactacaaagaaggaccccgagaagcttcgacgcgaaagggaggaacttgagagggtacaaagagaagagagagctcggttgcaagctgaggctaaagctgcagaggacgttcgcaagagggctgaagcagcagcagctgctgaggctgctgctgaagctaagcgacaaagagaacttgagagagaagcagctcgcaaagctttgcaagaggtgaacagatacccaacttggttggtgaaacaagtcctgggtttcaaatgggaagcaacacactagaaaagctcgggctgtacatgaaaaacgatgaggatgatgaggatggtgatttcacagatgaaccagtggctgatgttgaagagggagaaatagattaactgtgtttctggaccatttttgatacgttacaggagacctgttggcatgactgatctgcatagctttcctttggtatacaaagtgacctgacgaaagatcgtgtcgcatcgaacctgaaggtctggtattcatttttgtaactgcctaagttttggagccaagttggcaaatgacagcgagcctcagacatgttggaagttcgtcgtgctgcatgtgaggagagcatcgagcgtgcgtatcgtttggattgagaattctctctggactttccatatccatacaatggaacggcgagtttattgcatatatgatgaggccataaaaggggagagggttggaggagggaccacaaggagtgatggtgatggttcttggctcttgcacaggtgcgagccgtttttgaggggtagttttagagccatttccgtgttgtgaatgtaacatcggaaactgtacaaaagttagcctgatagatggaaaacattgacttgaatttatgcagtgcctgttcttcatcgatcacttttttacgtacttgttttcatg

SEQ ID NO: 209800 - DNA, 1285 bp, Zea Mays
cgccattccataggcttccaaatgaggcctttcaggacccttgtgacctaccatgggaacttgagcatgctcatagtgaagaaagaagaccagaggtttgtgggagtatcgaaggtggtggtgattttgtagcgtggtgttgcagtttggttggaacttggagtgtagagggaagatttggtgatgagcagccgcagcccgccgccgaaggaccgcaggatgcgtactgaacgcacctcataccgtggcgcaccatatcggagggacagccgccatggtccaagcaggtttcggaatgatttgtgcaacaattgtaagcgtcctgggcattttgctagagagtgtcctagcgtggctgtctgtcatacctgcgggcttcctgggcacattgcagctgaatgttcttccaaaggtacctgctggaactgcaaagagcctggccacatggctaacagctgcccaaatgaagggatatgccgtaactgtggcaagtccggacatattgcaagagactgcactgctccaccagtgccgccaggagaagtgatcctttgcagcaactgctacaagccagggcattttcgtgaggaatgcaccaatgagaaggcctgcaacaattgccggcagagtggccatattgcccgtaactgcaccaatgatcctgtttgcaacctgtgcaatgttgctggccacctggcccgtcagtgccccaagtctgatacattgggcgagaggggtgggcctcctcccttccatggtgttggcgctcccttccgtggtgttggcgttcccttccgtggtggcctcagtgacgtgatctgccgggcctgcaaccagattggccatgcgagtcgtgactgcatggctggtgctttcatgatctgccacaactgtggcggccgtggccacacggcatatgagtgtccctctgtgagtctcattgagaggttcccacctcgccgtttctgaaggacgtccaagggctatccagatgactgttgttttcagcccattgtgtcaagaacactcatttccgttttcttttttttttccaaaccctaatggattctagatctttcagattcttaacttgtcagcactatttgtgattccctaatggattctagatatttcagattaataactcgtcagcaccatttataattctggattttctacttgactcagatgttctgttgatgataatgtttgaagacatatggtacttgtcgttatgaactcaaattcatctcgtgagttttaacaccattcgaactggaacatc

SEQ ID NO: 209801 - DNA, 1633 bp, Zea Mays
tctgagtatttggctcatggctgagtttggttggaacttggagtgtagagggaagatttggtgatgagcagccgcagcccgccgccgaaggaccgcaggatgcgtactgaacgcacctcataccgtggcgcaccatatcggagggacagccgccatggtccaagcaggtttgagctaatctaagtcaaacaggacgagtgtttggcattgttcttccaaacatcactgcttcctcttgttatcatgtatatatttggctaaatgctatgtgaaattaccataattgttattttatttagatgtaaactttgcctatatttatcccattgcaaccacttatgcatgtatgtagcttaaataagggcacttgatattggttaatgtagcactatttttttttctgaaagtctagtaaaaagtgtatggtaaagtgatctgggattgaaattttttggatgaattcatgttgtgccatggttttaggagaaagcctatgcaggattgtaactagaaatgagtcatgacaagaatggtgaaattacttaaaaatttatgtgaatggaactgtaatatcttattattcagacatttggaatcttatgtatcctttagttatttccctttccattgtgcaggtttcggaatgatttgtgcaacaattgtaagcgtcctgggcattttgctagagagtgtcctagcgtggctgtctgtcatacctgcgggcttcctgggcacattgcagctgaatgttcttccaaaggtacctgctggaactgcaaagagcctggccacatggctaacagctgcccaaatgaagggatatgccgtaactgtggcaagtccggacatattgcaagagactgcactgctccaccagtgccgccaggagaagtgatcctttgcagcaactgctacaagccagggcattttcgtgaggaatgcaccaatgagaaggcctgcaacaattgccggcagagtggccatattgcccgtaactgcaccaatgatcctgtttgcaacctgtgcaatgttgctggccacctggcccgtcagtgccccaagtctgatacattgggcgagaggggtgggcctcctcccttccatggtgttggcgctcccttccgtggtgttggcgttcccttccgtggtggcctcagtgacgtgatctgccgggcctgcaaccagattggccatgcgagtcgtgactgcatggctggtgctttcatgatctgccacaactgtggcggccgtggccacacggcatatgagtgtccctctgtgagtctcattgagaggttcccacctcgccgtttctgaaggacgtccaagggctatccagatgactgttgttttcagcccattgtgtcaagaacactcatttccgttttcttttttttttccaaaccctaatggattctagatctttcagattcttaacttgtcagcactatttgtgattccctaatggattctagatatttcagattaataactcgtcagcaccatttataattctggattttctacttgactcagatgttctgttgatgataatgtttgaagacatatggtacttgtcgttatgaactcaaattcatctcgtgagttttaacaccattcgaactggaacatc

SEQ ID NO: 209802 - DNA, 1902 bp, Zea Mays
aaattgcaatgacgtggctgcccagttttgcctgcaaacttgtagacaatctaggctgtactgattaatttccacatttttactaatggtcagatgcctgatttctatcttctcttcaaaaagatactgtatccatctttttgcttgtttttttttcctgtattaagatgctcagctttacatgctcatgaactaacagtgaagattattatctgaaaacatactatatttcaggtgggcacctgaaatataacaactctctaatttccgcaaccattttttgtgccctcttagatctcaaatatatgtagctgcgccactttttctttgtttgtcagaatatacatggttactgacatcacagcattttttttgcgcattgccaaagtacataaacaaggtcaagattggatttctggagacagtacttaccgtttgaacatagtcgaaggaaagatgcagtacctatttgatgaggatggccgtcgttacctggatgctttcggtggcattgcaacagtttgttgtgggcactgccatccagatgttgttgaagccatagtaaaccaggcaaagcggatccagcactccacagttctatatctcaatcatgcaattgcagattttgccgaggcattggcttccaaaatgcctggtgatctgaaggttgttttcttcacaaattcaggcacggaggcaaatgagcttgcactgatgattgcacggctttacactggttgcaatgacattatctctcttaggaatggataccatgggaatgctgctggaacaatgggtgctactgctcaatccaattggaaattcaatgttgttcagacgggagtacaccatgcgcttaatccagaccccttcagaggtgcttttggttctgacggggagaaatacgccagagatgttcaggaaatcatcgaatttggaactacagggagagttggtgggttcatttcggaagccatacagggggttggtggaatagtggaactggcaccaggatacttgcccgtggcatacagtatggtaaggaaagccggtgggctctgcatcgccgacgaagttcaggcaggagtcgcgagaactggaagccacttctggggattcgaagggcatggtgtcatcccggacatagtcaccatggccaagggtatcgggaatggcatacccataggagctgtagtaacgacgccagagatcgctcaggcgggcatgcggtgctcaaagtgctggagaaggagaagctccaggagaatgcgtttgttgtgggctcctacctaaaggaacagcttaacaatctgaaagacaagcatgagatcatcggtgacgttaggggcaaaggcttccttcttggagttgagctggtgacagaccatgaaaagaaaaccccagccaaagctgagatctcacgtgtcatgaaccatatgaaagatatgggagtgttggttggtaagggtggtttctacgggaacgtttttaggataacaccaccgttgtgcttcaccaaagaggattccgacttcttcattgaggtgatggacattgcgctctcgaagctgtgaggcaagcagggcgaagatgatgtgcaaaccctggtccgtcgccatgggatttttgcccatgaataatattaagattaatgagacagcacctcgttgtctcttaatctaagacgatgccatgtcatccggtggcatggtattcctaatcctacctgccaaatcactggtattgctcgctgtctcgtaatcagacccatggagcaatatgattcttgtaaactctagcttcatccaatctgttcctcctgatctaactagtctgaatagcagctgttcgtttgtgaccaatatcaacttcttttcagatgctccatatattcctgctctc

SEQ ID NO: 209803 - DNA, 393 bp, Zea Mays
acgcagcctgcagtgcctgagctaccaagaatttcagagcaaggtcaccagaatgccttacaaaagacgacttcgacattggagggtctcattgcggacgattcacaccaccagccctcctctgcccacagcgaagatggagctgctaataatgggtctagggatatcagtggggattcttcatctgttgatttgaaaagcccagtcccactagggacacatgcagatgtcatggaagacgaaggatggatcacaattccatgcaaggcatttcctgaaagttggaacgacatatcagaaatggttcagttgcaagctctggaccgttccttcctttttccaggcgagcaggttcctatactggcgtgcctgtcagcttctaagcaagatgta

SEQ ID NO: 209804 - DNA, 2749 bp, Zea Mays
cttctaaacagctccacttgctttcaggtttcggctccgttccacacacttcccatccccggacgcccactccagtactccactacgcctctgatcccgtgccgagtgccgccatttcccgtgccccccaccgccgccccgccgccgacgcgatccccatcacgcgccgcccatggcgccccacctactcaccccaccagccctcaccgttacgggcgccgccgccccaggtcgcctcggcagcgccggatcggcggacccgcggacgcccaggccacgcgcgccgtggcccactttctgctcctcccccagcagagggcggcgggagctgaggaagaggaagggcttgagcgtcgcggcggcggcggaagtagcggagccgggtgggcccgctggggcgatgcggctcaacgagtacatggtcgctgtggaccggcccctcggcgtccgcttcgcgcttggtgtcgacggacgcgtcttcgtccattcccttagaaaagggggaaacgccgagaagtccaggatcatcatggtcggcgacacgcttaagaaggcaggcgccgacggcgaaggcctcgtcaccatcaaagacctaggtgacacggagactgcgctgagggacaagtcaggaccatgcagccttgtccttgagagaccatttgctccttttccaatccatcagttgcatcaaaatgaagattaccacattctatttaacagaggacgagctgctgtggcctcttggaacagtgctgtttggtctacaaagatgaacgaatcttctactggggatggaaaattaggttttgctgtattctccccaaggttgctaagttctcaaggatgggctcttctgtccaatgagaaaggtggactcaatcagagtagcactaaccttgccaatcgcgtaagtgagattgttggtttatattctgatgaagacgatgacaatgctgagtgggcacatggtagctttcctttggaagagtacattaaagcactagaccgtgctaaaggtgaactgtactataatcattcactgggtatgcagtacagcaagataacagaacaaatatttgttgggtcatgtatacaaacagagaaagatgtgaagatgttatcagaaactatgggtattactgctgttctgaatttccaaagtgaaagcgagcgcattaactggggaatcaattctgagataatcaacagttcctgtcgtgagaataacatcttgatggttaactatcctatacgagaggttgattcattggacctaagaaagaagcttcctttttgtgttggtcttctgttgcgtcttataaggaagaactaccgcatatatgtgacttgtaccactggatatgatagatcaccagcatgtgtgatatcatacttacactgggttcaagatacacctctccatattgctcacaagttcatcactggtttgcactcttgtagacctgacagagctgcaattgtttgggcaacttgggatcttattgctttagttgaaaatggaaggcatgatggtagtcccacacattcagtttgtttcatttggaacagtggtagggagggcgaggatgtagagttagttggagattttacaagtaactggaaagacaaaataaggtgcagccacaagggtggctcaagatatgaggctgaagttcgacttcgacatggaaagtactattacaaatttatagttgggggccaatggaggcattcgacttcgttgcctacagaaacagatgaacatgggaatgtcaacaatgtgatcagagttggcgacattgctcggattcgtcctgctccaagccagctacatataaaagacccatctgttgttaaggtcatagaaagggcgctaactgaggacgagcggtttttattggcgtttgcagcacgccgcatggcatttgcaatctgcccaatcagactgtccccaaagcagtagacgtgtcggtcgtccttctccgagcggaaccaggcgtcatcgaggatcagcgattttcgaagctacagaaaactcatgtatgtaacaacagaggggcttcttactgtatgtacccgttcacacaaaacctggaacgtggctaagtgtctcagcaatgggcacaatgtacacctctttgtaattccatggactgtatacctgaaatgaactccattttagactgacactcttgatataatcggaggccggctcgcaaatggccagtgaacaggctctgcaatctacagctctcatgggatgggagagatgactactttgccggttgccctcccggtctcaaggtaggagaacgcctccacaacctgcgagaaggagaagggcccctccgggtcgatgagtggcttcagcttccctgactcgaggtacgggttgagcttctccaagacggagccgttggaggtgacgacgaaccggaaccctggagggctgacggcgccggtgagaaccaccacgctgccgccttccttcactaccttgacagctttgtcaccctgacctgaatggatcgatggtgcaaagggcagatcatgtcagccgaggcctgagggtgggtgacggatttttgtttttgtgtgtgctgggcatgtgtttgatgatggtgatcttaccgactccgtcgaagacaatgtcgtatttgtccggtagctcttccaagttctccttagtgtagtcgatggcgacatcggcacctaggctcttgagcagctcgatcttcttgaaaaaaaa

SEQ ID NO: 209805 - DNA, 976 bp, Zea Mays
aacgacgatgaaatcaatacctgagggtgtgcaacgcaagctcctcctccacctccaccctctaaaataagacgttgcagccaaccaggggaggccctccgcggtccgtggctccgtgccatcctctcctgggcagcgagcagtggtggccgcgggttcccccgcctcgtcctcccggatccggcgacgaagattaattgaataacttcgataagatgggtcgtggtattagcagtgggggtggtcagagttccttgggctatctctttggcagtgacgaagctccaaaatcatttgagaagcctgcaccagttcaaaagccaactcctccatcctctgcagagagactaaaagatatcgctgctggtattcaaagtagtaaatcaaacaattacaaaagatctgaaggccagaactgtggaaatttccttacgattgcggctgaaaatgcacaaaggcaaaatctctaccttgaaatatttgtacatttgcggatattagctgttgtgggatgctgcaggaccgtccgtcgaccaaggtgcaagcagctccaggtggcgactcttcactcggttatctttttagtggcagcaaagatggcaagtgatgtacacctgctgttagtgttcgccatgatcatgggagaaggtttctgcttaacaaaggaaaaagggaaaagaatcttgtattcccatgagtaaatatcaaactgctcatggtatctatgttgttgggattgcttgtatgtgtgtacatgttcgtgtgtgtcgtgtgttgatccacagctactggtagcaagagcttctatccctgctgatggaattgtgcgcaatgccaatgttgacattatcgtgggtgatgctattatgttgtggtgtattattggatatgtttgctgtttaatacacattgttgtagaaaaaaacatccacagttctgttcaatttcagagtgtcctgttcaattttcaccgaag

SEQ ID NO: 209806 - DNA, 726 bp, Zea Mays
ctcgctgttgtggatcgggggaatggggattaattgaataacttcgataagatgggtcgtggtattagcagtgggggtggtcagagttccttgggctatctctttggcagtgacgaagctccaaaatcatttgagaagcctgcaccagttcaaaagccaactcctccatcctctgcagagagactaaaagatatcgctgctggtattcaaagtagtaaatcaaacaattacaaaagatctgaaggccagaactgtggaaatttccttacggaccgtccgtcgaccaaggtgcaagcagctccaggtggcgactcttcactcggttatctttttagtggcagcaaagatggcaagtgatgtacacctgctgttagtgttcgccatgatcatgggagaaggtttctgcttaacaaaggaaaaagggaaaagaatcttgtattcccatgagtaaatatcaaactgctcatggtatctatgttgttgggattgcttgtatgtgtgtacatgttcgtgtgtgtcgtgtgttgatccacagctactggtagcaagagcttctatccctgctgatggaattgtgcgcaatgccaatgttgacattatcgtgggtgatgctattatgttgtggtgtattattggatatgtttgctgtttaatacacattgttgtagaaaaaaacatccacagttctgttcaatttcagagtgtcctgttcaattttcaccgaag

SEQ ID NO: 209807 - DNA, 761 bp, Zea Mays
gtcaaatctgccccaccgacaccttcaatcaatcatgcagccacttaattaggcttctaacatattaattgaataacttcgataagatgggtcgtggtattagcagtgggggtggtcagagttccttgggctatctctttggcagtgacgaagctccaaaatcatttgagaagcctgcaccagttcaaaagccaactcctccatcctctgcagagagactaaaagatatcgctgctggtattcaaagtagtaaatcaaacaattacaaaagatctgaaggccagaactgtggaaatttccttacggaccgtccgtcgaccaaggtgcaagcagctccaggtggcgactcttcactcggttatctttttagtggcagcaaagatggcaagtgatgtacacctgctgttagtgttcgccatgatcatgggagaaggtttctgcttaacaaaggaaaaagggaaaagaatcttgtattcccatgagtaaatatcaaactgctcatggtatctatgttgttgggattgcttgtatgtgtgtacatgttcgtgtgtgtcgtgtgttgatccacagctactggtagcaagagcttctatccctgctgatggaattgtgcgcaatgccaatgttgacattatcgtgggtgatgctattatgttgtggtgtattattggatatgtttgctgtttaatacacattgttgtagaaaaaaacatccacagttctgttcaatttcagagtgtcctgttcaattttcaccgaag

SEQ ID NO: 209808 - DNA, 775 bp, Zea Mays
cttgacgtggtcccacgacgcgagccctggctggtgcttcggccttctgtcagttgaggcctatgctgcttctgcagattaattgaataacttcgataagatgggtcgtggtattagcagtgggggtggtcagagttccttgggctatctctttggcagtgacgaagctccaaaatcatttgagaagcctgcaccagttcaaaagccaactcctccatcctctgcagagagactaaaagatatcgctgctggtattcaaagtagtaaatcaaacaattacaaaagatctgaaggccagaactgtggaaatttccttacggaccgtccgtcgaccaaggtgcaagcagctccaggtggcgactcttcactcggttatctttttagtggcagcaaagatggcaagtgatgtacacctgctgttagtgttcgccatgatcatgggagaaggtttctgcttaacaaaggaaaaagggaaaagaatcttgtattcccatgagtaaatatcaaactgctcatggtatctatgttgttgggattgcttgtatgtgtgtacatgttcgtgtgtgtcgtgtgttgatccacagctactggtagcaagagcttctatccctgctgatggaattgtgcgcaatgccaatgttgacattatcgtgggtgatgctattatgttgtggtgtattattggatatgtttgctgtttaatacacattgttgtagaaaaaaacatccacagttctgttcaatttcagagtgtcctgttcaattttcaccgaag

SEQ ID NO: 209809 - DNA, 811 bp, Zea Mays
actaccgtttggtgtgctgacatggaaattggggcagcaggacagctaggtgtgttggggacgcccttaggaaatcgagtcacactagatgctgacaacagaacagctctacgattaattgaataacttcgataagatgggtcgtggtattagcagtgggggtggtcagagttccttgggctatctctttggcagtgacgaagctccaaaatcatttgagaagcctgcaccagttcaaaagccaactcctccatcctctgcagagagactaaaagatatcgctgctggtattcaaagtagtaaatcaaacaattacaaaagatctgaaggccagaactgtggaaatttccttacggaccgtccgtcgaccaaggtgcaagcagctccaggtggcgactcttcactcggttatctttttagtggcagcaaagatggcaagtgatgtacacctgctgttagtgttcgccatgatcatgggagaaggtttctgcttaacaaaggaaaaagggaaaagaatcttgtattcccatgagtaaatatcaaactgctcatggtatctatgttgttgggattgcttgtatgtgtgtacatgttcgtgtgtgtcgtgtgttgatccacagctactggtagcaagagcttctatccctgctgatggaattgtgcgcaatgccaatgttgacattatcgtgggtgatgctattatgttgtggtgtattattggatatgtttgctgtttaatacacattgttgtagaaaaaaacatccacagttctgttcaatttcagagtgtcctgttcaattttcaccgaag

SEQ ID NO: 209810 - DNA, 3378 bp, Zea Mays
gattaggtatgtctcttgtcttatccgccacacacgacacgacacgcgccggccacagaaacagcgcttcactcccctccgcgccgcggcgaccatggagctcgccaccgtcgccgctgcagtcgcctccgccgctgcgcgcccgcacgggcctttctcctctccccgcgcagtctctgcctccgtctcgtggaccagtctctcgctcgcctacacctcccgctgtctctcctccacgtcctcgcgacggcggctgcgctggctccccgtcacctcggccgccgtggagctccgcgaggccactgccgggggcggagactcgctccgtgtcaccaagacgccgcagcctggatccagtgttaagttcagcgtggaggtgcctacttccatcattcacgagtgctaccaatccacgctacaggagtacgccaaacgtgttaaggttcctggatttcggcctgggaagaccattccagaaaacgttcttataaactatgtaggaccgcaacatgtacaggatgccacgattgaagctatcttaaaacatacgcttcctcaagcactgtcctcggtagaggagagggcattagaagattctgttcgcattctgactcaatttgatgatatgagaaattctttctcactcgacaatgtgtttagatatgatgttgctgtggatgttgcccctgaagtccgatggttatctgaagacaaatataggaacctcaaagttgtcgttgaaatagatgaagctgttgatgcggaaaaggcggcagagaaagagcttcagcgtcgtcataaagctctaggcttacttagaattgtggctgacagaggcctccagattggtgatctggtggtgctggatatatttgcggaaagcattaacaatgatggctctagaggtgaaaaaatttcatcggctgagagtacaggtttccacttggacactgaggaaaatagtaaccttgttcctggatttcttggttcgttgattgggattcgtgctggtgagactagatcatttcctatccagttccccgagtcatttgagcgagaaagtctacgaggtgtccgtgcacagtttactgttgtgtgtaaagagctgttctacagagagttgccagtaatggatgactcacttgctgtaaagcttcttccaggatgcactacaatagacgaggttcgagagcgtattttgaaaagatgtaaagaagtggagaagacggccatagaacaagcaacagacaacgcgatccttgaccagctcgggaagttggtcgaggtcgacgtccctcgtgccttgtttcaagagcaagggcagcagctttatggagccaagcttctgcagcttcaggcggaaaggaagctggataaagaccagctagcttcgttatcaaccaagaggtcagtgcaggcgtacctagaagatgagaaggagaacattacaagaatcattaaacagatgctggccgttggcgatattttcaaatccgagaacttacagtactcgactgatcagctcgtcaaggaagttgagaactccatagcggagttcaaacagtacaaccaagactatgatgaggacaacatcaggcagcaggtccaggatgtcctagaggcggcgaaggtgcttgaatggctcaaggagaactgctcggtcgagtatatcaggcgatgagtcccacgatgctgggtcaaggaaagctcctctgaacgtgagaaagatggtggctggtgtggcggtcggcagttttgcgagtggccttggtccttgccaatgccaaccagcctagagcagtgcagtgattaagaggtgtggctaacaaacatttgtctattgactcggttcatgatataaattcggatttggagctttagtaactagcatgttttcggtagagacaatcacatcgcattagagggcgtgtttgtttgtgtttataatctccccagattatataatccaacatatttatattttgaactttataaattcatactgtggccgattggtcgatcttgcgcaaggataatcatggaattaagaacgctatacgaagtgcataaatataaaataccaatcggtgtatactataagctaaatttgaggcaccagtattgcacttaaataggataaacataaactaaaataaaataaaataaaataaagcctgagaagcctacgaatcgccaaccatgttattatcagagttctgtaaagtcgtagctaaacggagccacgacagcggtccggcaggcgctggcgctcagcggtaggacttctggaacctggcgcgggcgccgcggccgccgaacttcttgggctcgcagcggcgggggtcggcgacgaggagggtgcgctcgtagcgcatgaagatgtccttgatctcctttttcgccgcctcgtcgacgtacttctggtagtatgccacgagacccttggcgacggcctggcggatggcgtagatctgcgacgtcttcccgccgccgcgcacgcggatccgcatgtcgatgtccttgaacctggaccgccccgccagcagcacgggctccatggccttgagccgcagcatctcgggacggagcagctcgatcgggacgccgttcaccttgatcatccctcggcctggcttcgtgtaggccacggccacggccgtcttcttgcgcccgaaacactgcactgtgcccggggtcgggcgcttcagcacgggacccatggttgcgggtatagcagcaatggaggcggcggcggcggctagggctgcgaaggtgaaggtggcggcgcgctagggctgcggtggcttggaaacgttgctgcggtggaggcttttatagtacggatggatggaagcggtttccgggatcgccggcgccgacgaatgacttgttgggccgggccttagaaggaaggaaacccggtggctggtgaggcccaggtttacagaagagagaaattctggcagatccaattgctgttgccgtcattctgatacaacctgacttgatgactctcaatgaagctgaatgctgaaaggtgttgctgccttgcagaatgaagctttgagttcaatacatggaattcatatttggtggtggtgttttggaacttgtttatctgctaggtgttgctgccttgcagaatgaagccgtccacattgtccttgtttatctgcaagatgcatgcctgctctatttcttgctcttcagtcttgactgatgcctactgcctgagtgcagattcagtgtgatagttagattctgctgatgtgttaacatgttcattgtaaacaaatttcttgttaaacatgtgtgatctcttcaagaccatgtgtctttgacctaatatattgcgaaacattcttcagttgtgtggtg

SEQ ID NO: 209811 - DNA, 5107 bp, Zea Mays
gattaggtatgtctcttgtcttatccgccacacacgacacgacacgcgccggccacagaaacagcgcttcactcccctccgcgccgcggcgaccatggagctcgccaccgtcgccgctgcagtcgcctccgccgctgcgcgcccgcacgggcctttctcctctccccgcgcagtctctgcctccgtctcgtggaccagtctctcgctcgcctacacctcccgctgtctctcctccacgtcctcgcgacggcggctgcgctggctccccgtcacctcggccgccgtggagctccgcgaggccactgccgggggcggagactcgctccgtgtcaccaagacgccgcagcctggatccagtgttcctggatttcggcctgggaagaccattccagaaaacgttcttataaactatgtaggaccgcaacatgtacaggatgccacgattgaagctatcttaaaacatacgcttcctcaagcactgtcctcggtagaggagagggcattagaagattctgttcgcattctgactcaatttgatgatatgagaaattctttctcactcgacaatgtgtttagatatgatgttgctgtggatgttgcccctgaagtccgatggttatctgaagacaaatataggaacctcaaagttgtcgttgaaatagatgaagctgttgatgcggaaaaggcggcagagaaagagcttcagcgtcgtcataaagctctaggcttacttagaattgtggctgacagaggcctccagattggtgatctggtggtgctggatatatttgcggaaagcattaacaatgatggctctagaggtgaaaaaatttcatcggctgagagtacaggtttccacttggacactgaggaaaatagtaaccttgttcctggatttcttggttcgttgattgggattcgtgctggtgagactagatcatttcctatccagttccccgagtcatttgagcgagaaagtctacgaggtgtccgtgcacagtttactgttgtgtgtaaagagctgttctacagagagttgccagtaatggatgactcacttgctgtaaagcttcttccaggatgcactacaatagacgaggttcgagagcgtattttgaaaagatgtaaagaagtggagaagacggccatagaacaagcaacagacaacgcgatccttgaccagctcgggaagttggtcgaggtcgacgtccctcgtgccttgtttcaagagcaagggcagcagctttatggagccaagcttctgcagcttcaggcggaaaggaagctggataaagaccagctagcttcgttatcaaccaagaggtcagtgcaggcgtacctagaagatgagaaggagaacattacaagaatcattaaacagatgctggccgttggcgatattttcaaatccgagaacttacagtactcgactgatcagctcgtcaaggaagttgagaactccatagcggagttcaaacagtacaaccaagactatgatgaggacaacatcaggcagcaggtccaggatgtcctagaggcggcgaaggtgcttgaatggctcaaggagaactgctcggtcgagtatatcaggcgatgagtcccacgatgctgggtcaaggaaagctcctctgaacgtgagaaagatggtggctggtgtggcggtcggcagttttgcgagtggccttggtccttgccaatgccaaccagcctagagcagtgcagtgattaagaggtgtggctaacaaacatttgtctattgactcggttcatgatataaattcggatttggagctttagtaactagcatgttttcggtagagacaatcacatcgcattagagggcgtgtttgtttgtgtttataatctccccagattatataatccaacatatttatattttgaactttataaattcatactgtggccgattggtcgatcttgcgcaaggataatcatggaattaagaacgctatacgaagtgcataaatataaaataccaatcggtgtatactataagctaaatttgaggcaccagtattgcacttaaataggataaacataaactaaaataaaataaaataaaataaagcctgagaagcctacgaatcgccaaccatgttattatcagagttctgtaaagtcgtagctaaacggagccacgacagcggtccggcaggcgctggcgctcagcggtaggacttctggaacctggcgcgggcgccgcggccgccgaacttcttgggctcgcagcggcgggggtcggcgacgaggagggtgcgctcgtagcgcatgaagatgtccttgatctcctttttcgccgcctcgtcgacgtacttctggtagtatgccacgagacccttggcgacggcctggcggatggcgtagatctgcgacgtcttcccgccgccgcgcacgcggatccgcatgtcgatgtccttgaacctggaccgccccgccagcagcacgggctccatggccttgagccgcagcatctcgggacggagcagctcgatcgggacgccgttcaccttgatcatccctcggcctggcttcgtgtaggccacggccacggccgtcttcttgcgcccgaaacactgcactgtgcccggggtcgggcgcttcagcacgggacccatggttgcgggtatagcagcaatggaggcggcggcggcggctagggctgcgaaggtgaaggtggcggcgcgctagggctgcggtggcttggaaacgttgctgcggtggaggcttttatagtacggatggatggaagcggtttccgggatcgccggcgccgacgaatgacttgttgggccgggccttagaaggaaggaaacccggtggctggtgaggcccaggtattcgttgtgataaaatggccactggtcaagggcggagaagctagggtttcggccctcacgaacactacttgatcttatccgagcgcgccgtccggcagcaccgcgggcggcggccggagtcgcctccccgtgcccgcgttgcccccgccggcctgcaagggttggtgggttggtggcgcggttcgtcgggaagaggcggcgcttgcgcccgcggtcgctgccggcgacgagcgatgacgactgcccgcggtcggagcgcgcgcgatgatggccgcgcgggttccccaaacacactacacgagatacttcgcgatgttcttttcctttgacatgttcttttcctttgacatgttcttttttcgaaaaatttgaagtattctttattaaaaaaaaaggctttttatgtgtgtttaatcccgcttgtcttctgtttgtgcttagtcgttctattagtgtggtttgattttgtatcacgctcgtcattgacaaagtgattccgttccggaatgatactaacaaagaatgtgccttctactctgttaccacgggtggtcttgggtccttacccttcagatgttcttgttaacggttcttctctcttcgtccagcacattgaactttatagtacacttagtatcattacattggtccttttaggatggagggtgaactattagagttattattaagatggtggatgttagctacgctttcatggtggatgtttactatgttttgtcatgtaaacaactgcatgtctttaaatttgtctatcagtataaatagtcactgcacatgcttaataaggttagattacaacatctggtgcagtcctctccatatctgatatttttctgttgcatcgatagccctcatggttattaaaaaatgtacttgtttgccatgtatgttgctcaatatatgatttgtgactcaccttgcttgacaagttggtatgattaagcgttttttggatcatgagggtgagatgataaacaacctttggtccacataattggattagtgaggtggaagcttcggatatagcggtgggctttacggttgccctaatagtgaacaggtccagcacatttactaccatatttttcccttcgtaatctaatcactaaggaggatcgaaattttttcatgcatagctttggttccctctcaactgattattcacttcaactgttttttaaattcgttaagatggaatgaaattgcttatttaaccacctatgctgccaatttgtccattagggtttcagtttatcctgacatttcatatatttgggacttttaagttgcccctatggctttttgctgtgcctgtgggatgaacatgtcccaacatttactccatttattcactttgtcagctaatagccatacatgttttatgtttagctgatcattaagaatgggaaatttacactttccatactgtgttatacatgttatgtttgcctgcttgaacaccccttgttttgaggtatcgtttgggagcaaaataggtgttctggtggcaacagcagtgccggtgagatgagcttttgtcccagtttaccaccaagtgtgtcacttggttgttagtgtcctatgggttctttgtagccttctgttttcctactttgtatcttgaatgtgatttcatggtcgctggttttttatcaagaggagctgggttcaatcgccacttagatcagtgttttttgtgattctctaatgcaacaacagcaaccttgtgcttggctaaagctacaataaggataatattctgaacttatttgccctggtgatgttgtaggtttacagaagagagaaattctggcagatccaattgctgttgccgtcattctgatacaacctgacttgatgactctcaatgaagctgaatgctgaaaggtgttgctgccttgcagaatgaagctttgagttcaatacatggaattcatatttggtggtggtgttttggaacttgtttatctgctaggtgttgctgccttgcagaatgaagccgtccacattgtccttgtttatctgcaagatgcatgcctgctctatttcttgctcttcagtcttgactgatgcctactgcctgagtgcagattcagtgtgatagttagattctgctgatgtgttaacatgttcattgtaaacaaatttcttgttaaacatgtgtgatctcttcaagaccatgtgtctttgacctaatatattgcgaaacattcttcagttgtgtggtg

SEQ ID NO: 209812 - DNA, 5187 bp, Zea Mays
gattaggtatgtctcttgtcttatccgccacacacgacacgacacgcgccggccacagaaacagcgcttcactcccctccgcgccgcggcgaccatggagctcgccaccgtcgccgctgcagtcgcctccgccgctgcgcgcccgcacgggcctttctcctctccccgcgcagtctctgcctccgtctcgtggaccagtctctcgctcgcctacacctcccgctgtctctcctccacgtcctcgcgacggcggctgcgctggctccccgtcacctcggccgccgtggagctccgcgaggccactgccgggggcggagactcgctccgtgtcaccaagacgccgcagcctggatccagtgttaagttcagcgtggaggtgcctacttccatcattcacgagtgctaccaatccacgctacaggagtacgccaaacgtgttaaggttcctggatttcggcctgggaagaccattccagaaaacgttcttataaactatgtaggaccgcaacatgtacaggatgccacgattgaagctatcttaaaacatacgcttcctcaagcactgtcctcgaggagagggcattagaagattctgttcgcattctgactcaatttgatgatatgagaaattctttctcactcgacaatgtgtttagatatgatgttgctgtggatgttgcccctgaagtccgatggttatctgaagacaaatataggaacctcaaagttgtcgttgaaatagatgaagctgttgatgcggaaaaggcggcagagaaagagcttcagcgtcgtcataaagctctaggcttacttagaattgtggctgacagaggcctccagattggtgatctggtggtgctggatatatttgcggaaagcattaacaatgatggctctagaggtgaaaaaatttcatcggctgagagtacaggtttccacttggacactgaggaaaatagtaaccttgttcctggatttcttggttcgttgattgggattcgtgctggtgagactagatcatttcctatccagttccccgagtcatttgagcgagaaagtctacgaggtgtccgtgcacagtttactgttgtgtgtaaagagctgttctacagagagttgccagtaatggatgactcacttgctgtaaagcttcttccaggatgcactacaatagacgaggttcgagagcgtattttgaaaagatgtaaagaagtggagaagacggccatagaacaagcaacagacaacgcgatccttgaccagctcgggaagttggtcgaggtcgacgtccctcgtgccttgtttcaagagcaagggcagcagctttatggagccaagcttctgcagcttcaggcggaaaggaagctggataaagaccagctagcttcgttatcaaccaagaggtcagtgcaggcgtacctagaagatgagaaggagaacattacaagaatcattaaacagatgctggccgttggcgatattttcaaatccgagaacttacagtactcgactgatcagctcgtcaaggaagttgagaactccatagcggagttcaaacagtacaaccaagactatgatgaggacaacatcaggcagcaggtccaggatgtcctagaggcggcgaaggtgcttgaatggctcaaggagaactgctcggtcgagtatatcaggcgatgagtcccacgatgctgggtcaaggaaagctcctctgaacgtgagaaagatggtggctggtgtggcggtcggcagttttgcgagtggccttggtccttgccaatgccaaccagcctagagcagtgcagtgattaagaggtgtggctaacaaacatttgtctattgactcggttcatgatataaattcggatttggagctttagtaactagcatgttttcggtagagacaatcacatcgcattagagggcgtgtttgtttgtgtttataatctccccagattatataatccaacatatttatattttgaactttataaattcatactgtggccgattggtcgatcttgcgcaaggataatcatggaattaagaacgctatacgaagtgcataaatataaaataccaatcggtgtatactataagctaaatttgaggcaccagtattgcacttaaataggataaacataaactaaaataaaataaaataaaataaagcctgagaagcctacgaatcgccaaccatgttattatcagagttctgtaaagtcgtagctaaacggagccacgacagcggtccggcaggcgctggcgctcagcggtaggacttctggaacctggcgcgggcgccgcggccgccgaacttcttgggctcgcagcggcgggggtcggcgacgaggagggtgcgctcgtagcgcatgaagatgtccttgatctcctttttcgccgcctcgtcgacgtacttctggtagtatgccacgagacccttggcgacggcctggcggatggcgtagatctgcgacgtcttcccgccgccgcgcacgcggatccgcatgtcgatgtccttgaacctggaccgccccgccagcagcacgggctccatggccttgagccgcagcatctcgggacggagcagctcgatcgggacgccgttcaccttgatcatccctcggcctggcttcgtgtaggccacggccacggccgtcttcttgcgcccgaaacactgcactgtgcccggggtcgggcgcttcagcacgggacccatggttgcgggtatagcagcaatggaggcggcggcggcggctagggctgcgaaggtgaaggtggcggcgcgctagggctgcggtggcttggaaacgttgctgcggtggaggcttttatagtacggatggatggaagcggtttccgggatcgccggcgccgacgaatgacttgttgggccgggccttagaaggaaggaaacccggtggctggtgaggcccaggtattcgttgtgataaaatggccactggtcaagggcggagaagctagggtttcggccctcacgaacactacttgatcttatccgagcgcgccgtccggcagcaccgcgggcggcggccggagtcgcctccccgtgcccgcgttgcccccgccggcctgcaagggttggtgggttggtggcgcggttcgtcgggaagaggcggcgcttgcgcccgcggtcgctgccggcgacgagcgatgacgactgcccgcggtcggagcgcgcgcgatgatggccgcgcgggttccccaaacacactacacgagatacttcgcgatgttcttttcctttgacatgttcttttcctttgacatgttcttttttcgaaaaatttgaagtattctttattaaaaaaaaaggctttttatgtgtgtttaatcccgcttgtcttctgtttgtgcttagtcgttctattagtgtggtttgattttgtatcacgctcgtcattgacaaagtgattccgttccggaatgatactaacaaagaatgtgccttctactctgttaccacgggtggtcttgggtccttacccttcagatgttcttgttaacggttcttctctcttcgtccagcacattgaactttatagtacacttagtatcattacattggtccttttaggatggagggtgaactattagagttattattaagatggtggatgttagctacgctttcatggtggatgtttactatgttttgtcatgtaaacaactgcatgtctttaaatttgtctatcagtataaatagtcactgcacatgcttaataaggttagattacaacatctggtgcagtcctctccatatctgatatttttctgttgcatcgatagccctcatggttattaaaaaatgtacttgtttgccatgtatgttgctcaatatatgatttgtgactcaccttgcttgacaagttggtatgattaagcgttttttggatcatgagggtgagatgataaacaacctttggtccacataattggattagtgaggtggaagcttcggatatagcggtgggctttacggttgccctaatagtgaacaggtccagcacatttactaccatatttttcccttcgtaatctaatcactaaggaggatcgaaattttttcatgcatagctttggttccctctcaactgattattcacttcaactgttttttaaattcgttaagatggaatgaaattgcttatttaaccacctatgctgccaatttgtccattagggtttcagtttatcctgacatttcatatatttgggacttttaagttgcccctatggctttttgctgtgcctgtgggatgaacatgtcccaacatttactccatttattcactttgtcagctaatagccatacatgttttatgtttagctgatcattaagaatgggaaatttacactttccatactgtgttatacatgttatgtttgcctgcttgaacaccccttgttttgaggtatcgtttgggagcaaaataggtgttctggtggcaacagcagtgccggtgagatgagcttttgtcccagtttaccaccaagtgtgtcacttggttgttagtgtcctatgggttctttgtagccttctgttttcctactttgtatcttgaatgtgatttcatggtcgctggttttttatcaagaggagctgggttcaatcgccacttagatcagtgttttttgtgattctctaatgcaacaacagcaaccttgtgcttggctaaagctacaataaggataatattctgaacttatttgccctggtgatgttgtaggtttacagaagagagaaattctggcagatccaattgctgttgccgtcattctgatacaacctgacttgatgactctcaatgaagctgaatgctgaaaggtgttgctgccttgcagaatgaagctttgagttcaatacatggaattcatatttggtggtggtgttttggaacttgtttatctgctaggtgttgctgccttgcagaatgaagccgtccacattgtccttgtttatctgcaagatgcatgcctgctctatttcttgctcttcagtcttgactgatgcctactgcctgagtgcagattcagtgtgatagttagattctgctgatgtgttaacatgttcattgtaaacaaatttcttgttaaacatgtgtgatctcttcaagaccatgtgtctttgacctaatatattgcgaaacattcttcagttgtgtggtg

SEQ ID NO: 209813 - DNA, 5111 bp, Zea Mays
gattaggtatgtctcttgtcttatccgccacacacgacacgacacgcgccggccacagaaacagcgcttcactcccctccgcgccgcggcgaccatggagctcgccaccgtcgccgctgcagtcgcctccgccgctgcgcgcccgcacgggcctttctcctctccccgcgcagtctctgcctccgtctcgtggaccagtctctcgctcgcctacacctcccgctgtctctcctccacgtcctcgcgacggcggctgcgctggctccccgtcacctcggccgccgtggagctccgcgaggccactgccgggggcggagactcgctccgtgtcaccaagacgccgcagcctggatccagtgttaagttcagcgtggaggtgcctacttccatcattcacgagtgctaccaatccacgctacaggagtacgccaaacgtgttaaggttcctggatttcggcctgggaagaccattccagaaaacgttcttataaactatgtaggaccgcaacatgtacaggatgccacgattgaagctatcttaaaacatacgcttcctcaagcactgtcctcggtagaggagagggcattagaagattctgttcgcattctgactcaatttgatgatatgagaaattctttctcactcgacaatgtgtttagatatgatgttgctgtggatgttgcccctgaagtccgatggttatctgaagacaaatataggaacctcaaagttgtcgttgaaatagatgaagctgttgatgcggaaaaggcggcagagaaagagcttcagcgtcgtcataaagctctaggcttacttagaattgtggctgacagaggcctccagattggtgatctggtggtgctggatatatttgcggaaagcattaacaatgatggctctagaggtgaaaaaatttcatcggctgagagtacaggtttccacttggacactgaggaaaatagtaaccttgttcctggatttcttggttcgttgattgggattcgtgctggttgtgtgtaaagagctgttctacagagagttgccagtaatggatgactcacttgctgtaaagcttcttccaggatgcactacaatagacgaggttcgagagcgtattttgaaaagatgtaaagaagtggagaagacggccatagaacaagcaacagacaacgcgatccttgaccagctcgggaagttggtcgaggtcgacgtccctcgtgccttgtttcaagagcaagggcagcagctttatggagccaagcttctgcagcttcaggcggaaaggaagctggataaagaccagctagcttcgttatcaaccaagaggtcagtgcaggcgtacctagaagatgagaaggagaacattacaagaatcattaaacagatgctggccgttggcgatattttcaaatccgagaacttacagtactcgactgatcagctcgtcaaggaagttgagaactccatagcggagttcaaacagtacaaccaagactatgatgaggacaacatcaggcagcaggtccaggatgtcctagaggcggcgaaggtgcttgaatggctcaaggagaactgctcggtcgagtatatcaggcgatgagtcccacgatgctgggtcaaggaaagctcctctgaacgtgagaaagatggtggctggtgtggcggtcggcagttttgcgagtggccttggtccttgccaatgccaaccagcctagagcagtgcagtgattaagaggtgtggctaacaaacatttgtctattgactcggttcatgatataaattcggatttggagctttagtaactagcatgttttcggtagagacaatcacatcgcattagagggcgtgtttgtttgtgtttataatctccccagattatataatccaacatatttatattttgaactttataaattcatactgtggccgattggtcgatcttgcgcaaggataatcatggaattaagaacgctatacgaagtgcataaatataaaataccaatcggtgtatactataagctaaatttgaggcaccagtattgcacttaaataggataaacataaactaaaataaaataaaataaaataaagcctgagaagcctacgaatcgccaaccatgttattatcagagttctgtaaagtcgtagctaaacggagccacgacagcggtccggcaggcgctggcgctcagcggtaggacttctggaacctggcgcgggcgccgcggccgccgaacttcttgggctcgcagcggcgggggtcggcgacgaggagggtgcgctcgtagcgcatgaagatgtccttgatctcctttttcgccgcctcgtcgacgtacttctggtagtatgccacgagacccttggcgacggcctggcggatggcgtagatctgcgacgtcttcccgccgccgcgcacgcggatccgcatgtcgatgtccttgaacctggaccgccccgccagcagcacgggctccatggccttgagccgcagcatctcgggacggagcagctcgatcgggacgccgttcaccttgatcatccctcggcctggcttcgtgtaggccacggccacggccgtcttcttgcgcccgaaacactgcactgtgcccggggtcgggcgcttcagcacgggacccatggttgcgggtatagcagcaatggaggcggcggcggcggctagggctgcgaaggtgaaggtggcggcgcgctagggctgcggtggcttggaaacgttgctgcggtggaggcttttatagtacggatggatggaagcggtttccgggatcgccggcgccgacgaatgacttgttgggccgggccttagaaggaaggaaacccggtggctggtgaggcccaggtattcgttgtgataaaatggccactggtcaagggcggagaagctagggtttcggccctcacgaacactacttgatcttatccgagcgcgccgtccggcagcaccgcgggcggcggccggagtcgcctccccgtgcccgcgttgcccccgccggcctgcaagggttggtgggttggtggcgcggttcgtcgggaagaggcggcgcttgcgcccgcggtcgctgccggcgacgagcgatgacgactgcccgcggtcggagcgcgcgcgatgatggccgcgcgggttccccaaacacactacacgagatacttcgcgatgttcttttcctttgacatgttcttttcctttgacatgttcttttttcgaaaaatttgaagtattctttattaaaaaaaaaggctttttatgtgtgtttaatcccgcttgtcttctgtttgtgcttagtcgttctattagtgtggtttgattttgtatcacgctcgtcattgacaaagtgattccgttccggaatgatactaacaaagaatgtgccttctactctgttaccacgggtggtcttgggtccttacccttcagatgttcttgttaacggttcttctctcttcgtccagcacattgaactttatagtacacttagtatcattacattggtccttttaggatggagggtgaactattagagttattattaagatggtggatgttagctacgctttcatggtggatgtttactatgttttgtcatgtaaacaactgcatgtctttaaatttgtctatcagtataaatagtcactgcacatgcttaataaggttagattacaacatctggtgcagtcctctccatatctgatatttttctgttgcatcgatagccctcatggttattaaaaaatgtacttgtttgccatgtatgttgctcaatatatgatttgtgactcaccttgcttgacaagttggtatgattaagcgttttttggatcatgagggtgagatgataaacaacctttggtccacataattggattagtgaggtggaagcttcggatatagcggtgggctttacggttgccctaatagtgaacaggtccagcacatttactaccatatttttcccttcgtaatctaatcactaaggaggatcgaaattttttcatgcatagctttggttccctctcaactgattattcacttcaactgttttttaaattcgttaagatggaatgaaattgcttatttaaccacctatgctgccaatttgtccattagggtttcagtttatcctgacatttcatatatttgggacttttaagttgcccctatggctttttgctgtgcctgtgggatgaacatgtcccaacatttactccatttattcactttgtcagctaatagccatacatgttttatgtttagctgatcattaagaatgggaaatttacactttccatactgtgttatacatgttatgtttgcctgcttgaacaccccttgttttgaggtatcgtttgggagcaaaataggtgttctggtggcaacagcagtgccggtgagatgagcttttgtcccagtttaccaccaagtgtgtcacttggttgttagtgtcctatgggttctttgtagccttctgttttcctactttgtatcttgaatgtgatttcatggtcgctggttttttatcaagaggagctgggttcaatcgccacttagatcagtgttttttgtgattctctaatgcaacaacagcaaccttgtgcttggctaaagctacaataaggataatattctgaacttatttgccctggtgatgttgtaggtttacagaagagagaaattctggcagatccaattgctgttgccgtcattctgatacaacctgacttgatgactctcaatgaagctgaatgctgaaaggtgttgctgccttgcagaatgaagctttgagttcaatacatggaattcatatttggtggtggtgttttggaacttgtttatctgctaggtgttgctgccttgcagaatgaagccgtccacattgtccttgtttatctgcaagatgcatgcctgctctatttcttgctcttcagtcttgactgatgcctactgcctgagtgcagattcagtgtgatagttagattctgctgatgtgttaacatgttcattgtaaacaaatttcttgttaaacatgtgtgatctcttcaagaccatgtgtctttgacctaatatattgcgaaacattcttcagttgtgtggtg

SEQ ID NO: 209814 - DNA, 2255 bp, Zea Mays
gattaggtatgtctcttgtcttatccgccacacacgacacgacacgcgccggccacagaaacagcgcttcactcccctccgcgccgcggcgaccatggagctcgccaccgtcgccgctgcagtcgcctccgccgctgcgcgcccgcacgggcctttctcctctccccgcgcagtctctgcctccgtctcgtggaccagtctctcgctcgcctacacctcccgctgtctctcctccacgtcctcgcgacggcggctgcgctggctccccgtcacctcggccgccgtggagctccgcgaggccactgccgggggcggagactcgctccgtgtcaccaagacgccgcagcctggatccagtgttaagttcagcgtggaggtgcctacttccatcattcacgagtgctaccaatccacgctacaggagtacgccaaacgtgttaaggttcctggatttcggcctgggaagaccattccagaaaacgttcttataaactatgtaggaccgcaacatgtacaggatgccacgattgaagctatcttaaaacatacgcttcctcaagcactgtcctcggtagaggagagggcattagaagattctgttcgcattctgactcaatttgatgatatgagaaattctttctcactcgacaatgtgtttagatatgatgttgctgtggatgttgcccctgaagtccgatggttatctgaagacaaatataggaacctcaaagttgtcgttgaaatagatgaagctgttgatgcggaaaaggcggcagagaaagagcttcagcgtcgtcataaagctctaggcttacttagaattgtggctgacagaggcctccagattggtgatctggtggtgctggatatatttgcggaaagcattaacaatgatggctctagaggtgaaaaaatttcatcggctgagagtacaggtttccacttggacactgaggaaaatagtaaccttgttcctggatttcttggttcgttgattgggattcgtgctggtgagactagatcatttcctatccagttccccgagtcatttgagcgagaaagtctacgaggtgtccgtgcacagtttactgttgtgtgtaaagagctgttctacagagagttgccagtaatggatgactcacttgctgtaaagcttcttccaggatgcactacaatagacgaggttcgagagcgtattttgaaaagatgtaaagaagtggagaagacggccatagaacaagcaacagacaacgcgatccttgaccagctcgggaagttggtcgaggtcgacgtccctcgtgccttgtttcaagagcaagggcagcagctttatggagccaagcttctgcagcttcaggcggaaaggaagctggataaagaccagctagcttcgttatcaaccaagaggtcagtgcaggcgtacctagaagatgagaaggagaacattacaagaatcattaaacagatgctggccgttggcgatattttcaaatccgagaacttacagtactcgactgatcagctcgtcaaggaagttgagaactccatagcggagttcaaacagtacaaccaagactatgatgaggacaacatcaggcagcaggtccaggatgtcctagaggcggcgaaggtgcttgaatggctcaaggagaactgctcggtcgagtatatcaggcgatgagtcccacgatgctgggtcaaggaaagctcctctgaacgtgagaaagatggtggctggtgtggcggtcggcagttttgcgagtggccttggtccttgccaatgccaaccagcctagagcagtgcagtgattaagaggtttacagaagagagaaattctggcagatccaattgctgttgccgtcattctgatacaacctgacttgatgactctcaatgaagctgaatgctgaaaggtgttgctgccttgcagaatgaagctttgagttcaatacatggaattcatatttggtggtggtgttttggaacttgtttatctgctaggtgttgctgccttgcagaatgaagccgtccacattgtccttgtttatctgcaagatgcatgcctgctctatttcttgctcttcagtcttgactgatgcctactgcctgagtgcagattcagtgtgatagttagattctgctgatgtgttaacatgttcattgtaaacaaatttcttgttaaacatgtgtgatctcttcaagaccatgtgtctttgacctaatatattgcgaaacattcttcagttgtgtggtg

SEQ ID NO: 209815 - DNA, 4207 bp, Zea Mays
tgcctcctccaggctctccagctgtccgtgtccagcatcccgcactccgcagcaccactcgcccgccccacaccaccacacggcctccgcccacgcgcacggcgcacccgtcctgtgctcacatcaccacgccacacgacgcgctcgtcagtcgtcacgcaccccacgacgccccaaccgtcccaaacccagatccttccccgcctcgccaccgccaccgccaccgccaatccaccaccatgcccatggacaccgacgagcgccccctcgtcgagctcgcctccgctgcggccgccactactctcgccgcctcctccacctcctccgcccccttccccgcccctgccacgcctgggttctcccgcgcggtccgctgcaacgcccccgcttcctcgctcccggccgatggcggggccggcgcgcagccggcctacccggagaacgcgatctcgacaaccaagtacacgcccgcgagcttcgtgcccaagtcgctcttcgagcagttccgccgcgccgcgaactgtttcttcctcgtcgtcgcctgcgtctccttcagccctcttgcgccctaccgcgccgtctccgtcctgctcccgctcgtcgtcgtcgtcagcgccgccatggccaaggaggccgtcgaggactggcgccggaagcagcaggacatagaagtgaacaataggaaggttgaggtgtatgatgggatccaatcatttcatgagacagaatggaagaagcttcgagttggcgatataattaaagttaaaaaggatgagttcttccctgctgatcttattttcctttcgtctagctcttgtgatggattatgctatgtggagacgatgaatcttgatggtgagacaaacttgaagcggaaacaggcattagaggtgactatgggcttgaatgatgaccatttccatagtttcaaggctttcattcggtgtgaggatccgaatgagaaattgtattctttcttaggaacactatactacaatgggcaacaatattctctgtctccggaacaggtcctgctaagggattcaaaacttcgtaatacaatgtatatatatggcaccataatatttacgggacatgatacaaaggtgatgcaaaatgcaatggagccaccatcaaagaggagttcagttgaacgaagaatggataaaataatatatctcctttttgtgattctctttgttattgcaacgtttgggtcaattgtgtttggaatgagaacaaagcatgagataagtccaggaagctatgcatggtacctcaggccggatcaagcaaatatattctttgatccaaacaatgcatcgtttgcagcattctgccattttcttacaagcctgatgctgtatgtgtgcttggtgcctatttcattgtatatatcgatagaaattgtcaaggttttacagagcacatttataaatcaagaccagaatatgtattgcgccgagtctgataaacctgcaagagctcgcacttcaaatttgaatgaagaacttggtcaagtccatactatactgtctgacaaaacagggacattaacatgcaattcaatggagttcttgaaatgttccattgctggtgttgcttatggaagtaggcctacagaagttgaaacgtgttatggagaaatagttgaaactaatggcagttttgggcgcaaggacactactgaattcaagagatcagtcaagggatttaatttcactgatagtcatttgatgaatggaagatgggccaaagaatgttctagggatgctatagaaatgtttttccgagtcttagctgtttgccatactgcgattcctgtggcagatggaaattctgctggtatgccttatgaagctgagtctcctgatgaagcagctcttgttacagctgcaagagagtttggctttgaattttatcataggacacaaacaactatatcagtgcatgagtacgatcctgtcgttggtggaaaggttgatagaacatataaactactcaacatcttagaattcagcagtgctcgtaagcgtatgtctgttattgtgaggacagaagagggtcggctatttctgttctgcaaaggagctgacagtgtaatattcgaaaggctctccaaggataatggaacagctcatctgaccaaaacaaagtgtcacattgatgagtattctgaggattactcgtctgccaagaattctgtacatactgatcatgttgcagctgttgagaaggtgtcagaagacattgagaaggatttggttcttttgggtgctactgctgtagaggatagattgcaaaatggggtccctgagtgtatttataaacttgcacaagctggaattaagatctggattttaactggagacaagttggagacagctgtaaacataggttacgcttgtaacctactgaggaaagagatggaggaaatttttatcacactggagaactcaagtacaagtgcttcagaggggtccagtggagaaggaaacaaaattgccacatttgaggaaattgatagaaaattaaaagatgctagaggaaagatttcccaaaaaggaacttcaacttcatttgctcttatcattgacggcaatgctctgacacatgctctcacgggcagccttaagaactcatttctggatctagcagtcaactgtgcatctgttttatgttgtcgggtttcaccaaaacaaaaggcactggtcaccagattggttaaaattaggacaagtaaaactactttagctattggtgatggagcaaatgatgttggtatgctacaagaggctgacattggggttggaataagtggtgctgaaggaatgcaggctgttatggcgagtgactttgcaatagcacagtttcgttttttagagcgattacttcttgtgcatggtcattggtgttatcgtcggattgcagctatgatatgctattttttcttcaagaacatcacatttggctttacgcttttctggtttgaggctcatgctatgttctcagcacaacctgcgtacaatgattggttcatatctttctataatgttgccttcacatctcttcctgtcatcgccctcggtgtttttgacaaggatgtctcttcccatgtttgtcttgaggtcccttcattacatcaagatggcgttaataatgtattcttcagttggtcccgaatactcagttggatgttaaatgggatgtgctgttcaataattatttactttggttccctcaacgctattctggttcaggctgtccgacaggatggtcgcgttgctgggtttgatatccttggggtgaccatgtacacttgtgtagtgtggactgtgaactgccagcttgctctctacatcagctacttcacctggatacaacattttgtcatctggggcagcatactgatttggtacactttccttgtcatatatggtctattttccccagcaatatcaaccactgcatatcatgtttttgtggaagcttgtgcacctagccctttgtactggctatccactctaatgattgtggtgacagccttgatcccattctttgtctacaaaatatcgagaacactctattatccacagtatcatgatcaagttcagagggctaactcaaagaattggtagtgcctgttgtataagatgctactgaatgaggggatgtacagtcagtaatttggtttaacataccacatgctttgctttgtagatcatgatgcagaggtagtgtatataaacaaagttggctgtttaacagatcttgtatttacggtctatgcccacaaagttacagtttcaggttgtggcagtgcgtctgtcaaatatcagaacacaatggtgacttcgcagtcacgcgaaggaactgcaagcggcaaattgattctttggacctattaccccactaggacacgtttttcttcggggtgccatcatggaagcagattgcaattaggatttatatagaatgatgtatagcatgtcgataactcgaacatgacttcctcgatatatgtagtactgtcttccaaaaaatagcattcttgtagcatcaaacggccaaacctatgttcgtggaagcatagttaataccctttattgctccaatggtttgtacatagttgtatgaatatatgagatggatcttgatgttgtttaacatttgatatgaaatgaataaatgatatgatgttatctct

SEQ ID NO: 209816 - DNA, 2807 bp, Zea Mays
tgcctcctccaggctctccagctgtccgtgtccagcatcccgcactccgcagcaccactcgcccgccccacaccaccacacggcctccgcccacgcgcacggcgcacccgtcctgtgctcacatcaccacgccacacgacgcgctcgtcagtcgtcacgcaccccacgacgccccaaccgtcccaaacccagatccttccccgcctcgccaccgccaccgccaccgccaatccaccaccatgcccatggacaccgacgagcgccccctcgtcgagctcgcctccgctgcggccgccactactctcgccgcctcctccacctcctccgcccccttccccgcccctgccacgcctgggttctcccgcgcggtccgctgcaacgcccccgcttcctcgctcccggccgatggcggggccggcgcgcagccggcctacccggagaacgcgatctcgacaaccaagtacacgcccgcgagcttcgtgcccaagtcgctcttcgagcagttccgccgcgccgcgaactgtttcttcctcgtcgtcgcctgcgtctccttcagccctcttgcgccctaccgcgccgtctccgtcctgctcccgctcgtcgtcgtcgtcagcgccgccatggccaaggaggccgtcgaggactggcgccggaagcagcaggacatagaagtgaacaataggaaggttgaggtgtatgatgggatccaatcatttcatgagacagaatggaagaagcttcgagttggcgatataattaaagttaaaaaggatgagttcttccctgctgatcttattttcctttcgtctagctcttgtgatggattatgctatgtggagacgatgaatcttgatggtgagacaaacttgaagcggaaacaggcattagaggtgactatgggcttgaatgatgaccatttccatagtttcaaggctttcattcggtgtgaggatccgaatgagaaattgtattctttcttaggaacactatactacaatgggcaacaatattctctgtctccggaacaggtcctgctaagggattcaaaacttcgtaatacaatgtatatatatggcaccataatatttacgggacatgatacaaaggtgatgcaaaatgcaatggagccaccatcaaagaggagttcagttgaacgaagaatggataaaataatatatctcctttttgtgattctctttgttattgcaacgtttgggtcaattgtgtttggaatgagaacaaagcatgagataagtccaggaagctatgcatggtacctcaggccggatcaagcaaatatattctttgatccaaacaatgcatcgtttgcagcattctgccattttcttacaagcctgatgctgtatgtgtgcttggtgcctatttcattgtatatatcgatagaaattgtcaaggttttacagagcacatttataaatcaagaccagaatatgtattgcgccgagtctgataaacctgcaagagctcgcacttcaaatttgaatgaagaacttggtcaagtccatactatactgtctgacaaaacagggacattaacatgcaattcaatggagttcttgaaatgttccattgctggtgttgcttatggaagtaggcctacagaagttgaaacgtgttatggagaaatagttgaaactaatggcagttttgggcgcaaggacactactgaattcaagagatcagtcaagggatttaatttcactgatagtcatttgatgaatggaagatgggccaaagaatgttctagggatgctatagaaatgtttttccgagtcttagctgtttgccatactgcgattcctgtggcagatggaaattctgctggtatgccttatgaagctgagtctcctgatgaagcagctcttgttacagctgcaagagagtttggctttgaattttatcataggacacaaacaactatatcagtgcatgagtacgatcctgtcgttggtggaaaggttgatagaacatataaactactcaacatcttagaattcagcagtgctcgtaagcgtatgtctgttattgtgaggacagaagagggtcggctatttctgttctgcaaaggagctgacagtgtaatattcgaaaggctctccaaggataatggaacagctcatctgaccaaaacaaagtgtcacattgatgagtattctgaggcaggtctccggaccctggcacttgcatattgtgaacttactgaagaacaatatgttgtatggaatcaggattactcgtctgccaagaattctgtacatactgatcatgttgcagctgttgagaaggtgtcagaagacattgagaaggatttggttcttttgggtgctactgctgtagaggatagattgcaaaatggggtccctgagtgtatttataaacttgcacaagctggaattaagatctggattttaactggagacaagttggagacagctgtaaacataggttacgcttgtaacctactgaggaaagagatggaggaaatttttatcacactggagaactcaagtacaagtgcttcagaggggtccagtggagaaggaaacaaaattgccacatttgaggaaattgatagaaaattaaaagatgctagaggaaagatttcccaaaaaggaacttcaacttcatttgctcttatcattgacggcaatgctctgacacatgctctcacgggcagccttaagaactcatttctggatctagcagtcaactgtgcatctgttttatgttgtcgggtttcaccaaaacaaaaggcactgtttgcagcttctatagcactggatact

SEQ ID NO: 209817 - DNA, 2540 bp, Zea Mays
atcagcttttatactcattccttcaccctctcccatctctcgcctcgcctccccacgcgagcgagcccaacacgcaaacggaacgcttccgcgcccctccgccttatccgatggcgtccctcaccaccaccgcccccgcggcttcgtccatatctccccacgccggatcgaagcggccgctcctcgcgggcgacgacgcgccctggcgggccaccgcggccacctccgcggggcaggggatccgacccgtcccgcgcatcaaccacgcctccgtcctccgcgtttccacgcaggaagactccgccgcctacgccctcgccatcatgaagcatccggatccgattggcgaggggctggctatggaggcgttcgcggaggcagccgggccggagtgcatcgtgcccggacagcaagcgcctctaaggcttatggggctcaaggtctggcccgttgatatagatatgaagttcctagagccatttggacgggaactacattcaatgaaaaaagtgagtctttagcattagacttgtttacatgttttcccttgatgaatcgctgtttgtttgagttatgaaacgctcagttataaactagttagaaataatatgtgctaggtcacgatataaccttgtatggttttagcaatcatcaggtgggacatctgttcagtgttttcctgtaatttacatgattcatggatgtgtagccattgacagacttgtttgcactaagttgagagagataagtaggatatgcagttatcaatgtattaatacaccattatgtcatgataaacacgagaaaaaaaaaactcggccggggagggaaagaccgccctcccggtattatattaagaagagaccgaaacatggtcccggccgagaaaatccccgaaccctggccccccatcactagcgggccgtcaccgcccactctgcaacggcccagccggagggtggcgcgcaggacgtaacccgggagcgggtggggcacaacgaggggatttttttaaccaagccagaaattcgcccccgagggggatcgaacccaggacctggaggtgctactcggaagccttaaccattacgctagaggccctttcgcataaacacgagaaacacagtaagcatcatactcttcctttatagtgcaaacttgctaagtgcagccatatgtaaattggttatgtccctcttgcctaatatttgagggcaaatatagtggttctaatggtatagggaatttgtccactattgacttattgagcatggtttgaaagctctacttatatagtccagcaaacttttatctgagtagtttgaagaaatcaagaggataattacttttctgtttaagatttcttactcaagacatagatcctagttcactggattcatttctgaaatgaatgtagttttagatgagactctcacttgtgtaaggccagggtagtgctagagcagtggtatgtgctgtccatttatctttgttggaagagacatcatataggacctggtcttgtacatgtaaccatgattccacacttttgtgtcaggcaggcaatgaagtagccattatgccagttcatgtcctcttagtagttagtggtgttggagaggggatttgctgttgttgggttcatggtcttcgtcttgttgactgtttagaccctgctctgtatcctcttagcttttggggagtatgtgcagatgcgcgagctgtttttgctaatcaattgtgcaataatcaaattgcttagatcatatgtgttcttatgctctgctcaaaaagagacctaagcgggagatagttgtattgttagaatgttagttactctgtgctgttgcgaagacgagaatctttgattcttgtcctcaatattgccttccttataaagttacttcatatatcatgctccctattctaatattattattctgcaattttgcagttcatggacaaatcgtgcagtgttatggactcatctatggcaaacaagtaggcacatggcacatcagttccgcccaatacagctgttgttgtatccacctgcttcctgaagttacaagacctgaaaaatagaagagacattggagagaagccacattcttttgcgtatcttgctcaccgtcacctgacgaacaaaatatgacatcgggagtgcagtaacgattagtgagtggtcctgtattgagcctgggtgcagcctctgccagtataagtgctctacgtgttatacatttttttatgtccatgaaacattgatccactgagaaaatatatcttcaggtgccaatctacgacaataccttctgttctgttgctagatcaaatttatttgttctcaggctcagggcacatgcgatggtgaagtcagaattcttgagttagcctttgtgaggcgtgttggttcttcggaagagttgagcttctttgtctccgtgttttcctgtaatttccagttaaatgttcgtttaggatctagatactctttcaggccacacaagcctcccgtcggttcacgcatggtactgccg

SEQ ID NO: 209818 - DNA, 2471 bp, Zea Mays
acacatagccggaagcaaaaccaagggaagggctaaacctcccttggcacaagccctcaaccacctccaccaccacctttaaaagaaggtgctaaagggctgtcctgcagagaaaaagagaggagtgccccccacaaacctttccttgcattccactgaaatcttcctatctgcaaccatgcagttgctcaattctggcctcagctgaagcccaaccatccattgttatataagtcgctgcagcctttgcaatttcccactccttcagccaccatcggtcattgaaggagcttcgtgccaccagagaaggtgttcgccgtgcataatcacagactatatacattccacagacctgtaaagctctgtgaatttggagctcccacaggttctgcattggcgttgagatggggaggcattcttgctgctacaagcaaaagttgagaaaggggctctggtcccccgaggaggatgagaaactcatgaaccacataacaaagcatggccatggctgctggagttctattcccaaactcgctgggctccaaaggtgcggaaagagttgtaggctgaggtggataaactatctgaggccagacctcaagagaggggcattctcccaagacgaagaagacctcatcattgagctgcacgctgtccttggaaacaggtggtctcaaattgcagctcagctgccagggaggactgataatgagatcaagaatctatggaactcgtgcatcaagaagaagctcaggcagaaaggcattgatcccaacacccacaagccccttactgaggctgatcgcagcggagcagctcccaccatcagcaccgagagaacctcagggtccagcgaaatcaacccatcaagcgctggtgctctgggaaacttgagccacctcctcagcgagacggctcaatcatcaatgctgatgcccgtgtatgacaagaatcgcgctgaaactccaaacttggcacgccctaaggtgccaccaaaggagttgttcctggagcagcttactgctggacacgagagtccatcaacctgccgctcatcaggccaaactctctatttccctttccaacagcctttaggctacaacagtgagagtggcagtggcgatggggcgaatatgaattcactctggttcaaccagagtgacttcaactgcagcacaatttctacagtgatgccgccagcttcaccatcggccctctctacatcaatggggctgaatcttccacctgataattctcgacatggaggaactggcattggaagtactgcagtagattcattctactgggatggtactaatcctagcagcagtagcagtactgggagcagaggaagcaacagtatgggatttgaaccacagagcacgagctcaattctggagaacagtgtcttccaatggacagacatcggacaagaaaaagatacaagagctcacctggtagaggaacttaagtggcctgacttgctccatggaacctttgccgagacgaccacagccatgcagaaccagagccagacgctctatgatgacgtgatcaaggcagagagccaattcagcatggaagggatatgtgcttcttggttccagaatcagcagccacagcaacagcttcaggcaacaccagacatgtatgacaaggacttgcaaagaatgcaactgtcttttgagaatatctaggcattatgttccacatggaacagagcagatcagcagaagcagaaatttgtaattttcagagattcgtgggcagaactatgctgaattgcttacatagatacattaagttgatacagaaatcatcctccacagctgctcctcagttgaagacctggcaatatcaaggaaaggacagccctggcattagaagtggcagcagaatgcatacaaaagaatggaaaacgattggttgatttgatagggtacaaaggagcaatcattctcaagaagaagtaaacacattcaggaaagaaaaaaggaagaaactattcatgaatatctacctaccatgtagattgggtaatctatgaagcctcaatgtgaaggcaagaaaattggtggagctcggaagtctcaaaatcaaaaagatggcgtgtgagatctacaacaagactcgtggttggaggccagttgacagacgaatccgatgaaatgaaacatgttttgttatctggttattttggttcaataactgtgcggtcgttctacttcttctcccttgtagcgcctagctacaggaaaaactatgagatagaaatgctgcttgctgctttggtgtgatctgtgtgaactttgatgttggtcagctctgtgttactttttgtgttgctactagtagtttggtttggtcagggtttggtcctttttagctgatagttgtgtgttttgtcagctttaaaattctgggtgctcatgtggtattgtaagaacttatgtctctttctatttcgtaat

SEQ ID NO: 209819 - DNA, 2875 bp, Zea Mays
acacatagccggaagcaaaaccaagggaagggctaaacctcccttggcacaagccctcaaccacctccaccaccacctttaaaagaaggtgctaaagggctgtcctgcagagaaaaagagaggagtgccccccacaaacctttccttgcattccactgaaatcttcctatctgcaaccatgcagttgctcaattctggcctcagctgaagcccaaccatccattgttatataagtcgctgcagcctttgcaatttcccactccttcagccaccatcggtcattgaaggagcttcgtgccaccagagaaggtgttcgccgtgcataatcacagactatatacattccacagacctgtaaagctctgtgaatttggagctcccacaggttctgcattggcgttgagatggggaggcattcttgctgctacaagcaaaagttgagaaaggggctctggtcccccgaggaggatgagaaactcatgaaccacataacaaagcatggccatggctgctggagttctattcccaaactcgctgggctccaaaggtgcggaaagagttgtaggctgaggtggataaactatctgaggccagacctcaagagaggggcattctcccaagacgaagaagacctcatcattgagctgcacgctgtccttggaaacaggtggtctcaaattgcagctcagctgccagggaggactgataatgagatcaagaatctatggaactcgtgcatcaagaagaagctcaggcagaaaggcattgatcccaacacccacaagccccttactgaggctgatcgcagcggagcagctcccaccatcagcaccgagagaacctcagggtccagcgaaatcaacccatcaagcgctggtgctctgggaaacttgagccacctcctcagcgagacggctcaatcatcaatgctgatgcccgtgtatgacaagaatcgcgctgaaactccaaacttggcacgccctaaggtgccaccaaaggagttgttcctggagcagcttactgctggacacgagagtccatcaacctgccgctcatcaggccaaactctctatttccctttccaacagcctttaggctacaacagtgagagtggcagtggcgatggggcgaatatgaattcactctggttcaaccagagtgacttcaactgcagcacaatttctacagtgatgccgccagcttcaccatcggccctctctacatcaatggggctgaatcttccacctgataattctcgacatggaggaactggcattggaagtactgcagtagattcattctactgggatggtactaatcctagcagcagtagcagtactgggagcagaggaagcaacagtatgggatttgaaccacagagcacgagctcaattctggagaacagtgtcttccaatggacagacatcggacaagaaaaagatacaagagctcacctggtagaggaacttaagtggcctgacttgctccatggaacctttgccgagacgaccacagccatgcagaaccagagccagacgctctatgatgacgtgatcaaggcagagagccaattcagcatggaagggatatgtgcttcttggttccagaatcagcagccacagcaacagcttcaggcaacaccagacatgtatgacaaggacttgcaaagaatgcaactgtcttttgagaatatctaggcattatgttccacatggaacagagcagatcagcagaagcagaaatttgtaattttcagagattcgtgggcagaactatgctgaattgcttacatagatacattaagttgatacagaaatcatcctccacagctgctcctcagttgaagacctggcaatatcaaggaaaggacagccctggcattagaagtggcagcagaatgcatacaaaagtacgttctagagtctctttttctttatcttgaaaaatgatgtttccttctgtacacaacgactcaacttttgcatatttgagtttttgttcactctctggtggaaattaaataaatataggcagccatgggcaaaactgcatgtgttggtagctctcaccatgcaagtagacccaaacatttcaactgctgccatgcacgtccatgcaaattaattattgcatgttgtattttctttttcttttttttgataagttgccgacaaacgacagttgtatatttgtaagaagaaatttggaatgttgacctgagagctattttcttccccctttcactttcccgtttctgtcgtaaacttttctgtgtggagaacccaagctacttgagcgctttctacttgaatacaggaatggaaaacgattggttgatttgatagggtacaaaggagcaatcattctcaagaagaagtaaacacattcaggaaagaaaaaaggaagaaactattcatgaatatctacctaccatgtagattgggtaatctatgaagcctcaatgtggcaagaaaattggtggagctcggaagtctcaaaatcaaaaagatggcgtgtgagatctacaacaagactcgtggttggaggccagttgacagacgaatccgatgaaatgaaacatgttttgttatctggttattttggttcaataactgtgcggtcgttctacttcttctcccttgtagcgcctagctacaggaaaaactatgagatagaaatgctgcttgctgctttggtgtgatctgtgtgaactttgatgttggtcagctctgtgttactttttgtgttgctactagtagtttggtttggtcagggtttggtcctttttagctgatagttgtgtgttttgtcagctttaaaattctgggtgctcatgtggtattgtaagaacttatgtctctttctatttcgtaat

SEQ ID NO: 209820 - DNA, 1963 bp, Zea Mays
aattcccatcagggtccgtcacgaaccggtgggcggagtcttccagaggccaatattctgacacagcggaccccgtgggccgtggccgtctcgtttcccgtctcccgcatagaggttcccaaaccattctctttcgctttcgtctccgcaccctagggtttctgtgcctcgccagcgaagcgatgcagccgccgcaccaaccgccgatgaacgggcaacactcccagcctccgccgcaaggacccgtggtgcccatgcctccgcagcagcaggcgcccccgctgccgtactaccagcagcagcaggcgccgcagtactaccaacaggccctcccgcagccgtgggggcagcagcagcagtacgctgcaccgccgccgcagtacccgcctccgcctcagacgcagcattacgcgacaccaccgcagcagtacgcccctctgccgcagcagcagtacgctcctccaccgcagcagcagtacgctccttcgccatatggtaccacgccgggaagcggtgaagtcaggacgctgtggatcggagatcttcagcactggatggacgagaactacctccactacaacgcctttgcggccgtggcccagcagattgcttctgtgaaaattatacggaacaagcaaactgggcactcagaaggctatggttttattgagttttactctcgagctgctgcagaacatactctgatgaacttcaatgggcagatgatgccgaatgttgagatgacttttaagctgaactgggcttctgctagcactggtgataagcgtggagatagtggttctgatcgcacaatatttgttggtgatttggctcatgatgttactgactccatgttggaagatgtgttcagagctaagtacccttcagttagaggagctaatgttgttgttgataggatgactggatggcccaaaggatttggtttcgtgcgttttggagatctgaatgagcaggcacgtgctatgactgagatgaatggaatgttgttatctacaaggcaaatgaggattggtgctgcagctaacaagaagaatagggatgctcagcagacatatgcaactgacggatgtcatgccatctgcatttaaggcctggaattgtcttcagatgtctatgtaaccagtgcctcggttaggagcataccagagctctaaaggaaattcttcagagaatgatcctaacaatacaacagtctttgtaggtgggttagattccaatgtaaatgaggagtatctaaggcaaatttttactccgtatggagaaatttcctatgtgaagattcctgtaggcaaacattgtggatttgttcaatttaccagcaggtcatgtgcagaggaagccatccgaatgctgaatgggagtcaggttggtgggcagaaagttcggctttcatggggccgtagtcctcaaaacagacaggcttctcagcatgatgccaacaaccagtataatgggaacagctattatggataccaacagccgggttatgaaggttatggctatggtgcttccagtgcacaagacccaagcatgcaaaactactacggatactctggttgtggtaactatgagcagcagcagccaacacaggaacagcagctgcagcagcctccaccaccacagcactgacgattgcttgcacacctctggagtgctatcggattagagtgatggtggagtcacggggcgctgcaatgagacatcctatatagatatgaaggtcatatagtcgcataggagtggttagactttcttggggaccagtgttaatcgatgatggcactccggatgtttcttctgtttgtcgttgagatcttgactgttgaagtgtgctctgttgatattaatgtcttcgtcagattgttaatttgcttgtttcagatgtcccagaaccatttgtacttagggagtgtttgaatgcactagacctaacagatagttg

SEQ ID NO: 209821 - DNA, 3067 bp, Zea Mays
aattcccatcagggtccgtcacgaaccggtgggcggagtcttccagaggccaatattctgacacagcggaccccgtgggccgtggccgtctcgtttcccgtctcccgcatagaggttcccaaaccattctctttcgctttcgtctccgcaccctagggtttctgtgcctcgccagcgaagcgatgcagccgccgcaccaaccgccgatgaacgggcaacactcccagcctccgccgcaaggacccgtggtgcccatgcctccgcagcagcaggcgcccccgctgccgtactaccagcagcagcaggcgccgcagtactaccaacaggccctcccgcagccgtgggggcagcagcagcagtacgctgcaccgccgccgcagtacccgcctccgcctcagacgcagcattacgcgacaccaccgcagcagtacgcccctctgccgcagcagcagtacgctcctccaccgcagcagcagtacgctccttcgccatatggtaccacgccgggaagcggtgaagtcaggacgctgtggatcggagatcttcagcactggatggacgagaactacctccactacaacgcctttgcggccgtggcccagcagattgcttctgtgaaaattatacggaacaagcaaactgggcactcagaaggctatggttttattgagttttactctcgagctgctgcagaacatactctgatgaacttcaatgggcagatgatgccgaatgttgagatgacttttaagctgaactgggcttctgctagcactggtgataagcgtggagatagtggttctgatcgcacaatatttgttggtgatttggctcatgatgttactgactccatgttggaagatgtgttcagagctaagtacccttcagttagaggagctaatgttgttgttgataggatgactggatggcccaaaggatttggtttcgtgcgttttggagatctgaatgagcaggcacgtgctatgactgagatgaatggaatgttgttatctacaaggcaaatgaggattggtgctgcagctaacaagaagaatagggatgctcagcagacatatgcaactgacggatgtcatgccatctgcatttaaggcctggaattgtcttcagatgtctatgtaaccagtgcctcggttaggtcagtgttttaatttcatgagattttggttctaaagctctttcactctcaggcatcaacttatctggacttactctccagtcttcaatgctttcagtttatttttttaaaaaatactgcccatcatgttccagtactcgtgatagctaatatgtacaattttatatgttgttgtggtatttatttttatatattccccctttttctcatctctggattggatttcttatatctgcacctaatgtcacctgtaacatgtttgttactccgcattgtactgtatagtgcaggaagcttttagtttcacctgtagcttatctggtctcctcaatgtaccatttttttagtcattccaaattctgttgcggtgcagaaaatatttttttttgttcaactttccactgttgtgcctgcacttcctctggtttattattccatgctgcagattcaattttctttttatttctcattagttttccctgaatgcactttgtagttatgcatttttgtttgttgcccacatattctgcttatctgagtttgggtttggtagttggtatggcttagcaacactgtaaagtttgatttcttatttgaaatattttatcaacagttgatgactcagaataagattaaaaaatcgaaatagttgaactaatatgttctacttcatgcccgtgttagtgcatgaggatatttccaggttgtgattaatacacgcagttgctgctacatagtttttgtcatttaaagatactgggtattgtgtagataatctgagtttatctactgacagtttgactatagtaaaatttcttctgttgcagctaagcagtacatgcagtgaacaactaattgaagcaaggatttcttgtattcttcctctgacctcattggaatgctaaccatttctttatttgttttatttacttacatcattgcaaatgctgttgactattttggatccttactagaaatatgttaagctattacttttgctggccagaatatgggtgtccagtgttccgttgctattattttgggggtctgaattcccagccaatttgccaactttgttgctgatggtttgtcttgccattgcaggagcataccagagctctaaaggaaattcttcagagaatgatcctaacaatacaacagtctttgtaggtgggttagattccaatgtaaatgaggagtatctaaggcaaatttttactccgtatggagaaatttcctatgtgaagattcctgtaggcaaacattgtggatttgttcaatttaccagcaggtcatgtgcagaggaagccatccgaatgctgaatgggagtcaggttggtgggcagaaagttcggctttcatggggccgtagtcctcaaaacagacaggcttctcagcatgatgccaacaaccagtataatgggaacagctattatggataccaacagccgggttatgaaggttatggctatggtgcttccagtgcacaagacccaagcatgcaaaactactacggatactctggttgtggtaactatgagcagcagcagccaacacaggaacagcagctgcagcagcctccaccaccacagcactgacgattgcttgcacacctctggagtgctatcggattagagtgatggtggagtcacggggcgctgcaatgagacatcctatatagatatgaaggtcatatagtcgcataggagtggttagactttcttggggaccagtgttaatcgatgatggcactccggatgtttcttctgtttgtcgttgagatcttgactgttgaagtgtgctctgttgatattaatgtcttcgtcagattgttaatttgcttgtttcagatgtcccagaaccatttgtacttagggagtgtttgaatgcactagacctaacagatagttg

SEQ ID NO: 209822 - DNA, 2936 bp, Zea Mays
aattcccatcagggtccgtcacgaaccggtgggcggagtcttccagaggccaatattctgacacagcggaccccgtgggccgtggccgtctcgtttcccgtctcccgcatagaggttcccaaaccattctctttcgctttcgtctccgcaccctagggtttctgtgcctcgccagcgaagcgatgcagccgccgcaccaaccgccgatgaacgggcaacactcccagcctccgccgcaaggacccgtggtgcccatgcctccgcagcagcaggcgcccccgctgccgtactaccagcagcagcaggcgccgcagtactaccaacaggccctcccgcagccgtgggggcagcagcagcagtacgctgcaccgccgccgcagtacccgcctccgcctcagacgcagcattacgcgacaccaccgcagcagtacgcccctctgccgcagcagcagtacgctcctccaccgcagcagcagtacgctccttcgccatatggtaccacgccgggaagcggtgaagtcaggacgctgtggatcggagatcttcagcactggatggacgagaactacctccactacaacgcctttgcggccgtggcccagcagattgcttctgtgaaaattatacggaacaagcaaactgggcactcagaaggctatggttttattgagttttactctcgagctgctgcagaacatactctgatgaacttcaatgggcagatgatgccgaatgttgagatgacttttaagctgaactgggcttctgctagcactggtgataagcgtggagatagtggttctgatcgcacaatatttgttggtgatttggctcatgatgttactgactccatgttggaagatgtgttcagagctaagtacccttcagttagaggagctaatgttgttgttgataggatgactggatggcccaaaggatttggtttcgtgcgttttggagatctgaatgagcaggcacgtgctatgactgagatgaatggaatgttgttatctacaaggcaaatgaggattggtgctgcagctaacaagaagaatagggatgctcagcagacatatgcaactgacggatgtcatgccatctgcatttaaggcctggaattgtcttcagatgtctatgtaaccagtgcctcggttaggtcagtgttttaatttcatgagattttggttctaaagctctttcactctcaggcatcaacttatctggacttactctccagtcttcaatgctttcagtttatttttttaaaaaatactgcccatcatgttccagtactcgtgatagctaatatgtacaattttatatgttgttgtggtatttatttttatatattccccctttttctcatctctggattggatttcttatatctgcacctaatgtcacctgtaacatgtttgttactccgcattgtactgtatagtgcaggaagcttttagtttcacctgtagcttatctggtctcctcaatgtaccatttttttagtcattccaaattctgttgcggtgcagaaaatatttttttttgttcaactttccactgttgtgcctgcacttcctctggtttattattccatgctgcagattcaattttctttttatttctcattagttttccctgaatgcactttgtagttatgcatttttgtttgttgcccacatattctgcttatctgagtttgggtttggtagttggtatggcttagcaacactgtaaagtttgatttcttatttgaaatattttatcaacagttgatgactcagaataagattaaaaaatcgaaatagttgaactaatatgttctacttcatgcccgtgttagtgcatgaggatatttccaggttgtgattaatacacgcagttgctgctacatagtttttgtcatttaaagatactgggtattgtgtagataatctgagtttatctactgacagtttgactatagtaaaatttcttctgttgcagctaagcagtacatgcagtgaacaactaattgaagcaaggatttcttgtattcttcctctgacctcattggaatgctaaccatttctttatttgttttatttacttacatcattgcaaatgctgttgactattttggatccttactagaaatatgttaagctattacttttgctggccagaatatgggtgtccagtgttccgttgctattattttgggggtctgaattcccagccaatttgccaactttgttgctgatggtttgtcttgccattgcaggagcataccagagctctaaaggaaattcttcagagaatgatcctaacaatacaacagtcatgtgcagaggaagccatccgaatgctgaatgggagtcaggttggtgggcagaaagttcggctttcatggggccgtagtcctcaaaacagacaggcttctcagcatgatgccaacaaccagtataatgggaacagctattatggataccaacagccgggttatgaaggttatggctatggtgcttccagtgcacaagacccaagcatgcaaaactactacggatactctggttgtggtaactatgagcagcagcagccaacacaggaacagcagctgcagcagcctccaccaccacagcactgacgattgcttgcacacctctggagtgctatcggattagagtgatggtggagtcacggggcgctgcaatgagacatcctatatagatatgaaggtcatatagtcgcataggagtggttagactttcttggggaccagtgttaatcgatgatggcactccggatgtttcttctgtttgtcgttgagatcttgactgttgaagtgtgctctgttgatattaatgtcttcgtcagattgttaatttgcttgtttcagatgtcccagaaccatttgtacttagggagtgtttgaatgcactagacctaacagatagttg

SEQ ID NO: 209823 - DNA, 3214 bp, Zea Mays
aattcccatcagggtccgtcacgaaccggtgggcggagtcttccagaggccaatattctgacacagcggaccccgtgggccgtggccgtctcgtttcccgtctcccgcatagaggttcccaaaccattctctttcgctttcgtctccgcaccctagggtttctgtgcctcgccagcgaagcgatgcagccgccgcaccaaccgccgatgaacgggcaacactcccagcctccgccgcaaggacccgtggtgcccatgcctccgcagcagcaggcgcccccgctgccgtactaccagcagcagcaggcgccgcagtactaccaacaggccctcccgcagccgtgggggcagcagcagcagtacgctgcaccgccgccgcagtacccgcctccgcctcagacgcagcattacgcgacaccaccgcagcagtacgcccctctgccgcagcagcagtacgctcctccaccgcagcagcagtacgctccttcgccatatggtaccacgccgggaagcggtgaagtcaggacgctgtggatcggagatcttcagcactggatggacgagaactacctccactacaacgcctttgcggccgtggcccaattgcttctgtgaaaattatacggaacaagcaaactgggcactcagaaggctatggttttattgagttttactctcgagctgctgcagaacatactctgatgaacttcaatgggcagatgatgccgaatgttgagatgacttttaagctgaactgggcttctgctagcactggtgataagcgtggagatagtggttctgatcgcacaatatttgttggtgatttggctcatgatgttactgactccatgttggaagatgtgttcagagctaagtacccttcagttagaggagctaatgttgttgttgataggatgactggatggcccaaaggatttggtttcgtgcgttttggagatctgaatgagcaggcacgtgctatgactgagatgaatggaatgttgttatctacaaggcaaatgaggattggtgctgcagctaacaagaagaatagggatgctcagcagacatatgcaactgacggatcctgcaggggtactgattatgagagcatctaacttctaggtgcatcactgcatcttgaaaactaaaacccacttacatattctggtttctctttccatttttcttgctggttgatagtgttttcgtaccagttctctttctagtcattccaccgcaacagctcacatagcttctttctgtaaacagtttccttcccgctctttccgttccaagtctaagattgggataacttaacaaagtaattaaaccactgaacaaaatttgtgtttctcaaagcaggatgtcatgccatctgcatttaaggcctggaattgtcttcagatgtctatgtaaccagtgcctcggttaggtcagtgttttaatttcatgagattttggttctaaagctctttcactctcaggcatcaacttatctggacttactctccagtcttcaatgctttcagtttatttttttaaaaaatactgcccatcatgttccagtactcgtgatagctaatatgtacaattttatatgttgttgtggtatttatttttatatattccccctttttctcatctctggattggatttcttatatctgcacctaatgtcacctgtaacatgtttgttactccgcattgtactgtatagtgcaggaagcttttagtttcacctgtagcttatctggtctcctcaatgtaccatttttttagtcattccaaattctgttgcggtgcagaaaatatttttttttgttcaactttccactgttgtgcctgcacttcctctggtttattattccatgctgcagattcaattttctttttatttctcattagttttccctgaatgcactttgtagttatgcatttttgtttgttgcccacatattctgcttatctgagtttgggtttggtagttggtatggcttagcaacactgtaaagtttgatttcttatttgaaatattttatcaacagttgatgactcagaataagattaaaaaatcgaaatagttgaactaatatgttctacttcatgcccgtgttagtgcatgaggatatttccaggttgtgattaatacacgcagttgctgctacatagtttttgtcatttaaagatactgggtattgtgtagataatctgagtttatctactgacagtttgactatagtaaaatttcttctgttgcagctaagcagtacatgcagtgaacaactaattgaagcaaggatttcttgtattcttcctctgacctcattggaatgctaaccatttctttatttgttttatttacttacatcattgcaaatgctgttgactattttggatccttactagaaatatgttaagctattacttttgctggccagaatatgggtgtccagtgttccgttgctattattttgggggtctgaattcccagccaatttgccaactttgttgctgatggtttgtcttgccattgcaggagcataccagagctctaaaggaaattcttcagagaatgatcctaacaatacaacagtcatgtgcagaggaagccatccgaatgctgaatgggagtcaggttggtgggcagaaagttcggctttcatggggccgtagtcctcaaaacagacaggcttctcagcatgatgccaacaaccagtataatgggaacagctattatggataccaacagccgggttatgaaggttatggctatggtgcttccagtgcacaagacccaagcatgcaaaactactacggatactctggttgtggtaactatgagcagcagcagccaacacaggaacagcagctgcagcagcctccaccaccacagcactgacgattgcttgcacacctctggagtgctatcggattagagtgatggtggagtcacggggcgctgcaatgagacatcctatatagatatgaaggtcatatagtcgcataggagtggttagactttcttggggaccagtgttaatcgatgatggcactccggatgtttcttctgtttgtcgttgagatcttgactgttgaagtgtgctctgttgatattaatgtcttcgtcagattgttaatttgcttgtttcagatgtcccagaaccatttgtacttagggagtgtttgaatgcactagacctaacagatagttg

SEQ ID NO: 209824 - DNA, 1832 bp, Zea Mays
aattcccatcagggtccgtcacgaaccggtgggcggagtcttccagaggccaatattctgacacagcggaccccgtgggccgtggccgtctcgtttcccgtctcccgcatagaggttcccaaaccattctctttcgctttcgtctccgcaccctagggtttctgtgcctcgccagcgaagcgatgcagccgccgcaccaaccgccgatgaacgggcaacactcccagcctccgccgcaaggacccgtggtgcccatgcctccgcagcagcaggcgcccccgctgccgtactaccagcagcagcaggcgccgcagtactaccaacaggccctcccgcagccgtgggggcagcagcagcagtacgctgcaccgccgccgcagtacccgcctccgcctcagacgcagcattacgcgacaccaccgcagcagtacgcccctctgccgcagcagcagtacgctcctccaccgcagcagcagtacgctccttcgccatatggtaccacgccgggaagcggtgaagtcaggacgctgtggatcggagatcttcagcactggatggacgagaactacctccactacaacgcctttgcggccgtggcccagcagattgcttctgtgaaaattatacggaacaagcaaactgggcactcagaaggctatggttttattgagttttactctcgagctgctgcagaacatactctgatgaacttcaatgggcagatgatgccgaatgttgagatgacttttaagctgaactgggcttctgctagcactggtgataagcgtggagatagtggttctgatcgcacaatatttgttggtgatttggctcatgatgttactgactccatgttggaagatgtgttcagagctaagtacccttcagttagaggagctaatgttgttgttgataggatgactggatggcccaaaggatttggtttcgtgcgttttggagatctgaatgagcaggcacgtgctatgactgagatgaatggaatgttgttatctacaaggcaaatgaggattggtgctgcagctaacaagaagaatagggatgctcagcagacatatgcaactgacggatgtcatgccatctgcatttaaggcctggaattgtcttcagatgtctatgtaaccagtgcctcggttaggagcataccagagctctaaaggaaattcttcagagaatgatcctaacaatacaacagtcatgtgcagaggaagccatccgaatgctgaatgggagtcaggttggtgggcagaaagttcggctttcatggggccgtagtcctcaaaacagacaggcttctcagcatgatgccaacaaccagtataatgggaacagctattatggataccaacagccgggttatgaaggttatggctatggtgcttccagtgcacaagacccaagcatgcaaaactactacggatactctggttgtggtaactatgagcagcagcagccaacacaggaacagcagctgcagcagcctccaccaccacagcactgacgattgcttgcacacctctggagtgctatcggattagagtgatggtggagtcacggggcgctgcaatgagacatcctatatagatatgaaggtcatatagtcgcataggagtggttagactttcttggggaccagtgttaatcgatgatggcactccggatgtttcttctgtttgtcgttgagatcttgactgttgaagtgtgctctgttgatattaatgtcttcgtcagattgttaatttgcttgtttcagatgtcccagaaccatttgtacttagggagtgtttgaatgcactagacctaacagatagttg

SEQ ID NO: 209825 - DNA, 2602 bp, Zea Mays
gtatgtacttgtcgaacatcttcatataggtttctaaattatttttctctattatttcacacttgcttgtgtaggatcctgcaggggtactgattatgagagcatctaacttctaggtgcatcactgcatcttgaaaactaaaacccacttacatattctggtttctctttccatttttcttgctggttgatagtgttttcgtaccagttctctttctagtcattccaccgcaacagctcacatagcttctttctgtaaacagtttccttcccgctctttccgttccaagtctaagattgggataacttaacaaagtaattaaaccactgaacaaaatttgtgtttctcaaagcaggatgtcatgccatctgcatttaaggcctggaattgtcttcagatgtctatgtaaccagtgcctcggttaggtcagtgttttaatttcatgagattttggttctaaagctctttcactctcaggcatcaacttatctggacttactctccagtcttcaatgctttcagtttatttttttaaaaaatactgcccatcatgttccagtactcgtgatagctaatatgtacaattttatatgttgttgtggtatttatttttatatattccccctttttctcatctctggattggatttcttatatctgcacctaatgtcacctgtaacatgtttgttactccgcattgtactgtatagtgcaggaagcttttagtttcacctgtagcttatctggtctcctcaatgtaccatttttttagtcattccaaattctgttgcggtgcagaaaatatttttttttgttcaactttccactgttgtgcctgcacttcctctggtttattattccatgctgcagattcaattttctttttatttctcattagttttccctgaatgcactttgtagttatgcatttttgtttgttgcccacatattctgcttatctgagtttgggtttggtagttggtatggcttagcaacactgtaaagtttgatttcttatttgaaatattttatcaacagttgatgactcagaataagattaaaaaatcgaaatagttgaactaatatgttctacttcatgcccgtgttagtgcatgaggatatttccaggttgtgattaatacacgcagttgctgctacatagtttttgtcatttaaagatactgggtattgtgtagataatctgagtttatctactgacagtttgactatagtaaaatttcttctgttgcagctaagcagtacatgcagtgaacaactaattgaagcaaggatttcttgtattcttcctctgacctcattggaatgctaaccatttctttatttgttttatttacttacatcattgcaaatgctgttgactattttggatccttactagaaatatgttaagctattacttttgctggccagaatatgggtgtccagtgttccgttgctattattttgggggtctgaattcccagccaatttgccaactttgttgctgatggtttgtcttgccattgcaggagcataccagagctctaaaggaaattcttcagagaatgatcctaacaatacaacagtcatgtgcagaggaagccatccgaatgctgaatgggagtcaggttggtgggcagaaagttcggctttcatggggccgtagtcctcaaaacagacaggcttctcagcatgatgccaacaaccagtataatgggaacagctattatggataccaacagccgggttatgaaggttatggctatggtgcttccagtgcacaagacccaagcatgcaaaactactacggatactctggttgtggtaactatgagcagcagcagccaacacaggaacagcagctgcagcagcctccaccaccacagcacgtagggcacggacaatccccattgcttaaatcttactatctttccatagttcaaatttaggaaatcgactgttaaaaatcttactatcctgaaccagccaattgctgattttctgaagataatttgagccatgcagtatagaagtgcttggaaataagctatccacgtgcctgaaccgtgatttaggcctttttacttttagtgctctcaaaatcttttcccctcccctttctctctctttcttcttttggtgacatcttgttgggtttcaactctatcctaccccaacttgtttgggactaaaagtctatgttgatgttgagtgtcatgttatgagtcttctatgttgggacgtttattaggctgatgagtaattttgttgcctttcatttgcagtgacgattgcttgcacacctctggagtgctatcggattagagtgatggtggagtcacggggcgctgcaatgagacatcctatatagatatgaaggtcatatagtcgcataggagtggttagactttcttggggaccagtgttaatcgatgatggcactccggatgtttcttctgtttgtcgttgagatcttgactgttgaagtgtgctctgttgatattaatgtcttcgtcagattgttaatttgcttgtttcagatgtcccagaaccatttgtacttagggagtgtttgaatgcactagacctaacagatagttg

SEQ ID NO: 209826 - DNA, 914 bp, Zea Mays
tgcaggggtactgattatgagagcatctaacttctaggatgtcatgccatctgcatttaaggcctggaattgtcttcagatgtctatgtaaccagtgcctcggttaggagcataccagagctctaaaggaaattcttcagagaatgatcctaacaatacaacagtctttgtaggtgggttagattccaatgtaaatgaggagtatctaaggcaaatttttactccgtatggagaaatttcctatgtgaagattcctgtaggcaaacattgtggatttgttcaatttaccagcaggtcatgtgcagaggaagccatccgaatgctgaatgggagtcaggttggtgggcagaaagttcggctttcatggggccgtagtcctcaaaacagacaggcttctcagcatgatgccaacaaccagtataatgggaacagctattatggataccaacagccgggttatgaaggttatggctatggtgcttccagtgcacaagacccaagcatgcaaaactactacggatactctggttgtggtaactatgagcagcagcagccaacacaggaacagcagctgcagcagcctccaccaccacagcactgacgattgcttgcacacctctggagtgctatcggattagagtgatggtggagtcacggggcgctgcaatgagacatcctatatagatatgaaggtcatatagtcgcataggagtggttagactttcttggggaccagtgttaatcgatgatggcactccggatgtttcttctgtttgtcgttgagatcttgactgttgaagtgtgctctgttgatattaatgtcttcgtcagattgttaatttgcttgtttcagatgtcccagaaccatttgtacttagggagtgtttgaatgcactagacctaacagatagttg

SEQ ID NO: 209827 - DNA, 1300 bp, Zea Mays
gcctgatcaatcggacccgaaaactcgtatacacaatctttcgcgttgctaccaccgcggcttccttctctacccttccctcgcgtcgccatcgcaagagtatctcaactccgcctcgagacctcccccctcgctggtctcagccatggtgaaatattcgacggagccgaccaaccccaccaagtccgctaaggccatgggtcgtgacctacatgttcacttcaagaacacacgtgagacagcttttgcccttaggaagttgtcactcaccaaggccaaaagttaccttgaggatgtgatcgcccacaagcaggccatccctttccgtaggtattgtggtggtgttgggcgtactgctcaggctaagtctcgccactcaaatggtcagggacgctggcctgtcaagtctgctagattcattctagaccttctcaagaatgcagagagcaatgctgaggtgaaaggacttgatgtggataccatctatgtgtctcacattcaagttaatcaggcttagaagcagcgacgcaggacataccatgctcatggacgcatcaaccataacttacatgtcctccccatgccacatcgagctcatcttgtcggagaaggaagagccagtgaagaaagaggctgagtctcagattgcaaccaggaaggcttagagaaggggctctatcttctgtgattggcttagtgagctgaagtcaactaaggtgtatgagaaatgggctaaaaagatctcagggatggagccaccaacaaatccgctagagaggagagcgaaggttgagcggaaaaaacagttcaactccatcctctcgaacatcatgtccaagtgtgactccaaggcgagcagctcagagcccacgaaagaagagtttgagcaagcgcaacagaggctggagagcagaagggccaagaggcgcaagtgatgctgctgccagccttcttgccctatgctgaacattgtctgaaccttttggtgtgacctgaatttaccagcatgcaagtgatggttctaagacccagttttagcgtgtcagagtgtgtgtcatatctcttgtcctctcacggtacactatgttgtatggttatcggttatcaccttgccgagagggaagctctatttgatttgaaagtatcatgacatattttaccgcgacaattatcattacacatttcttcaagttatgttgcaagaataaaaattggcttcagtttcaaaattactatgcttgtcttagttgacagcttttttttgtcattacatacttgaattttcaatggtaaaatttag

SEQ ID NO: 209828 - DNA, 2147 bp, Zea Mays
ctgggctgcagccccgggcggcactcgcggcccaccagaggcccaccgtcgcgcccagccccaaatcccaaccctagctccagcctccagccgccgcagctcctctctaggctccactgctccagccgccgcgcctcctgcctggctgcctcttgcctggctgcctcctctgtcctctccacgactccacttctccagtctgagcagtctccagcgaccagaggcagcgccgcagcgcgctcggccgctcgccgttccgcgcggccgcgcctcctctccagcgtcgcgccgcgcctcctctccagcgccagcccgccaccgcggcaccgccaggcgccctgccggccagccggccagccagagccaggcgcgcaacgcgctcgaccgccgaccgccgaccgcacaccgcagcacgggactacgggagcagccgaggcccgaccgcccgagaaattcaagataaaagattttgaagcattttcaagtcttaagaactcggaagataaatttaccttgcatcatcatctcatgaacgagaagcatgcagtcgtgtaagtcctgcgatcctaactgattatgcactccaatgggctgcggagcacaaaggggagaaaaacaaaaacgagtgggaggtggccgtgggccatgttgctgctgctgacgaggcggcgcgacccatagtaaaggcgtacaacagctcacctccctcgtccagctccagccgccgtcaggcttccgacgcaacttctaactccgttcgcctccaggcgacaccatcgcccgctggcacgccgccacagcagcaggttaacacaatttggcccggagcttagttgaatcctgcttccgccactgcggacaaccatggcgtcgtcgaagctgcagctgcctgctgacgacagcgtcctcctgctcatcacccactccaatctcaccaccttcgcagcggacatccgcgtctcgcaacagaccaccgtggaggcgctcaaggacaagctctggcgcaagaccggcaccgccgtcgcttccatgcgcctccagctccgcgacgactccggcaccaagatcgccgacctcgacgacgacgccgcgccactcgcggcctacgccccctacaacggctaccggatccatgtcgttgatctcgacccttcctcactcacctcagggggttggttggaagacacttcccttgtcgacaagtacacaatgtccgatgaaacatacgataagctcgacactaactttcgaaaattcaaagaaaagatggtcccgaaaaactctccgtcagaggataaagaagaatcagaaaagcatatggaggaactatgctccaaaatcaaggtgggtgatagatgtgaagttgagcctggtgccaagaggggcactgtaaaatttgttggtagagctgaagcccttggacgtggattctgggttggagtgcaatatgatgagccacttgggaagcatgacggcatggtgaaaggcattcgcttctttgagtgccctcaaggtcatggggcaattgtgaggccagagaaagtaaaggttggcgacttcccggagagagacccatttgaagacgaggacgatgacgagatttgagtgcgtgtgcgtttggaaaagcaaggggaatgtccttgttgaattgcattcgaaacgtgtgtaaaatgaattcggagatttgagtgtgcgcgcttgcttgcatcttcttgggcaatcatagtgatcacatttcaaggcatgctgttacatctctactatttaagcgtgagctaataaattttccctccaacgcagagtatccaaaaaatggggtggattcgaatcctgctcacttgtataaagcgcatgacttctaccactataacttatttctgtctgtgttatataaattagagatattttgtgtgtatgatactaataattttaaaaaatataatatcatttaagcaaggtttacttatatatctgtagaaacagttacatatatgtgggttcttctactagtcctctgacccggaggaaaagatggagattttcgccaacttagagcatctctaacaatacctcaaaggtacgaaaaactattctaacattgtcttattttataaaacttgatcaaaaaattatattggacacccttt

SEQ ID NO: 209829 - DNA, 1853 bp, Zea Mays
ctcgcggcccaccagaggcccaccgtcgcgcccagccccaaatcccaaccctagctccagcctccagccgccgcagctcctctctaggctccactgctccagccgccgcgcctcctgcctggctgcctcttgcctggctgcctcctctgtcctctccacgactccacttctccagtctgagcagtctccagcgaccagaggcagcgccgcagcgcgctcggccgctcgccgttccgcgcggccgcgcctcctctccagcgtcgcgccgcgcctcctctccagcgccagcccgccaccgcggcaccgccaggcgccctgccggccagccggccagccagagccaggcgcgcaacgcgctcgaccgccgaccgccgaccgcacaccgcagcacgggactacgggagcagccgaggcccgaccgcccgagaaattcaagataaaagattttgaagcattttcaagtcttaagaactcggaagataaatttaccttgcatcatcatctcatgaacggttaacacaatttggcccggagcttagttgaatcctgcttccgccactgcggacaaccatggcgtcgtcgaagctgcagctgcctgctgacgacagcgtcctcctgctcatcacccactccaatctcaccaccttcgcagcggacatccgcgtctcgcaacagaccaccgtggaggcgctcaaggacaagctctggcgcaagaccggcaccgccgtcgcttccatgcgcctccagctccgcgacgactccggcaccaagatcgccgacctcgacgacgacgccgcgccactcgcggcctacgccccctacaacggctaccggatccatgtcgttgatctcgacccttcctcactcacctcagggggttggttggaagacacttcccttgtcgacaagtacacaatgtccgatgaaacatacgataagctcgacactaactttcgaaaattcaaagaaaagatggtcccgaaaaactctccgtcagaggataaagaagaatcagaaaagcatatggaggaactatgctccaaaatcaaggtgggtgatagatgtgaagttgagcctggtgccaagaggggcactgtaaaatttgttggtagagctgaagcccttggacgtggattctgggttggagtgcaatatgatgagccacttgggaagcatgacggcatggtgaaaggcattcgcttctttgagtgccctcaaggtcatggggcaattgtgaggccagagaaagtaaaggttggcgacttcccggagagagacccatttgaagacgaggacgatgacgagatttgagtgcgtgtgcgtttggaaaagcaaggggaatgtccttgttgaattgcattcgaaacgtgtgtaaaatgaattcggagatttgagtgtgcgcgcttgcttgcatcttcttgggcaatcatagtgatcacatttcaaggcatgctgttacatctctactatttaagcgtgagctaataaattttccctccaacgcagagtatccaaaaaatggggtggattcgaatcctgctcacttgtataaagcgcatgacttctaccactataacttatttctgtctgtgttatataaattagagatattttgtgtgtatgatactaataattttaaaaaatataatatcatttaagcaaggtttacttatatatctgtagaaacagttacatatatgtgggttcttctactagtcctctgacccggaggaaaagatggagattttcgccaacttagagcatctctaacaatacctcaaaggtacgaaaaactattctaacattgtcttattttataaaacttgatcaaaaaattatattggacacccttt

SEQ ID NO: 209830 - DNA, 2120 bp, Zea Mays
tcgcggcccaccagaggcccaccgtcgcgcccagccccaaatcccaaccctagctccagcctccagccgccgcagctcctctctaggctccactgctccagccgccgcgcctcctgcctggctgcctcttgcctggctgcctcctctgtcctctccacgactccacttctccagtctgagcagtctccagcgaccagaggcagcgccgcagcgcgctcggccgctcgccgttccgcgcggccgcgcctcctctccagcgtcgcgccgcgcctcctctccagcgccagcccgccaccgcggcaccgccaggcgccctgccggccagccggccagccagagccaggcgcgcaacgcgctcgaccgccgaccgccgaccgcacaccgcagcacgggactacgggagcagccgaggcccgaccgcccgagaaattcaagataaaagattttgaagcattttcaagtcttaagaactcggaagataaatttaccttgcatcatcatctcatgaacgagaagcatgcagtcgtgtaagtcctgcgatcctaactgattatgcactccaatgggctgcggagcacaaaggggagaaaaacaaaaacgagtgggaggtggccgtgggccatgttgctgctgctgacgaggcggcgcgacccatagtaaaggcgtacaacagctcacctccctcgtccagctccagccgccgtcaggcttccgacgcaacttctaactccgttcgcctccaggcgacaccatcgcccgctggcacgccgccacagcaggttaacacaatttggcccggagcttagttgaatcctgcttccgccactgcggacaaccatggcgtcgtcgaagctgcagctgcctgctgacgacagcgtcctcctgctcatcacccactccaatctcaccaccttcgcagcggacatccgcgtctcgcaacagaccaccgtggaggcgctcaaggacaagctctggcgcaagaccggcaccgccgtcgcttccatgcgcctccagctccgcgacgactccggcaccaagatcgccgacctcgacgacgacgccgcgccactcgcggcctacgccccctacaacggctaccggatccatgtcgttgatctcgacccttcctcactcacctcagggggttggttggaagacacttcccttgtcgacaagtacacaatgtccgatgaaacatacgataagctcgacactaactttcgaaaattcaaagaaaagatggtcccgaaaaactctccgtcagaggataaagaagaatcagaaaagcatatggaggaactatgctccaaaatcaaggtgggtgatagatgtgaagttgagcctggtgccaagaggggcactgtaaaatttgttggtagagctgaagcccttggacgtggattctgggttggagtgcaatatgatgagccacttgggaagcatgacggcatggtgaaaggcattcgcttctttgagtgccctcaaggtcatggggcaattgtgaggccagagaaagtaaaggttggcgacttcccggagagagacccatttgaagacgaggacgatgacgagatttgagtgcgtgtgcgtttggaaaagcaaggggaatgtccttgttgaattgcattcgaaacgtgtgtaaaatgaattcggagatttgagtgtgcgcgcttgcttgcatcttcttgggcaatcatagtgatcacatttcaaggcatgctgttacatctctactatttaagcgtgagctaataaattttccctccaacgcagagtatccaaaaaatggggtggattcgaatcctgctcacttgtataaagcgcatgacttctaccactataacttatttctgtctgtgttatataaattagagatattttgtgtgtatgatactaataattttaaaaaatataatatcatttaagcaaggtttacttatatatctgtagaaacagttacatatatgtgggttcttctactagtcctctgacccggaggaaaagatggagattttcgccaacttagagcatctctaacaatacctcaaaggtacgaaaaactattctaacattgtcttattttataaaacttgatcaaaaaattatattggacacccttt

SEQ ID NO: 209831 - DNA, 5760 bp, Zea Mays
gcggcccaccagaggcccaccgtcgcgcccagccccaaatcccaaccctagctccagcctccagccgccgcagctcctctctaggctccactgctccagccgccgcgcctcctgcctggctgcctcttgcctggctgcctcctctgtcctctccacgactccacttctccagtctgagcagtctccagcgaccagaggcagcgccgcagcgcgctcggccgctcgccgttccgcgcggccgcgcctcctctccagcgtcgcgccgcgcctcctctccagcgccagcccgccaccgcggcaccgccaggcgccctgccggccagccggccagccagagccaggcgcgcaacgcgctcgaccgccgaccgccgaccgcacaccgcagcacgggactacgggagcagccgaggcccgaccgcccgagaaattcaagataaaagattttgaagcattttcaagtcttaagaactcggaagataaatttaccttgcatcatcatctcatgaacggtatgtacaagattattgtatttatagaatttgtatcgatttatttttagactacatatttcttgaatgtttaaattatatcttacttcttgtgtcatattaaacatcatttttttgttatagtcttaacttagtaacccctcttgcatcaatcctggatccgccactggcctagaaatgtatcttaggagacgattgctgccatgtgatcttgtcttagatcctacatgaagcgactaagataccgcacactgaaaaaaacaatgtctggtcgagtacctggtctcatccaccttaagcgacgagctgtccttggacaacttcaatcttgtttccatcagtgtcgctcatgggttgcaggctatcatgcatgcctgcattctccagcaccttttggagcataggctgcttgcgagagctcgatgccatgttgcccttgcatccttgtctgactttgatgctgaggtagtatgtaagctccctcaggtcactcatgcggactccctttccttcttgaaggtgtcgatttattctcttgatttccctgtaataatgaggtcgtcgacatatatgccaaccaccagtcttgattgctcgacgttgtgcgtgtatagtccatgtttgcaggtgcttcttcaagatgctcgacaaaaatgcagaagtaatgtttaggtggcttaacaccgtgccaccatacctcgaattgaatggagtcctcgcctccacgctctgagtagacgcccgatttaggatggacacagccatggtgactgcctcccccaaaaactagccggacatcgtcttcgcctcttcatgatgctcctggccatccccatggcggtctggttccacctcttcactacgtcattctgctgaggcgtgtatgacacagtgagatgctctagatcccctcctcgacgcagtagttggcgaacgtccgcacaatgaactcaccaccgcgatttgtgcgtagcgtccccagttttcttgctggatgaaccaccaagaactgtgagtagacggccactaccttccttgctggatgatccaccaagctccattgtgcggagtccagtcaccaccacgagtggcgatgctgaggtcgaggagcgtttcaatggacaacacgatctgttcaaggtcatcaggaacataatgtagcaacttcttcactacctcctcagcgatgtcaactccgactactcgaagttggttcgcgagattcgaagcctgtccggcgaagtcctccaccatctcgcctggcttgaacgcgaggtcgccgaattccctctgaagccggttggcattcgcctccttgactcgctaagtgcccacacaaacaaaattttatggagtcccatgccttccttgttgccttgcgtgcgagctaggctcgcctacatcttcggcggcaccgcgcggagtagcgccgccagtgtgtccctgtcgtcgcggaagacgttcgtccccggctcagtcgcctccaaaaggcactaagcttggagattgacttgcatcacgagtgaccactgagcactgaccactcggcctagttagtcttcctgagcatggggtagaccgccatcgtagaactccgctcgatgagacacgttccatgacgatctccgtggagttgcgccgtccgcgaggaaaaaacctgcgacagcgaccgcctcctcctttctccgcctccatcttcccgttgactgtacaccgacactggttgaacacttttgctccgatactagttgttagaaccgagggctaccccttggctgcactcttgtcaacgttgaggaagatgaacggggattctacaagaacacagtcacccgagaaacatacattagtttttggtatggcaaaaataaaccacatattctgaactctattcacaacaatgtagactgaaacttaacacacgttcacagccacgattgaccactacacatgacgagcgagttacgcctcacacctgtgtgaaccgtgtcatcccatagctcaacgtgccatgcaagacactcaaccaaccttgcatgcccatgcatacaactgactcctaaacacacgcgtgatcgctaacattctggcccaagcacactgaatgaacgaatgaaaaacaaagtaaaactgaactaaggactataacctctgaacatgccagagttattcaacaaatatcaggtggtgtaccactagagttgtaaattctgtctcttcgcctatcgcatccagagccacatgctcttccaggagagcctgaaaaacgttcatgttgtgcttgtaagtgcttgctattgctatttcctctgctctaaatacagactgggttgataaaggaaaatgctaatcacaacattgcttacatcctcagcaatgagtagcacaccatccttatcctgcacaaacatgggacaactagtcggattaaagccatctgtttagactgttgtagctataatccatagagacaaaaacactatagaagcagtagaagccgatacaaattaaagccaagcgaacaagcatgtacaaactatattgcaccagttgaacaagaaccaactaaccttgagtgcgacgaacagaaaaggatggtgtataaatcatattgtgggcaacatcctgcagatacaaagtgtcagcaatcataagcatgccaacgaagacccaagattgattacttgtaaggggtgtttggttctagggactaaagtttagtacatgtcacatcgaatgtttggatgccaaatataagtattaaatatagtctaattataaaaataattatatagataaagactaaaaaagagacaaattttaagaataattaatctatggttaacaaatatttaatgtagtatcacattagcggattttaaagcaccatctatgattaacaaatatttaatctatgattgattatatagataaagactaaaaaagaatgtatgtgattatggaaagcaccacctcttgctgtataacagaatctgaaacggagagggaaagatgcgtgtaaagagattgtgatatttagaagcaacagatggaatgctttgcttgtgttggtcgtcatcgacctaaagaaacaggtaaaaattgtgcatcaaacgtataggaaaggaaggaagcatgattcatttacattaggaaccatgggacacagaatgaataatcaggtgaagacatacaactacctagccactgaaatttgtgctcttgaggacttgcaataagcctcaaaaagtgtggttgtgaagctttagggcctgtttggtaatgcagttttaaaataatataattttaaaataacacagcttataattatacatggcacaaatgctacaatattacattaccatagtaaaaccacgctattgtttaaaatcgaaatgtatttagttacttaaaaaaccgaaatatttgcagagaaaacaaaagaaaattaaggcactaagtggagtttccaaaactcaaaaataccatggttttagataaaccatagtatttaaaactgtattttacctgtactaaccaaatattttttggcttccaataacatgatatcattaaatactatagtattattttaaaactgtaaaaataataaacttccgatacatgttaacggggcagagaagcatgcagtcgtgtaagtcctgcgatcctaactgattatgcactccaatgggctgcggagcacaaaggggagaaaaacaaaaacgagtgggaggtggccgtgggccatgttgctgctgctgacgaggcggcgcgacccatagtaaaggcgtacaacagctcacctccctcgtccagctccagccgccgtcaggcttccgacgcaacttctaactccgttcgcctccaggcgacaccatcgcccgctggcacgccgccacagcagcaggttaacacaatttggcccggagcttagttgaatcctgcttccgccactgcggacaaccatggcgtcgtcgaagctgcagctgcctgctgacgacagcgtcctcctgctcatcacccactccaatctcaccaccttcgcagcggacatccgcgtctcgcaacagaccaccgtggaggcgctcaaggacaagctctggcgcaagaccggcaccgccgtcgcttccatgcgcctccagctccgcgacgactccggcaccaagatcgccgacctcgacgacgacgccgcgccactcgcggcctacgccccctacaacggctaccggatccatgtcgttgatctcgacccttcctcactcacctcagggggttggttggaagacacttcccttgtcgacaagtacacaatgtccgatgaaacatacgataagctcgacactaactttcgaaaattcaaagaaaagatggtcccgaaaaactctccgtcagaggataaagaagaatcagaaaagcatatggaggaactatgctccaaaatcaaggtgggtgatagatgtgaagttgagcctggtgccaagaggggcactgtaaaatttgttggtagagctgaagcccttggacgtggattctgggttggagtgcaatatgatgagccacttgggaagcatgacggcatggtgaaaggcattcgcttctttgagtgccctcaaggtcatggggcaattgtgaggccagagaaagtaaaggttggcgacttcccggagagagacccatttgaagacgaggacgatgacgagatttgagtgcgtgtgcgtttggaaaagcaaggggaatgtccttgttgaattgcattcgaaacgtgtgtaaaatgaattcggagatttgagtgtgcgcgcttgcttgcatcttcttgggcaatcatagtgatcacatttcaaggcatgctgttacatctctactatttaagcgtgagctaataaattttccctccaacgcagagtatccaaaaaatggggtggattcgaatcctgctcacttgtataaagcgcatgacttctaccactataacttatttctgtctgtgttatataaattagagatattttgtgtgtatgatactaataattttaaaaaatataatatcatttaagcaaggtttacttatatatctgtagaaacagttacatatatgtgggttcttctactagtcctctgacccggaggaaaagatggagattttcgccaacttagagcatctctaacaatacctcaaaggtacgaaaaactattctaacattgtcttattttataaaacttgatcaaaaaattatattggacacccttt

SEQ ID NO: 209832 - DNA, 2034 bp, Zea Mays
aaagtatttttggagttttgagggaatttattgttgatcttgtgtctgatcctggtacacttattccttcagatgtttctgttttgtccacagaattagacaggaatttcgtctctgataatcaacactttggccaagatgataataccaatctgttgggatcttctcttagcggtgtatcgagctcagcgtatggttcttttgagtatgagttacttgaccgaagatccacttcaagcaatgttggtccttctgatactgatggacctacaactaatctgacaagcaatcaacaaaatatgtcctcaaattcattcgataaactatcagttagcacattcacaagtgaaaataggcctgtcagtaaagaatctacaaatccagattacattattgttggaaaaaacaaagaaaaatatactgcggccgttgattcttcatcatcttcaccctctacaccagatatgggcagcgctccagctgtccggagaatgaaagtgaaggacatttcagagtacatgattaatgctgccaaggaaaatccacaattagttcagaaaatccatgaggttttacttgaaaatggtgttatggcaccacctgacctgttttcagaagattcaatggaagaaccaaaggacctcatcgtgtatgacaccaccctgtttcaaagcaaggatgaaatgaaaaggaggatgaatgagcttgggtcaagggaatacacagatcgtggtcatgatccattgttgcctcatcatcctggacatgaactccaaccaaaagtggctcctcaccgagcacctctggagtcacttaagcctgttgagggtttgggcatttaccacccacatgatatcagagatatagcatctccgtttgtttctcagtacgaaccttctgcacctcctcaggaagcttcatcccaacttacaaagcaattgcctgtcacagctgctgctgttgcaactgctgcagtggtggcatcctctatggttgctgcagccgctttatctaccaatgacgtaaactttgacgtgcctgttgctgctgcagccactgtcactgcagctgcagttgttgccacaactgctgctgttagcaagcaatatgagcactcggatcctggcaatcagctgtttagcgtaccaagtacttctcaaggaaataaatcagttgagaaagctggaggtgacctttgggacaaacaccatgttgaaactgatcatggccaagataattgtctggaccaagaagttcctcaggaagccgaacgaacctctgataaatcaaataaatcaagtgggacagaggatgtgaaatctgatcttgctttggacaatgttgcagagtttgagatccaatgggaagaaatttctattggtgaacggattggccttggatcgtttggagaagtttatagaggagaatggcatggaacagaagttgctgtcaagaagtttttgcaacaggatatttcaagtgatgctctggaagagtttagagctgaggtgcgaataatgaagaggttgcgccatcctaatgttgttctcttcatgggtgccatcactcgtgtgcctaatctttctattgtcactgaatttcttccaagaggcagtttgtttcgtttgattcaccgacccaacaaccagttagatgaaaggaagcgcttaagaatggcacttgatgtggctcgtggtatgaattatctgcataattgttcaccagttatagttcatagagatctgaaatccccgaatctactggtggacaagaattgggttgtgaaggtttgcgattttggtttgtcaagaatgaagaacaataccttcctgtcatcaagatcaacagctggaacagtgtatccaaattgcttgaagtgtgtctaactttttgtttttgggagagtgtacaggcacttgcatttgcctcacttgattatattttgttccaatgttgagtcctgtaccatgtaaattaaaattgtttccatttgttctaagtttttttgctgagctcttatatatttagagttta

SEQ ID NO: 209833 - DNA, 3919 bp, Zea Mays
gtggcttcctcctccccaaattcctctcctcgtgtcctccctcgctaccacgcttgggtgaaatgccctcgccgcctctccctgtgctcgcccaaatcgtcgcctctccctccctgtcgcccctgcgccacggtgcttcacgccgttgaagtcacttcactcatcccgccgatgcagtcgcccacaccgcctcctcccctcctccgctcaagccgcaccgcgacagctacacgccgcgatgtcagctgccagcagcgcccccctcttaacaacgtcgcgacgtcctcgtgggctaaaccccctccatcacttcttcccgtcgagatgcacaacaccgcgagatccatccaccttctccagcacccccacccccgctcaaatggtgtcgcgatgtccgccaccaacagcgccccttcccccctctcaaacaacgtcgcgacgtctgcgagttctgtgcatgtggggtcatcttggcacgatgtgcgaccatcgatgaagtagcagctgccttcccacaacgtcactatccgcctcctattgtggcagtcgggtgattgagctttaaccttgaagtcctaggataatggtggcaaacctttcttcaagtgtattagaaatgaatgaaaaacatagtaccggctgacagcggctgcggcgaagctatctgagcggtagcggagtactaaggggtggagagagggagcactgtctcatgcatgaaataaagtctccaaaacaaaagatttggtccagagcgcggccacacgggcccaacaatagcaacgtcacatggtggttgccattgtcacgtcgagctctccctctccaccaactaacagttcctgacggtggagcagaaattcattaagagcatatagggattcacaagtgattttgagcccaacaatcttgctgccatcgatactcctgatgcaagtgtatggttattctactcatggaagatctacagggaagaaattgaggtagcatataactgccgcaagggaaaatatggtgtagcagatgaggatataatcttatatggtcaatgtgtttgaattggtccaaccattgatatttcttcgcggttgctagacttgagagtcgcagttttgcatagtcctatattctatctgcactaagagtaatatatacagccaagcggacgtttggtttaacatttacaaggtatgtttggtccttttgttttttggaattaatggttgtccgatgcttgtcattcatatgagttctaatatcatgcccccttaaagtactcatcatcaaaagtttccatgtgaatgttttaaatgtagatttaaagggttgaaagacatcaaacagttattcaaacatgatcttaagtgtcgtgaaagactacaagtgaggttcaacttggcaaattgtttttctagtaactaaggagcaacaatgctatgtattttagcttgacttatatatctaagtacttacatttttggaatcgggcaaacagtgatagtttgaatcacatgttttgccaaaaggaattattagaactgttcaaaagttaggaaaaaatacatatttatgctttcttatgcacgggtaaattgctctgttcatatataaaaaaaataattgtagtattattgcttatattgattttaaatgatgaccttattagatgtgccatcgagaccacatatattagcattttgtaactaaatacaatgcatgaatatatatagatagcctttacatcgtgctacatgcttcctagaaataaggaaccattacaacatatatatttttgatgatgtacaacttcgtcatcggatataccgttccttcttttttacatacattttgataagaatgtcaaaatgttaaaaaaatagcgcgcgcatggcgcgcgttagacactagtagatttcagaactatcatgaagcgcgtgctcgctggttgttagttgttacagagcaacagcccagggaggccaagatgctacttagctactaaaaccaactgacaacaagtgcacagcccagtgggccgctaagctgcaagaaaaccctcgcccctcgttctggattgagattctctgcagaggctgcgatgttgggccgtcctgccctgcccggtgggtatatgtaagctcagaccgccaccggaaccttctcgagcccgcggccgcacacctccgcccgaagccgccagtcggactacgaacggcggcggcgcctcggctcccctgatctccctcaccggaatggacggccaggctccgccgcttctcgacgccgtcgtgctcgagccccttgcagttggcgacgagctccatccgcggcgtcctgtcgaggtggaggacgctccggccgccgctccgccctccgcccacgggcgaggtggtggatgacgccctactcgtcgcgcccgatatcgtcaagggcgaggtgatggaggacgacatcctacccgtcgcaaccgacatcatcaacgacgccgcctcggagtgccccgaggctggcagtgatggcgtcgtgctcaccgacgagctccgcaatcgcatcgtcaagcaggtggagtactatttcagcgatgagaaccttcctacggacgagttcctgctgaattatgtgaagaagaacaataagggctttgttcctattgagatcatcgcatcatttaggagaatgaagaaactcgttcaagacctctcagtaattgaagctgcactcaggacatcatcaaagctggttgtaagttcaaatgggaaacgggtcaggaggttacatccattgccacacaaagaattgaaagattcaaagaaaagcactgttttggtcgaaaatctacctccagatttctcaatggagagtattcaggaaaaattcgcaacagtgggcaaagttgtgaacataacaattaatgatccagaatcagtgaaagaattttcaactgctaagaagcctgacttcaatttaagttttaaggctcatgtacttgttgaatatgaagcagtggaggctgctgagaaggctgttactgccctaagtgatgagagcaactggagaactgggatgaaagtcaggcttctgtctaaacaaagtgtaatgggaccaggaaagtataaaaaaccttctaaagaaaatcaagatgcagtttccaaaatgattgatcagaatcaacattcaaaagaagaccagcttaaaaccttggaaaagatctccggtgctgatgcagtggggattaccaaggacagagataatttgaaacctgtttttatcactgagactgagcaccaagatcagaagccaaatgctagaggacgaaaaggatggtacaaaggtcaaggtcagatgcagcaaaatgcaaacaaacaaggcagttgtggttccgagtcattaaacaagcctatttctggaccgaggatgccagatggaacaaggggcttcacactgggacgtggtagatctcttccactacagaagtctgagaaggctgaagagtagagctaccaaaaaagatcatcgaagccgttctttgcatggaatgggacacagaagaaagggaatcttggaatggctttctctctgcaagaaatggaacacaaaagggaatctgggaatgacttgtacagaaacacaattgtctgggggtagttccgagttcactcgtatggaacacagtagaacctttgcatgtttcctgacttgcattgtgtcatatactcgtatcatgctgcatgcagcattgcagccctgtttgcaatttcagcagccgggggctggggccgtgagcccgtgaccctgcaccatccgggtctaccacgagcccccctgttctgcgaggcgtttggcccctcatccctatggatctgtactctgtaggctctccttataacgcatgattgggattgaaaaacacattgaatag

SEQ ID NO: 209834 - DNA, 4166 bp, Zea Mays
cttcctcctccccaaattcctctcctcgtgtcctccctcgctaccacgcttgggtgaaatgccctcgccgcctctccctgtgctcgcccaaatcgtcgcctctccctccctgtcgcccctgcgccacggtgcttcacgccgttgaagtcacttcactcatcccgccgatgcagtcgcccacaccgcctcctcccctcctccgctcaagccgcaccgcgacagctacacgccgcgatgtcagctgccagcagcgcccccctcttaacaacgtcgcgacgtcctcgtgggctaaaccccctccatcacttcttcccgtcgagatgcacaacaccgcgagatccatccaccttctccagcacccccacccccgctcaaatggtgtcgcgatgtccgccaccaacagcgccccttcccccctctcaaacaacgtcgcgacgtctgcgagttctgtaaggaatgatgaataactcccagtcgtgattattcttcttcagccttctatccttccgagttctttttggtgcaggtgcatgtggggtcatcttggcacgatgtgcgaccatcgatgaagtagcagctgccttcccacaacgtcactatccgcctccttcgggtgattgagctttaaccttgaagtcctaggataatggtggcaaacctttcttcaagtgtattagaaatgaatgaaaaacatagtaccggctgacagcggctgcggcgaagctatctgagcggtagcggagtactaaggggtggagagagggagcactgtctcatgcatgaaataaagtctccaaaacaaaagatttggtccagagcgcggccacacgggcccaacaatagcaacgtcacatggtggttgccattgtcacgtcgagctctccctctccaccaactaacagttcctgacggtggagcagaaattcattaagagcatatagggattcacaagtgattttgagcccaacaatcttgctgccatcgatactcctggttcgtatatttggttactcaaaacatgagatgatcctctgaagtagaaagggaaacaccgaatatgctcttgctgaaatattctatagaaagacacaattccattttggcagatgcaagtgtatggttattctactcatggaagatctacagggaagaaattgaggtagcatataactgccgcaagggaaaatatggtgtagcagatgaggatataatcttatatggtcaatgtgtttgaattggtccaaccattgatatttcttcgcggttgctagacttgagagtcgcagttttgcatagtcctatattctatctgcactaagagtaatatatacagccaagcggacgtttggtttaacatttacaaggtatgtttggtccttttgttttttggaattaatggttgtccgatgcttgtcattcatatgagttctaatatcatgcccccttaaagtactcatcatcaaaagtttccatgtgaatgttttaaatgtagatttaaagggttgaaagacatcaaacagttattcaaacatgatcttaagtgtcgtgaaagactacaagtgaggttcaacttggcaaattgtttttctagtaactaaggagcaacaatgctatgtattttagcttgacttatatatctaagtacttacatttttggaatcgggcaaacagtgatagtttgaatcacatgttttgccaaaaggaattattagaactgttcaaaagttaggaaaaaatacatatttatgctttcttatgcacgggtaaattgctctgttcatatataaaaaaaataattgtagtattattgcttatattgattttaaatgatgaccttattagatgtgccatcgagaccacatatattagcattttgtaactaaatacaatgcatgaatatatatagatagcctttacatcgtgctacatgcttcctagaaataaggaaccattacaacatatatatttttgatgatgtacaacttcgtcatcggatataccgttccttcttttttacatacattttgataagaatgtcaaaatgttaaaaaaatagcgcgcgcatggcgcgcgttagacactagtagatttcagaactatcatgaagcgcgtgctcgctggttgttagttgttacagagcaacagcccagggaggccaagatgctacttagctactaaaaccaactgacaacaagtgcacagcccagtgggccgctaagctgcaagaaaaccctcgcccctcgttctggattgagattctctgcagaggctgcgatgttgggccgtcctgccctgcccggtgggtatatgtaagctcagaccgccaccggaaccttctcgagcccgcggccgcacacctccgcccgaagccgccagtcggactacgaacggcggcggcgcctcggctcccctgatctccctcaccggaatggacggccaggctccgccgcttctcgacgccgtcgtgctcgagccccttgcagttggcgacgagctccatccgcggcgtcctgtcgaggtggaggacgctccggccgccgctccgccctccggtatggacggccaggttccacctctctacaacgtcacgcgggatcctctgaccgtatccgacgagctgcagcccacgggcgaggtggtggatgacgccctactcgtcgcgcccgatatcgtcaagggcgaggtgatggaggacgacatcctacccgtcgcaaccgacatcatcaacgacgccgcctcggagtgccccgaggctggcagtgatggcgtcgtgctcaccgacgagctccgcaatcgcatcgtcaagcaggtggagtactatttcagcgatgagaaccttcctacggacgagttcctgctgaattatgtgaagaagaacaataagggctttgttcctattgagatcatcgcatcatttaggagaatgaagaaactcgttcaagacctctcagtaattgaagctgcactcaggacatcatcaaagctggttgtaagttcaaatgggaaacgggtcaggaggttacatccattgccacacaaagaattgaaagattcaaagaaaagcactgttttggtcgaaaatctacctccagatttctcaatggagagtattcaggaaaaattcgcaacagtgggcaaagttgtgaacataacaattaatgatccagaatcagtgaaagaattttcaactgctaagaagcctgacttcaatttaagttttaaggctcatgtacttgttgaatatgaagcagtggaggctgctgagaaggctgttactgccctaagtgatgagagcaactggagaactgggatgaaagtcaggcttctgtctaaacaaagtgtaatgggaccaggaaagtataaaaaaccttctaaagaaaatcaagatgcagtttccaaaatgattgatcagaatcaacattcaaaagaagaccagcttaaaaccttggaaaagatctccggtgctgatgcagtggggattaccaaggacagagataatttgaaacctgtttttatcactgagactgagcaccaagatcagaagccaaatgctagaggacgaaaaggatggtacaaaggtcaaggtcagatgcagcaaaatgcaaacaaacaaggcagttgtggttccgagtcattaaacaagcctatttctggaccgaggatgccagatggaacaaggggcttcacactgggacgtggtagatctcttccactacagaagtctgagaaggctgaagagtagagctaccaaaaaagatcatcgaagccgttctttgcatggaatgggacacagaagaaagggaatcttggaatggctttctctctgcaagaaatggaacacaaaagggaatctgggaatgacttgtacagaaacacaattgtctgggggtagttccgagttcactcgtatggaacacagtagaacctttgcatgtttcctgacttgcattgtgtcatatactcgtatcatgctgcatgcagcattgcagccctgtttgcaatttcagcagccgggggctggggccgtgagcccgtgaccctgcaccatccgggtctaccacgagcccccctgttctgcgaggcgtttggcccctcatccctatggatctgtactctgtaggctctccttataacgcatgattgggattgaaaaacacattgaatag

SEQ ID NO: 209835 - DNA, 4395 bp, Zea Mays
cttcctcctccccaaattcctctcctcgtgtcctccctcgctaccacgcttgggtgaaatgccctcgccgcctctccctgtgctcgcccaaatcgtcgcctctccctccctgtcgcccctgcgccacggtgcttcacgccgttgaagtcacttcactcatcccgccgatgcagtcgcccacaccgcctcctcccctcctccgctcaagccgcaccgcgacagctacacgccgcgatgtcagctgccagcagcgcccccctcttaacaacgtcgcgacgtcctcgtgggctaaaccccctccatcacttcttcccgtcgagatgcacaacaccgcgagatccatccaccttctccagcacccccacccccgctcaaatggtgtcgcgatgtccgccaccaacagcgccccttcccccctctcaaacaacgtcgcgacgtctgcgagttctgtaaggaatgatgaataactcccagtcgtgattattcttcttcagccttctatccttccgagttctttttggtgcaggtgcatgtggggtcatcttggcacgatgtgcgaccatcgatgaagtagcagctgccttcccacaacgtcactatccgcctcctattgtggcagtcgggtgattgagctttaaccttgaagtcctaggataatggtggcaaacctttcttcaagtgtattagaaatgaatgaaaaacatagtaccggctgacagcggctgcggcgaagctatctgagcggtagcggagtactaaggggtggagagagggagcactgtctcatgcatgaaataaagtctccaaaacaaaagatttggtccagagcgcggccacacgggcccaacaatagcaacgtcacatggtggttgccattgtcacgtcgagctctccctctccaccaactaacagttcctgacggtggagcagaaattcattaagagcatatagggattcacaagtgattttgagcccaacaatcttgctgccatcgatactcctggttcgtatatttggttactcaaaacatgagatgatcctctgaagtagaaagggaaacaccgaatatgctcttgctgaaatattctatagaaagacacaattccattttggcagatgcaagtgtatggttattctactcatggaagatctacagggaagaaattgaggtagcatataactgccgcaagggaaaatatggtgtagcagatgaggatataatcttatatggtcaatgtgtttgaattggtccaaccattgatatttcttcgcggttgctagacttgagagtcgcagttttgcatagtcctatattctatctgcactaagagtaatatatacagccaagcggacgtttggtttaacatttacaaggtatgtttggtccttttgttttttggaattaatggttgtccgatgcttgtcattcatatgagttctaatatcatgcccccttaaagtactcatcatcaaaagtttccatgtgaatgttttaaatgtagatttaaagggttgaaagacatcaaacagttattcaaacatgatcttaagtgtcgtgaaagactacaagtgaggttcaacttggcaaattgtttttctagtaactaaggagcaacaatgctatgtattttagcttgacttatatatctaagtacttacatttttggaatcgggcaaacagtgatagtttgaatcacatgttttgccaaaaggaattattagaactgttcaaaagttaggaaaaaatacatatttatgctttcttatgcacgggtaaattgctctgttcatatataaaaaaaataattgtagtattattgcttatattgattttaaatgatgaccttattagatgtgccatcgagaccacatatattagcattttgtaactaaatacaatgcatgaatatatatagatagcctttacatcgtgctacatgcttcctagaaataaggaaccattacaacatatatatttttgatgatgtacaacttcgtcatcggatataccgttccttcttttttacatacattttgataagaatgtcaaaatgttaaaaaaatagcgcgcgcatggcgcgcgttagacactagtagatttcagaactatcatgaagcgcgtgctcgctggttgttagttgttacagagcaacagcccagggaggccaagatgctacttagctactaaaaccaactgacaacaagtgcacagcccagtgggccgctaagctgcaagaaaaccctcgcccctcgttctggattgagattctctgcagaggctgcgatgttgggccgtcctgccctgcccggtgggtatatgtaagctcagaccgccaccggaaccttctcgagcccgcggccgcacacctccgcccgaagccgccagtcggactacgaacggcggcggcgcctcggctcccctgatctccctcaccggaatggacggccaggctccgccgcttctcgacgccgtcgtgctcgagccccttgcagttggcgacgagctccatccgcggcgtcctgtcgaggtggaggacgctccggccgccgctccgccctccggtatggacggccaggttccacctctctacaacgtcacgcgggatcctctgaccgtatccgacgagctgcagcccacgggcgaggtggtggatgacgccctactcgtcgcgcccgatatcgtcaagggcgaggtgatggaggacgacatcctacccgtcgcaaccgacatcatcaacgacgccgcctcggagtgccccgaggctggcagtgatggcgtcgtgctcaccgacgagctccgcaatcgcatcgtcaagcaggtggagtactatttcagcgatgagaaccttcctacggacgagttcctgctgaattatgtgaagaagaacaataagggctttggatgtgaattttatgattattatagtggtgtcagggacaatgtatttggtgttcctgttcttagtttttttagccgagactcaaattttacacaagcttatgcttttattgtgtgtgtttctgcattagatattggtgcatttcctattgagatcatcgcatcatttaggagaatgaagaaactcgttcaagacctctcagtaattgaagctgcactcaggacatcatcaaagctggttgtaagttcaaatgggaaacgggtcaggaggttacatccattgccacacaaagaattgaaagattcaaagaaaagcactgttttggtcgaaaatctacctccagatttctcaatggagagtattcaggaaaaattcgcaacagtgggcaaagttgtgaacataacaattaatgatccagaatcagtgaaagaattttcaactgctaagaagcctgacttcaatttaagttttaaggctcatgtacttgttgaatatgaagcagtggaggctgctgagaaggctgttactgccctaagtgatgagagcaactggagaactgggatgaaagtcaggcttctgtctaaacaaagtgtaatgggaccaggaaagtataaaaaaccttctaaagaaaatcaagatgcagtttccaaaatgattgatcagaatcaacattcaaaagaagaccagcttaaaaccttggaaaagatctccggtgctgatgcagtggggattaccaaggacagagataatttgaaacctgtttttatcactgagactgagcaccaagatcagaagccaaatgctagaggacgaaaaggatggtacaaaggtcaaggtcagatgcagcaaaatgcaaacaaacaaggcagttgtggttccgagtcattaaacaagcctatttctggaccgaggatgccagatggaacaaggggcttcacactgggacgtggtagatctcttccactacagaagtctgagaaggctgaagagtagagctaccaaaaaaggcctgttaagaaccttatccaaagaagctgggtaaaatctaacagaaaacctttgcttttttttttttgaaacttaagatcatcgaagccgttctttgcatggaatgggacacagaagaaagggaatcttggaatggctttctctctgcaagaaatggaacacaaaagggaatctgggaatgacttgtacagaaacacaattgtctgggggtagttccgagttcactcgtatggaacacagtagaacctttgcatgtttcctgacttgcattgtgtcatatactcgtatcatgctgcatgcagcattgcagccctgtttgcaatttcagcagccgggggctggggccgtgagcccgtgaccctgcaccatccgggtctaccacgagcccccctgttctgcgaggcgtttggcccctcatccctatggatctgtactctgtaggctctccttataacgcatgattgggattgaaaaacacattgaatag

SEQ ID NO: 209836 - DNA, 3233 bp, Zea Mays
tcctcctccccaaattcctctcctcgtgtcctccctcgctaccacgcttgggtgaaatgccctcgccgcctctccctgtgctcgcccaaatcgtcgcctctccctccctgtcgcccctgcgccacggtgcttcacgccgttgaagtcacttcactcatcccgccgatgcagtcgcccacaccgcctcctcccctcctccgctcaagccgcaccgcgacagctacacgccgcgatgtcagctgccagcagcgcccccctcttaacaacgtcgcgacgtcctcgtgggctaaaccccctccatcacttcttcccgtcgagatgcacaacaccgcgagatccatccaccttctccagcacccccacccccgctcaaatggtgtcgcgatgtccgccaccaacagcgccccttcccccctctcaaacaacgtcgcgacgtctgcgagttctagtaccggctgacagcggctgcggcgaagctatctgagcggtagcggagtactaaggggtggagagagggagcactgtctcatgcatgaaataaagtctccaaaacaaaagatttggtccagagcgcggccacacgggcccaacaatagcaacgtcacatggtggttgccattgtcacgtcgagctctccctctccaccaactaacagttcctgacggtggagcagaaattcattaagagcatatagggattcacaagtgattttgagcccaacaatcttgctgccatcgatactcctggttcgtatatttggttactcaaaacatgagatgatcctctgaagtagaaagggaaacaccgaatatgctcttgctgaaatattctatagaaagacacaattccattttggcagatgcaagtgtatggttattctactcatggaagatctacagggaagaaattgaggtagcatataactgccgcaagggaaaatatggtgtagcagatgaggatataatcttatatggtcaatgtgtttgaattggtccaaccattgatatttcttcgcggttgctagacttgagagtcgcagttttgcatagtcctatattctatctgcactaagagtaatatatacagccaagcggacgtttggtttaacatttacaagttgttacagagcaacagcccagggaggccaagatgctacttagctactaaaaccaactgacaacaagtgcacagcccagtgggccgctaagctgcaagaaaaccctcgcccctcgttctggattgagattctctgcagaggctgcgatgttgggccgtcctgccctgcccggtgggtatatgtaagctcagaccgccaccggaaccttctcgagcccgcggccgcacacctccgcccgaagccgccagtcggactacgaacggcggcggcgcctcggctcccctgatctccctcaccggaatggacggccaggctccgccgcttctcgacgccgtcgtgctcgagccccttgcagttggcgacgagctccatccgcggcgtcctgtcgaggtggaggacgctccggccgccgctccgccctccggtatggacggccaggttccacctctctacaacgtcacgcgggatcctctgaccgtatccgacgagctgcagcccacgggcgaggtggtggatgacgccctactcgtcgcgcccgatatcgtcaagggcgaggtgatggaggacgacatcctacccgtcgcaaccgacatcatcaacgacgccgcctcggagtgccccgaggctggcagtgatggcgtcgtgctcaccgacgagctccgcaatcgcatcgtcaagcaggtggagtactatttcagcgatgagaaccttcctacggacgagttcctgctgaattatgtgaagaagaacaataagggctttgttcctattgagatcatcgcatcatttaggagaatgaagaaactcgttcaagacctctcagtaattgaagctgcactcaggacatcatcaaagctggttgtaagttcaaatgggaaacgggtcaggaggttacatccattgccacacaaagaattgaaagattcaaagaaaagcactgttttggtcgaaaatctacctccagatttctcaatggagagtattcaggaaaaattcgcaacagtgggcaaagttgtgaacataacaattaatgatccagaatcagtgaaagaattttcaactgctaagaagcctgacttcaatttaagttttaaggctcatgtacttgttgaatatgaagcagtggaggctgctgagaaggctgttactgccctaagtgatgagagcaactggagaactgggatgaaagtcaggcttctgtctaaacaaagtgtaatgggaccaggaaagtataaaaaaccttctaaagaaaatcaagatgcagtttccaaaatgattgatcagaatcaacattcaaaagaagaccagcttaaaaccttggaaaagatctccggtgctgatgcagtggggattaccaaggacagagataatttgaaacctgtttttatcactgagactgagcaccaagatcagaagccaaatgctagaggacgaaaaggatggtacaaaggtcaaggtcagatgcagcaaaatgcaaacaaacaaggcagttgtggttccgagtcattaaacaagcctatttctggaccgaggatgccagatggaacaaggggcttcacactgggacgtggtagatctcttccactacagaagtctgagaaggctgaagagtagagctaccaaaaaaggcctgttaagaaccttatccaaagaagctgggtaaaatctaacagaaaacctttgcttttttttttttgaaacttaagatcatcgaagccgttctttgcatggaatgggacacagaagaaagggaatcttggaatggctttctctctgcaagaaatggaacacaaaagggaatctgggaatgacttgtacagaaacacaattgtctgggggtagttccgagttcactcgtatggaacacagtagaacctttgcatgtttcctgacttgcattgtgtcatatactcgtatcatgctgcatgcagcattgcagccctgtttgcaatttcagcagccgggggctggggccgtgagcccgtgaccctgcaccatccgggtctaccacgagcccccctgttctgcgaggcgtttggcccctcatccctatggatctgtactctgtaggctctccttataacgcatgattgggattgaaaaacacattgaatag

SEQ ID NO: 209837 - DNA, 3228 bp, Zea Mays
gtaaggaaatgctatgctgcaacttttgccacttttgtgttatcatgataagcagtgcttcccggctgggaaatgaaagtcttggattgtctttggtggtatggttattctactcatggaagatctacagggaagaaattgaggtagcatataactgccgcaagggaaaatatggtgtagcagatgaggatataatcttatatggtcaatgtgtttgaattggtccaaccattgatatttcttcgcggttgctagacttgagagtcgcagttttgcatagtcctatattctatctgcactaagagtaatatatacagccaagcggacgtttggtttaacatttacaaggtatgtttggtccttttgttttttggaattaatggttgtccgatgcttgtcattcatatgagttctaatatcatgcccccttaaagtactcatcatcaaaagtttccatgtgaatgttttaaatgtagatttaaagggttgaaagacatcaaacagttattcaaacatgatcttaagtgtcgtgaaagactacaagtgaggttcaacttggcaaattgtttttctagtaactaaggagcaacaatgctatgtattttagcttgacttatatatctaagtacttacatttttggaatcgggcaaacagtgatagtttgaatcacatgttttgccaaaaggaattattagaactgttcaaaagttaggaaaaaatacatatttatgctttcttatgcacgggtaaattgctctgttcatatataaaaaaaataattgtagtattattgcttatattgattttaaatgatgaccttattagatgtgccatcgagaccacatatattagcattttgtaactaaatacaatgcatgaatatatatagatagcctttacatcgtgctacatgcttcctagaaataaggaaccattacaacatatatatttttgatgatgtacaacttcgtcatcggatataccgttccttcttttttacatacattttgataagaatgtcaaaatgttaaaaaaatagcgcgcgcatggcgcgcgttagacactagtagatttcagaactatcatgaagcgcgtgctcgctggttgttagttgttacagagcaacagcccagggaggccaagatgctacttagctactaaaaccaactgacaacaagtgcacagcccagtgggccgctaagctgcaagaaaaccctcgcccctcgttctggattgagattctctgcagaggctgcgatgttgggccgtcctgccctgcccggtgggtatatgtaagctcagaccgccaccggaaccttctcgagcccgcggccgcacacctccgcccgaagccgccagtcggactacgaacggcggcggcgcctcggctcccctgatctccctcaccggaatggacggccaggctccgccgcttctcgacgccgtcgtgctcgagccccttgcagttggcgacgagctccatccgcggcgtcctgtcgaggtggaggacgctccggccgccgctccgccctccggtatggacggccaggttccacctctctacaacgtcacgcgggatcctctgaccgtatccgacgagctgcagcccacgggcgaggtggtggatgacgccctactcgtcgcgcccgatatcgtcaagggcgaggtgatggaggacgacatcctacccgtcgcaaccgacatcatcaacgacgccgcctcggagtgccccgaggctggcagtgatggcgtcgtgctcaccgacgagctccgcaatcgcatcgtcaagcaggtggagtactatttcagcgatgagaaccttcctacggacgagttcctgctgaattatgtgaagaagaacaataagggctttgttcctattgagatcatcgcatcatttaggagaatgaagaaactcgttcaagacctctcagtaattgaagctgcactcaggacatcatcaaagctggttgtaagttcaaatgggaaacgggtcaggaggttacatccattgccacacaaagaattgaaagattcaaagaaaagcactgttttggtcgaaaatctacctccagatttctcaatggagagtattcaggaaaaattcgcaacagtgggcaaagttgtgaacataacaattaatgatccagaatcagtgaaagaattttcaactgctaagaagcctgacttcaatttaagttttaaggctcatgtacttgttgaatatgaagcagtggaggctgctgagaaggctgttactgccctaagtgatgagagcaactggagaactgggatgaaagtcaggcttctgtctaaacaaagtgtaatgggaccaggaaagtataaaaaaccttctaaagaaaatcaagatgcagtttccaaaatgattgatcagaatcaacattcaaaagaagaccagcttaaaaccttggaaaagatctccggtgctgatgcagtggggattaccaaggacagagataatttgaaacctgtttttatcactgagactgagcaccaagatcagaagccaaatgctagaggacgaaaaggatggtacaaaggtcaaggtcagatgcagcaaaatgcaaacaaacaaggcagttgtggttccgagtcattaaacaagcctatttctggaccgaggatgccagatggaacaaggggcttcacactgggacgtggtagatctcttccactacagaagtctgagaaggctgaagagtagagctaccaaaaaaggcctgttaagaaccttatccaaagaagctgggtaaaatctaacagaaaacctttgcttttttttttttgaaacttaagatcatcgaagccgttctttgcatggaatgggacacagaagaaagggaatcttggaatggctttctctctgcaagaaatggaacacaaaagggaatctgggaatgacttgtacagaaacacaattgtctgggggtagttccgagttcactcgtatggaacacagtagaacctttgcatgtttcctgacttgcattgtgtcatatactcgtatcatgctgcatgcagcattgcagccctgtttgcaatttcagcagccgggggctggggccgtgagcccgtgaccctgcaccatccgggtctaccacgagcccccctgttctgcgaggcgtttggcccctcatccctatggatctgtactctgtaggctctccttataacgcatgattgggattgaaaaacacattgaatag

SEQ ID NO: 209838 - DNA, 2576 bp, Zea Mays
caatgctgatgaggtggcgccttgcattttgcgacatggtatggttattctactcatggaagatctacagggaagaaattgaggtagcatataactgccgcaagggaaaatatggtgtagcagatgaggatataatcttatatggtcaatgtgtttgaattggtccaaccattgatatttcttcgcggttgctagacttgagagtcgcagttttgcatagtcctatattctatctgcactaagagtaatatatacagccaagcggacgtttggtttaacatttacaaggtatgtttggtccttttgttttttggaattaatggttgtccgatgcttgtcattcatatgagttctaatatcatgcccccttaaagtactcatcatcaaaagtttccatgtgaatgttttaaatgtagatttaaagggttgaaagacatcaaacagttattcaaacatgatcttaagtgtcgtgaaagactacaagtgaggttcaacttggcaaattgtttttctagtaactaaggagcaacaatgctatgtattttagcttgacttatatatctaagtacttacatttttggaatcgggcaaacagtgatagtttgaatcacatgttttgccaaaaggaattattagaactgttcaaaagttaggaaaaaatacatatttatgctttcttatgcacgggtaaattgctctgttcatatataaaaaaaataattgtagtattattgcttatattgattttaaatgatgaccttattagatgtgccatcgagaccacatatattagcattttgtaactaaatacaatgcatgaatatatatagatagcctttacatcgtgctacatgcttcctagaaataaggaaccattacaacatatatatttttgatgatgtacaacttcgtcatcggatataccgttccttcttttttacatacattttgataagaatgtcaaaatgttaaaaaaatagcgcgcgcatggcgcgcgttagacactagtagatttcagaactatcatgaagcgcgtgctcgctggttgttagttgttacagagcaacagcccagggaggccaagatgctacttagctactaaaaccaactgacaacaagtgcacagcccagtgggccgctaagctgcaagaaaaccctcgcccctcgttctggattgagattctctgcagaggctgcgatgttgggccgtcctgccctgcccggtgggtatatgtaagctcagaccgccaccggaaccttctcgagcccgcggccgcacacctccgcccgaagccgccagtcggactacgaacggcggcggcgcctcggctcccctgatctccctcaccggaatggacggccaggctccgccgcttctcgacgccgtcgtgctcgagccccttgcagttggcgacgagctccatccgcggcgtcctgtcgaggtggaggacgctccggccgccgctccgccctccggtatggacggccaggttccacctctctacaacgtcacgcgggatcctctgaccgtatccgacgagctgcagcccacgggcgaggtggtggatgacgccctactcgtcgcgcccgatatcgtcaagggcgaggtgatggaggacgacatcctacccgtcgcaaccgacatcatcaacgacgccgcctcggagtgccccgaggctggcagtgatggcgtcgtgctcaccgacgagctccgcaatcgcatcgtcaagcaggtggagtactatttcagcgatgagaaccttcctacggacgagttcctgctgaattatgtgaagaagaacaataagggctttgttcctattgagatcatcgcatcatttaggagaatgaagaaactcgttcaagacctctcagtaattgaagctgcactcaggacatcatcaaagctggttgtaagttcaaatgggaaacgggtcaggaggttacatccattgccacacaaagaattgaaagattcaaagaaaagcactgttttggtcgaaaatctacctccagatttctcaatggagagtattcaggaaaaattcgcaacagtgggcaaagttgtgaacataacaattaatgatccagaatcagtgaaagaattttcaactgctaagaagcctgacttcaatttaagttttaaggctcatgtacttgttgaatatgaagcagtggaggctgctgagaaggctgttactgccctaagtgatgagagcaactggagaactgggatgaaagtcaggcttctgtctaaacaaagtgtaatgggaccaggaaagtataaaaaaccttctaaagaaaatcaagatgcagtttccaaaatgattgatcagaatcaacattcaaaagaagaccagcttaaaaccttggaaaagatctccggtgctgatgcagtggggattaccaaggacagagataatttgaaacctgtttttatcactgagactgagcaccaagatcagaagccaaatgctagaggacgaaaaggatggtacaaaggtcaaggtcagatgcagcaaaatgcaaacaaacaagatgaattttaagcatggttatcctaagaacacttcctg

SEQ ID NO: 209839 - DNA, 1139 bp, Zea Mays
ttcaaagaagcactgttttggtcgaaaatctacctccagatttctcaatggagagtattcaggaaaaattcgcaacagtgggcaaagttgtgaacataacaattaatgatccagaatcagtgaaagaattttcaactgctaagaagcctgacttcaatttaagttttaaggttactgccctaagtgatgagagcaactggagaactgggatgaaagtcaggcttctgtctaaacaaagtgtaatgggaccaggaaagtataaaaaaccttctaaagaaaatcaagatgcagtttccaaaatgattgatcagaatcaacattcaaaagaagaccagcttaaaaccttggaaaagatctccggtgctgatgcagtggggattaccaaggacagagataatttgaaacctgtttttatcactgagactgagcaccaagatcagaagccaaatgctagaggacgaaaaggatggtacaaaggtcaaggtcagatgcagcaaaatgcaaacaaacaagttgtggttccgagtcattaaacaagcctatttctggaccgaggatgccagatggaacaaggggcttcacactgggacgtggtagatctcttccactacagaagtctgagaaggctgaagagtagagctaccaaaaaaggcctgttaagaaccttatccaaagaagctgggtaaaatctaacagaaaacctttgcttttttttttttgaaacttaagatcatcgaagccgttctttgcatggaatgggacacagaagaaagggaatcttggaatggctttctctctgcaagaaatggaacacaaaagggaatctgggaatgacttgtacagaaacacaattgtctgggggtagttccgagttcactcgtatggaacacagtagaacctttgcatgtttcctgacttgcattgtgtcatatactcgtatcatgctgcatgcagcattgcagccctgtttgcaatttcagcagccgggggctggggccgtgagcccgtgaccctgcaccatccgggtctaccacgagcccccctgttctgcgaggcgtttggcccctcatccctatggatctgtactctgtaggctctccttataacgcatgattgggattgaaaaacacattgaatag

SEQ ID NO: 209840 - DNA, 1600 bp, Zea Mays
aaataatttcccaaacaagccagagaaagccccgattagcacccatcacgtcagggccctttcaccgttcagactctcaaactccctcgattgtaataacagagaaaaaaaccatccgccggaggccggagggcagattctccaccatcgcctccactccaccctcactacgcgaatccgcggcgaacccccctctcggattccttctctcctccccgccccgatcgcgtcgtccagagaccgccaggctccggcgcccccgcccgcccgggctcgccgggggtcgggatgccctgctgctcgccgtcgctgctcggagtcgggccgcggattggttgtgcgctgattgggtcacttggggcattgttcaatggggttcttgtgatcaacctagtgattggtctatttgctgttgttgcaatcgagagcagcagccagagacttggccggacatatgctgtccttctcttctttgctgtcgtccttgacgttgcttggtttatactcttctcccatgctatctggactattaatcctgatgagaagtatggtgaactttttgttttctcactcagactagcattgtggatgcaaataattgggttttcagttaggtttttgtcttcattcttatggattcaaatgtatagattaggggcttcttccagcacgccaacatattttgaaaccaaccatgaagcaagaattagtttcttaagccctagatctgattcagttagacggagtcctacggcagatgatatattgggaggttcgatctatgatccttcttactactcgtcactgttcgaggatgtccgaaacaatgcatgcaatcatcagggtgataaacaaagtggtagtaatgacagtggttcaacatctgcaggccagacaccacgacttaaatcttttgctaatgatgtggaaggtggactaaaaagaccgttgaactcctagggataaaacaacgggctcatcttgggaacctaaatcctgtagccaccgttctctttgaagcatagaggtttgcacaccgcagcagtttatttctcagaccagcgggaagggggtgtccaacgaaaggagcttggcaaatactgtaacggcgactgcctgtgttgccgagcatccacagcagcatcggtgccattttggagcaccgttcgtactcagcgagcttgagccggatgtttctgcaaatagctgtccaatgttggtgttgcatatcgacctatgccatgcgatatgtttactgcccatcatgtcccatttttcagacctctcttcctgtttcttttaactaccaaggaaaatgaagcaagtagttcgttagttctttagtcacttagttattttctagctgtaggctggcagttgcttctcttctagcattttggtcattgttcatagcatttgtgttgacaaggaacagatctctagatcagtgaaaggaaacaaatgtaagtttcattctgttctagaaagagctgtgatccctattggatgcatgagttttgttagaaatgttgcagggttttcacacgaaattgttctggacccacaagttatacaagtcaaattagtctatatatttacg

SEQ ID NO: 209841 - DNA, 2203 bp, Zea Mays
accgttcagactctcaaactccctcgattgtaataacagagaaaaaaaccatccgccggaggccggagggcagattctccaccatcgcctccactccaccctcactacgcgaatccgcggcgaacccccctctcggattccttctctcctccccgccccgatcgcgtcgtccagagaccgccaggctccggcgcccccgcccgcccgggctcgccgggggtcgggatgccctgctgctcgccgtcgctgctcggagtcgggccgcggattggttgtgcgctgattgggtcacttggggcattgttcaatggggttcttgtgatcaacctagtgattggtctatttgctgttgttgcaatcgagagcagcagccagagacttggccggacatatgctgtccttctcttctttgctgtcgtccttgacgttgcttggtttatactcttctcccatgctatctggtatgtcttcggtagccaccatctatcagtttagttaccctgatgttttcatttggtacaatgtgaagtttggcacctagaaaggaatgttgtattctctatattcgaatgcttaattgactgattttttgactgggtttctttattcatctttcaccatgacataactaattgttttcaatgttgtataacagttgatctgtcaatgacttgtcatgcaatgactacctatataggttctgagttctaatatatcactagagtcattactatgatcattgaaacttagaactttgaagcacaagttgttcggtactccatcaagtgaagctttagcatgtgtgatcatatattctaaaccattgctttcatatgtttaggaacatttaaattatacttgcaaaattatatgtatagatttgtcgtcaaattttattttggtaacattctaattttgcaaggtttaataaagttgttacagtagaggttagtttggcatcatgtatcagtgtgaaaagcattacttgttgtgacatgactgactggaaagtgcatgtgttctattggacaagtgtagagaatttttcttatataatttttgttaggcacggcaacattcttgtagtgttataatctgtttcctaactttgtcttctaattatacaggactattaatcctgatgagaagtatggtgaactttttgttttctcactcagactagcattgtggatgcaaataattgggttttcagttaggtttttgtcttcattcttatggattcaaatgtatagattaggggcttcttccagcacgccaacatattttgaaaccaaccatgaagcaagaattagtttcttaagccctagatctgattcagttagacggagtcctacggcagatgatatattgggaggttcgatctatgatccttcttactactcgtcactgttcgaggatgtccgaaacaatgcatgcaatcatcagggtgataaacaaagtggtagtaatgacagtggttcaacatctgcaggccagacaccacgacttaaatcttttgctaatgatgtggaaggtggactaaaaagaccgttgaactcctagggataaaacaacgggctcatcttgggaacctaaatcctgtagccaccgttctctttgaagcatagaggtttgcacaccgcagcagtttatttctcagaccagcgggaagggggtgtccaacgaaaggagcttggcaaatactgtaacggcgactgcctgtgttgccgagcatccacagcagcatcggtgccattttggagcaccgttcgtactcagcgagcttgagccggatgtttctgcaaatagctgtccaatgttggtgttgcatatcgacctatgccatgcgatatgtttactgcccatcatgtcccatttttcagacctctcttcctgtttcttttaactaccaaggaaaatgaagcaagtagttcgttagttctttagtcacttagttattttctagctgtaggctggcagttgcttctcttctagcattttggtcattgttcatagcatttgtgttgacaaggaacagatctctagatcagtgaaaggaaacaaatgtaagtttcattctgttctagaaagagctgtgatccctattggatgcatgagttttgttagaaatgttgcagggttttcacacgaaattgttctggacccacaagttatacaagtcaaattagtctatatatttacg

SEQ ID NO: 209842 - DNA, 1409 bp, Zea Mays
accgttcagactctcaaactccctcgattgtaataacagagaaaaaaaccatccgccggaggccggagggcagattctccaccatcgcctccactccaccctcactacgcgaatccgcggcgaacccccctctcggattccttctctcctccccgccccgatcgcgtcgtccagagaccgccaggctccggcgcccccgcccgcccgggctcgccgggggtcgggatgccctgctgctcgccgtcgctgctcggagtcgggccgcgggtgcgctcctttctccgcgactacgacgccctccagtccctcgccctcgcactcatctacctccaggactattaatcctgatgagaagtatggtgaactttttgttttctcactcagactagcattgtggatgcaaataattgggttttcagttaggtttttgtcttcattcttatggattcaaatgtatagattaggggcttcttccagcacgccaacatattttgaaaccaaccatgaagcaagaattagtttcttaagccctagatctgattcagttagacggagtcctacggcagatgatatattgggaggttcgatctatgatccttcttactactcgtcactgttcgaggatgtccgaaacaatgcatgcaatcatcagggtgataaacaaagtggtagtaatgacagtggttcaacatctgcaggccagacaccacgacttaaatcttttgctaatgatgtggaaggtggactaaaaagaccgttgaactcctagggataaaacaacgggctcatcttgggaacctaaatcctgtagccaccgttctctttgaagcatagaggtttgcacaccgcagcagtttatttctcagaccagcgggaagggggtgtccaacgaaaggagcttggcaaatactgtaacggcgactgcctgtgttgccgagcatccacagcagcatcggtgccattttggagcaccgttcgtactcagcgagcttgagccggatgtttctgcaaatagctgtccaatgttggtgttgcatatcgacctatgccatgcgatatgtttactgcccatcatgtcccatttttcagacctctcttcctgtttcttttaactaccaaggaaaatgaagcaagtagttcgttagttctttagtcacttagttattttctagctgtaggctggcagttgcttctcttctagcattttggtcattgttcatagcatttgtgttgacaaggaacagatctctagatcagtgaaaggaaacaaatgtaagtttcattctgttctagaaagagctgtgatccctattggatgcatgagttttgttagaaatgttgcagggttttcacacgaaattgttctggacccacaagttatacaagtcaaattagtctatatatttacg

SEQ ID NO: 209843 - DNA, 2646 bp, Zea Mays
aaattccctatgaggtagtcctgcacacatcataagaagaagatggagtacatatcccctgagagaaatctggaggggacttgtggagatcctgggccgttatttgccgaccaaggtggcagcttgttggaccacttgggttatcaagggggaggaattccacaacatgagtctccaacactggatcatggacttttggttgatccagctggtgcaattccgtatttatctacagattctccgcccttcatgaatgatcaaatcacttgcaatgttataaaatctgcttcagctagtccagaatcttgtacaaaacaacctcaagaacctcttaatgtagaatctgatgtacagaatgacgcagctgaacaaaatgttcacaatagtaactctgaagaacagatcacttctctgggctgtgatgtacagcagaacacagaagtaattgatgaactgttgcctccaaagcttcctgaaagcagtggtaatgatatatcaaactttcaaccggaaactacatattctgatgcctaccatggtgactctttgttaactgaaaatagttgtaatagttatcagcttaacaatagtggtgctcctgctgctgatattccaaactctcctgcacttcagatggaaaatgaggagatgggaaagttacatgagacttctcacaatgaaaacagtgggtcagaggatgatcaaatgaatggtaggaagccttgccccattagtggtcgagacaatgagaagtttaacacttcagctgtacctccctcttgggaacagacaaaacaaaaaaatcctggtaccagaaatggaagttcaactccagacgatcaatttgattctcctccagacaggtttgcaagattggaaagggacacaccatctccagatgggagagtatcccctgaaaggtttgcaagactggaaagggataccccacctccagacggggatatatctcgtccaggtgaaagttcacatgtccattctgagacgatggagatggagccagaatatcgcgccaatgatgataccccacctccagacgggaggatgtctcctccagttgaaagttcacatgtccattctaagaagatggagtcacaacaccatgccaaagatgttggtgagttagctcgttttgaaagcccacaggtaagacatcggtcccgatcttctgaaaaacatgaccccagccgcaaaagaacctcttcaggggagttgtctccacatgcgcgtcagaattctcctgtagaaaggaaaagacggagagagtctcgccatggtgatgggtcacctcgacagagatctgcatctccccgaagaagatctacaccccctcgaagaagatctatatcccctcgaagatcctcacacaagaggagggaatcaccaagaaggggagactcacctaggaggaggcactcacctaggaggagggagtcaccaaggaagagagactcaccaaggaggagagactcaccaaggaggagggattcaccaaagaggaggagggactccccaaggaggagggataggtcaaaatcaaggtcaccttcaagaaaacatgacacttctagacataaaaaagaacatgacagatctcggtccaggtctccccactcaagggatcatcacagacgatctccaaggcattcaccaagacgcagatcacccccagccagtcatcgccatcattcaccaagaagacattggtcaccacctgccaacaggaagactggattgggtaagcctggaaagaatctctttattgcaggatttagctatgccaccactgagcgagatttggagaagaaattttgcaagtttggacgtgtaacaagtgcacgtgttgttcgtgataaacgaactggagattcccgtggctttggattcttatccttggataaggatgaggatgctgatgcagcaatccgtgcttgtgacgagactgagtggaatggaaggatcattcttgtggagaagtcaaaagcacctgcatggtgaatcttccgctttgggggcgcacacgccattgttcgagagggatttcattgcttcacctttcacagattttaccattcagaaaaaaagaaactaccggtatgacatactcggtacatgtcaaagttcacccgaacctggcttttgatgctgtactaggaggccctgctgctgataagagggacttacgacttagtggtacttttagtgtctgcaacctctacacgtgaaatgtgatacgtgcctgttcgtgagctgtcagttctcttcttcaccttcatctcgcgcccactgaatactgatggcatgaacggattccgggagactcaagctttatggtgttgttgcgactcaagggttatgttagcagttcaataatctgcatattagcttttcaatgttgtgcatcctctgaatgagggtttggaaaatgtcctatatagtttgtgttttggattccagatgttgtttaattatggtcacgacacgatacctatgccccatctgttgactgttggtgatgttttttttcctgatgacatgtcttttcatcctgtgttcttgaatctagagttgtctgtctattggcgcaatattagtgagatggaaactgagcgtggatgcctgccagtg

SEQ ID NO: 209844 - DNA, 2666 bp, Zea Mays
ctgtttctgggaagaggctaggggctacttcataggcattgtcatgtcgaagcgtgggaacgatggagtacatatcccctgagagaaatctggaggggacttgtggagatcctgggccgttatttgccgaccaaggtggcagcttgttggaccacttgggttatcaagggggaggaattccacaacatgagtctccaacactggatcatggacttttggttgatccagctggtgcaattccgtatttatctacagattctccgcccttcatgaatgatcaaatcacttgcaatgttataaaatctgcttcagctagtccagaatcttgtacaaaacaacctcaagaacctcttaatgtagaatctgatgtacagaatgacgcagctgaacaaaatgttcacaatagtaactctgaagaacagatcacttctctgggctgtgatgtacagcagaacacagaagtaattgatgaactgttgcctccaaagcttcctgaaagcagtggtaatgatatatcaaactttcaaccggaaactacatattctgatgcctaccatggtgactctttgttaactgaaaatagttgtaatagttatcagcttaacaatagtggtgctcctgctgctgatattccaaactctcctgcacttcagatggaaaatgaggagatgggaaagttacatgagacttctcacaatgaaaacagtgggtcagaggatgatcaaatgaatggtaggaagccttgccccattagtggtcgagacaatgagaagtttaacacttcagctgtacctccctcttgggaacagacaaaacaaaaaaatcctggtaccagaaatggaagttcaactccagacgatcaatttgattctcctccagacaggtttgcaagattggaaagggacacaccatctccagatgggagagtatcccctgaaaggtttgcaagactggaaagggataccccacctccagacggggatatatctcgtccaggtgaaagttcacatgtccattctgagacgatggagatggagccagaatatcgcgccaatgatgataccccacctccagacgggaggatgtctcctccagttgaaagttcacatgtccattctaagaagatggagtcacaacaccatgccaaagatgttggtgagttagctcgttttgaaagcccacaggtaagacatcggtcccgatcttctgaaaaacatgaccccagccgcaaaagaacctcttcaggggagttgtctccacatgcgcgtcagaattctcctgtagaaaggaaaagacggagagagtctcgccatggtgatgggtcacctcgacagagatctgcatctccccgaagaagatctacaccccctcgaagaagatctatatcccctcgaagatcctcacacaagaggagggaatcaccaagaaggggagactcacctaggaggaggcactcacctaggaggagggagtcaccaaggaagagagactcaccaaggaggagagactcaccaaggaggagggattcaccaaagaggaggagggactccccaaggaggagggataggtcaaaatcaaggtcaccttcaagaaaacatgacacttctagacataaaaaagaacatgacagatctcggtccaggtctccccactcaagggatcatcacagacgatctccaaggcattcaccaagacgcagatcacccccagccagtcatcgccatcattcaccaagaagacattggtcaccacctgccaacaggaagactggattgggtaagcctggaaagaatctctttattgcaggatttagctatgccaccactgagcgagatttggagaagaaattttgcaagtttggacgtgtaacaagtgcacgtgttgttcgtgataaacgaactggagattcccgtggctttggattcttatccttggataaggatgaggatgctgatgcagcaatccgtgcttgtgacgagactgagtggaatggaaggatcattcttgtggagaagtcaaaagcacctgcatggtgaatcttccgctttgggggcgcacacgccattgttcgagagggatttcattgcttcacctttcacagattttaccattcagaaaaaaagaaactaccggtatgacatactcggtacatgtcaaagttcacccgaacctggcttttgatgctgtactaggaggccctgctgctgataagagggacttacgacttagtggtacttttagtgtctgcaacctctacacgtgaaatgtgatacgtgcctgttcgtgagctgtcagttctcttcttcaccttcatctcgcgcccactgaatactgatggcatgaacggattccgggagactcaagctttatggtgttgttgcgactcaagggttatgttagcagttcaataatctgcatattagcttttcaatgttgtgcatcctctgaatgagggtttggaaaatgtcctatatagtttgtgttttggattccagatgttgtttaattatggtcacgacacgatacctatgccccatctgttgactgttggtgatgttttttttcctgatgacatgtcttttcatcctgtgttcttgaatctagagttgtctgtctattggcgcaatattagtgagatggaaactgagcgtggatgcctgccagtg

SEQ ID NO: 209845 - DNA, 2627 bp, Zea Mays
gctggctttccaaattccgctcaatggagtacatatcccctgagagaaatctggaggggacttgtggagatcctgggccgttatttgccgaccaaggtggcagcttgttggaccacttgggttatcaagggggaggaattccacaacatgagtctccaacactggatcatggacttttggttgatccagctggtgcaattccgtatttatctacagattctccgcccttcatgaatgatcaaatcacttgcaatgttataaaatctgcttcagctagtccagaatcttgtacaaaacaacctcaagaacctcttaatgtagaatctgatgtacagaatgacgcagctgaacaaaatgttcacaatagtaactctgaagaacagatcacttctctgggctgtgatgtacagcagaacacagaagtaattgatgaactgttgcctccaaagcttcctgaaagcagtggtaatgatatatcaaactttcaaccggaaactacatattctgatgcctaccatggtgactctttgttaactgaaaatagttgtaatagttatcagcttaacaatagtggtgctcctgctgctgatattccaaactctcctgcacttcagatggaaaatgaggagatgggaaagttacatgagacttctcacaatgaaaacagtgggtcagaggatgatcaaatgaatggtaggaagccttgccccattagtggtcgagacaatgagaagtttaacacttcagctgtacctccctcttgggaacagacaaaacaaaaaaatcctggtaccagaaatggaagttcaactccagacgatcaatttgattctcctccagacaggtttgcaagattggaaagggacacaccatctccagatgggagagtatcccctgaaaggtttgcaagactggaaagggataccccacctccagacggggatatatctcgtccaggtgaaagttcacatgtccattctgagacgatggagatggagccagaatatcgcgccaatgatgataccccacctccagacgggaggatgtctcctccagttgaaagttcacatgtccattctaagaagatggagtcacaacaccatgccaaagatgttggtgagttagctcgttttgaaagcccacaggtaagacatcggtcccgatcttctgaaaaacatgaccccagccgcaaaagaacctcttcaggggagttgtctccacatgcgcgtcagaattctcctgtagaaaggaaaagacggagagagtctcgccatggtgatgggtcacctcgacagagatctgcatctccccgaagaagatctacaccccctcgaagaagatctatatcccctcgaagatcctcacacaagaggagggaatcaccaagaaggggagactcacctaggaggaggcactcacctaggaggagggagtcaccaaggaagagagactcaccaaggaggagagactcaccaaggaggagggattcaccaaagaggaggagggactccccaaggaggagggataggtcaaaatcaaggtcaccttcaagaaaacatgacacttctagacataaaaaagaacatgacagatctcggtccaggtctccccactcaagggatcatcacagacgatctccaaggcattcaccaagacgcagatcacccccagccagtcatcgccatcattcaccaagaagacattggtcaccacctgccaacaggaagactggattgggtaagcctggaaagaatctctttattgcaggatttagctatgccaccactgagcgagatttggagaagaaattttgcaagtttggacgtgtaacaagtgcacgtgttgttcgtgataaacgaactggagattcccgtggctttggattcttatccttggataaggatgaggatgctgatgcagcaatccgtgcttgtgacgagactgagtggaatggaaggatcattcttgtggagaagtcaaaagcacctgcatggtgaatcttccgctttgggggcgcacacgccattgttcgagagggatttcattgcttcacctttcacagattttaccattcagaaaaaaagaaactaccggtatgacatactcggtacatgtcaaagttcacccgaacctggcttttgatgctgtactaggaggccctgctgctgataagagggacttacgacttagtggtacttttagtgtctgcaacctctacacgtgaaatgtgatacgtgcctgttcgtgagctgtcagttctcttcttcaccttcatctcgcgcccactgaatactgatggcatgaacggattccgggagactcaagctttatggtgttgttgcgactcaagggttatgttagcagttcaataatctgcatattagcttttcaatgttgtgcatcctctgaatgagggtttggaaaatgtcctatatagtttgtgttttggattccagatgttgtttaattatggtcacgacacgatacctatgccccatctgttgactgttggtgatgttttttttcctgatgacatgtcttttcatcctgtgttcttgaatctagagttgtctgtctattggcgcaatattagtgagatggaaactgagcgtggatgcctgccagtg

SEQ ID NO: 209846 - DNA, 2731 bp, Zea Mays
accgggccaccacaccacgtgacatccgtttcgtacggcctcccccaaaaatctcagcccgtctctctctcctaacgaagaggagagggggcagaagaaaacctcgcgcgggggaggcgcgagaggaatcgcgggggccggaggagcagcggccggtggaggtggcgcgcgcggtggccgtccgagatggagtacatatcccctgagagaaatctggaggggacttgtggagatcctgggccgttatttgccgaccaaggtggcagcttgttggaccacttgggttatcaagggggaggaattccacaacatgagtctccaacactggatcatggacttttggttgatccagctggtgcaattccgtatttatctacagattctccgcccttcatgaatgatcaaatcacttgcaatgttataaaatctgcttcagctagtccagaatcttgtacaaaacaacctcaagaacctcttaatgtagaatctgatgtacagaatgacgcagctgaacaaaatgttcacaatagtaactctgaagaacagatcacttctctgggctgtgatgtacagcagaacacagaagtaattgatgaactgttgcctccaaagcttcctgaaagcagtggtaatgatatatcaaactttcaaccggaaactacatattctgatgcctaccatggtgactctttgttaactgaaaatagttgtaatagttatcagcttaacaatagtggtgctcctgctgctgatattccaaactctcctgcacttcagatggaaaatgaggagatgggaaagttacatgagacttctcacaatgaaaacagtgggtcagaggatgatcaaatgaatggtaggaagccttgccccattagtggtcgagacaatgagaagtttaacacttcagctgtacctccctcttgggaacagacaaaacaaaaaaatcctggtaccagaaatggaagttcaactccagacgatcaatttgattctcctccagacaggtttgcaagattggaaagggacacaccatctccagatgggagagtatcccctgaaaggtttgcaagactggaaagggataccccacctccagacggggatatatctcgtccaggtgaaagttcacatgtccattctgagacgatggagatggagccagaatatcgcgccaatgatgataccccacctccagacgggaggatgtctcctccagttgaaagttcacatgtccattctaagaagatggagtcacaacaccatgccaaagatgttggtgagttagctcgttttgaaagcccacaggtaagacatcggtcccgatcttctgaaaaacatgaccccagccgcaaaagaacctcttcaggggagttgtctccacatgcgcgtcagaattctcctgtagaaaggaaaagacggagagagtctcgccatggtgatgggtcacctcgacagagatctgcatctccccgaagaagatctacaccccctcgaagaagatctatatcccctcgaagatcctcacacaagaggagggaatcaccaagaaggggagactcacctaggaggaggcactcacctaggaggagggagtcaccaaggaagagagactcaccaaggaggagagactcaccaaggaggagggattcaccaaagaggaggagggactccccaaggaggagggataggtcaaaatcaaggtcaccttcaagaaaacatgacacttctagacataaaaaagaacatgacagatctcggtccaggtctccccactcaagggatcatcacagacgatctccaagaaggcattcaccaagacgcagatcacccccagccagtcatcgccatcattcaccaagaagacattggtcaccacctgccaacaggaagactggattgggtaagcctggaaagaatctctttattgcaggatttagctatgccaccactgagcgagatttggagaagaaattttgcaagtttggacgtgtaacaagtgcacgtgttgttcgtgataaacgaactggagattcccgtggctttggattcttatccttggataaggatgaggatgctgatgcagcaatccgtgcttgtgacgagactgagtggaatggaaggatcattcttgtggagaagtcaaaagcacctgcatggtgaatcttccgctttgggggcgcacacgccattgttcgagagggatttcattgcttcacctttcacagattttaccattcagaaaaaaagaaactaccgggccctgctgctgataagagggacttacgacttagtggtacttttagtgtctgcaacctctacacgtgaaatgtgatacgtgcctgttcgtgagctgtcagttctcttcttcaccttcatctcgcgcccactgaatactgatggcatgaacggattccgggagactcaagctttatggtgttgttgcgactcaagggttatgttagcagttcaataatctgcatattagcttttcaatgttgtgcatcctctgaatgagggtttggaaaatgtcctatatagtttgtgttttggattccagatgttgtttaattatggtcacgacacgatacctatgccccatctgttgactgttggtgatgttttttttcctgatgacatgtcttttcatcctgtgttcttgaatctagagttgtctgtctattggcgcaatattagtgagatggaaactgagcgtggatgcctgccagtg

SEQ ID NO: 209847 - DNA, 2803 bp, Zea Mays
accgggccaccacaccacgtgacatccgtttcgtacggcctcccccaaaaatctcagcccgtctctctctcctaacgaagaggagagggggcagaagaaaacctcgcgcgggggaggcgcgagaggaatcgcgggggccggaggagcagcggccggtggaggtggcgcgcgcggtggccgtccgagatggagtacatatcccctgagagaaatctggaggggacttgtggagatcctgggccgttatttgccgaccaaggtggcagcttgttggaccacttgggttatcaagggggaggaattccacaacatgagtctccaacactggatcatggacttttggttgatccagctggtgcaattccgtatttatctacagattctccgcccttcatgaatgatcaaatcacttgcaatgttataaaatctgcttcagctagtccagaatcttgtacaaaacaacctcaagaacctcttaatgtagaatctgatgtacagaatgacgcagctgaacaaaatgttcacaatagtaactctgaagaacagatcacttctctgggctgtgatgtacagcagaacacagaagtaattgatgaactgttgcctccaaagcttcctgaaagcagtggtaatgatatatcaaactttcaaccggaaactacatattctgatgcctaccatggtgactctttgttaactgaaaatagttgtaatagttatcagcttaacaatagtggtgctcctgctgctgatattccaaactctcctgcacttcagatggaaaatgaggagatgggaaagttacatgagacttctcacaatgaaaacagtgggtcagaggatgatcaaatgaatggtaggaagccttgccccattagtggtcgagacaatgagaagtttaacacttcagctgtacctccctcttgggaacagacaaaacaaaaaaatcctggtaccagaaatggaagttcaactccagacgatcaatttgattctcctccagacaggtttgcaagattggaaagggacacaccatctccagatgggagagtatcccctgaaaggtttgcaagactggaaagggataccccacctccagacggggatatatctcgtccaggtgaaagttcacatgtccattctgagacgatggagatggagccagaatatcgcgccaatgatgataccccacctccagacgggaggatgtctcctccagttgaaagttcacatgtccattctaagaagatggagtcacaacaccatgccaaagatgttggtgagttagctcgttttgaaagcccacaggtaagacatcggtcccgatcttctgaaaaacatgaccccagccgcaaaagaacctcttcaggggagttgtctccacatgcgcgtcagaattctcctgtagaaaggaaaagacggagagagtctcgccatggtgatgggtcacctcgacagagatctgcatctccccgaagaagatctacaccccctcgaagaagatctatatcccctcgaagatcctcacacaagaggagggaatcaccaagaaggggagactcacctaggaggaggcactcacctaggaggagggagtcaccaaggaagagagactcaccaaggaggagagactcaccaaggaggagggattcaccaaagaggaggagggactccccaaggaggagggataggtcaaaatcaaggtcaccttcaagaaaacatgacacttctagacataaaaaagaacatgacagatctcggtccaggtctccccactcaagggatcatcacagacgatctccaagaaggcattcaccaagacgcagatcacccccagccagtcatcgccatcattcaccaagaagacattggtcaccacctgccaacaggaagactggattgggtaagcctggaaagaatctctttattgcaggatttagctatgccaccactgagcgagatttggagaagaaattttgcaagtttggacgtgtaacaagtgcacgtgttgttcgtgataaacgaactggagattcccgtggctttggattcttatccttggataaggatgaggatgctgatgcagcaatccgtgcttgtgacgagactgagtggaatggaaggatcattcttgtggagaagtcaaaagcacctgcatggtgaatcttccgctttgggggcgcacacgccattgttcgagagggatttcattgcttcacctttcacagattttaccattcagaaaaaaagaaactaccggtatgacatactcggtacatgtcaaagttcacccgaacctggcttttgatgctgtactaggacttgtttcagggccctgctgctgataagagggacttacgacttagtggtacttttagtgtctgcaacctctacacgtgaaatgtgatacgtgcctgttcgtgagctgtcagttctcttcttcaccttcatctcgcgcccactgaatactgatggcatgaacggattccgggagactcaagctttatggtgttgttgcgactcaagggttatgttagcagttcaataatctgcatattagcttttcaatgttgtgcatcctctgaatgagggtttggaaaatgtcctatatagtttgtgttttggattccagatgttgtttaattatggtcacgacacgatacctatgccccatctgttgactgttggtgatgttttttttcctgatgacatgtcttttcatcctgtgttcttgaatctagagttgtctgtctattggcgcaatattagtgagatggaaactgagcgtggatgcctgccagtg

SEQ ID NO: 209848 - DNA, 2640 bp, Zea Mays
gccactttgagcgtgcctctggagacggtgttgtagatggagtacatatcccctgagagaaatctggaggggacttgtggagatcctgggccgttatttgccgaccaaggtggcagcttgttggaccacttgggttatcaagggggaggaattccacaacatgagtctccaacactggatcatggacttttggttgatccagctggtgcaattccgtatttatctacagattctccgcccttcatgaatgatcaaatcacttgcaatgttataaaatctgcttcagctagtccagaatcttgtacaaaacaacctcaagaacctcttaatgtagaatctgatgtacagaatgacgcagctgaacaaaatgttcacaatagtaactctgaagaacagatcacttctctgggctgtgatgtacagcagaacacagaagtaattgatgaactgttgcctccaaagcttcctgaaagcagtggtaatgatatatcaaactttcaaccggaaactacatattctgatgcctaccatggtgactctttgttaactgaaaatagttgtaatagttatcagcttaacaatagtggtgctcctgctgctgatattccaaactctcctgcacttcagatggaaaatgaggagatgggaaagttacatgagacttctcacaatgaaaacagtgggtcagaggatgatcaaatgaatggtaggaagccttgccccattagtggtcgagacaatgagaagtttaacacttcagctgtacctccctcttgggaacagacaaaacaaaaaaatcctggtaccagaaatggaagttcaactccagacgatcaatttgattctcctccagacaggtttgcaagattggaaagggacacaccatctccagatgggagagtatcccctgaaaggtttgcaagactggaaagggataccccacctccagacggggatatatctcgtccaggtgaaagttcacatgtccattctgagacgatggagatggagccagaatatcgcgccaatgatgataccccacctccagacgggaggatgtctcctccagttgaaagttcacatgtccattctaagaagatggagtcacaacaccatgccaaagatgttggtgagttagctcgttttgaaagcccacaggtaagacatcggtcccgatcttctgaaaaacatgaccccagccgcaaaagaacctcttcaggggagttgtctccacatgcgcgtcagaattctcctgtagaaaggaaaagacggagagagtctcgccatggtgatgggtcacctcgacagagatctgcatctccccgaagaagatctacaccccctcgaagaagatctatatcccctcgaagatcctcacacaagaggagggaatcaccaagaaggggagactcacctaggaggaggcactcacctaggaggagggagtcaccaaggaagagagactcaccaaggaggagagactcaccaaggaggagggattcaccaaagaggaggagggactccccaaggaggagggataggtcaaaatcaaggtcaccttcaagaaaacatgacacttctagacataaaaaagaacatgacagatctcggtccaggtctccccactcaagggatcatcacagacgatctccaaggcattcaccaagacgcagatcacccccagccagtcatcgccatcattcaccaagaagacattggtcaccacctgccaacaggaagactggattgggtaagcctggaaagaatctctttattgcaggatttagctatgccaccactgagcgagatttggagaagaaattttgcaagtttggacgtgtaacaagtgcacgtgttgttcgtgataaacgaactggagattcccgtggctttggattcttatccttggataaggatgaggatgctgatgcagcaatccgtgcttgtgacgagactgagtggaatggaaggatcattcttgtggagaagtcaaaagcacctgcatggtgaatcttccgctttgggggcgcacacgccattgttcgagagggatttcattgcttcacctttcacagattttaccattcagaaaaaaagaaactaccggtatgacatactcggtacatgtcaaagttcacccgaacctggcttttgatgctgtactaggaggccctgctgctgataagagggacttacgacttagtggtacttttagtgtctgcaacctctacacgtgaaatgtgatacgtgcctgttcgtgagctgtcagttctcttcttcaccttcatctcgcgcccactgaatactgatggcatgaacggattccgggagactcaagctttatggtgttgttgcgactcaagggttatgttagcagttcaataatctgcatattagcttttcaatgttgtgcatcctctgaatgagggtttggaaaatgtcctatatagtttgtgttttggattccagatgttgtttaattatggtcacgacacgatacctatgccccatctgttgactgttggtgatgttttttttcctgatgacatgtcttttcatcctgtgttcttgaatctagagttgtctgtctattggcgcaatattagtgagatggaaactgagcgtggatgcctgccagtg

SEQ ID NO: 209849 - DNA, 2427 bp, Zea Mays
  misc_feature (1)..(1): n is a, c, g, or t
ncttcaggttatggatcaaaacggcagtataaagaagcatctgcacagcgggaggcagtgaaccaactatgcagtcattttgaagcctatagagatgtgcccaagataacagaattgagagagaaattcaagaacatcaagaaaatcctcaaatctcatgtattttcagatttttcaagcttaggaactgggaaggaaacagaagattccatgctattgcagcagctatctgatgcttgtttggtggttgatgcattggaaccatctgtaagggaagaactagtgaagaacttttgcagcaaggaactcacctcatataggcagatctttgaaggagcagaacttgccaagttagacaagaccgaaagaagatatgcatggattaaacgtcgactaaggtcaaatgaagacacctggaaaatatttccaccttcctggcatgtcgactatctgctgtgtatccagttctgtaagattacaagggcccagcttgttgatatccttaataatctcaaagaaaaaccagatgttgcaactttgttattggcgttccagagaaccattgaatttgaggaagaattggcagagaaattcagtggtggaactacaaatgctagaaataaagagacaacaagtgatgatgaagatgagggtgggggacacaataaaattgtttcggacatacgaaagaaatatgagaagaaattggctgcacccagtgatgaggacaaagataagcagaaagatttgtcagttcctggtgctgggttcaactttcatgggatcatatcttcttgttttgaaccatatatgactgtatacattgaacttgaggagaaatctttagtggatcaattagaaaaacttgtccaggaagaaagatgggaaatcgaggaaggaagtcagacgaacattctatcaagcagcatgcaggttttcttggtgattagaaaaagcttaaagaggtgcagcgcattaacaaagaaccaaacattgttcaacttatttcaggtatttcaaagaatactcaaggcctatgcggctaagttatatgccagattaccaaaaggtggaactggtattgttgcagctgccactggcactgatggacagatcaggacctcagacagggacgagagaatgatatgctacattgtcaacactgctgaatattgtcatcagacatcaggtgagctagctgagaatgttgctaagatgattaaccctcagtttgctgacaaggtggacatgtctgaagttcaggatgaattctcagccgtgatcacaaaagcactaatgactcttgttcacggacttgaaaccaaatttgatgctgaaatggttgcaatgactcgcgttccatgggctacccttgaaagcgttggtgatcaatcagaatatgtgaatggtatcagctctattctgtcaagcagtattcctgtgcttggtaccctgctttcacctacctacttccagtatttcctggacaaacttgcagcatctcttgggcctcggttttatctcaacatatacaagtgcaaacatatatcagaaactggtgcacagcagatgcttttggacacccaagcagtaaagactattctcctagacatcccagctcttggaaaacagagtacaggtgcagctagctactcgaaatttgtcagccgagaaatgggtaaagccgaagctctacttaaggtcattttgtcgccagttgattctgtcgctaacacataccgtgccctccttcccgaaggcacgcctcttgagtttcagcggatacttgacctcaagggcttgaagaaagcagaccaacaagctatcctggaggacttcaacaaacacgcccctgcaccagcccccgccatcaaacaccctgccgttgctccgacggtggcgacaccagttgccacagcatctgtccagattgtgccctcggtggcaactccagctgtttcgattacaccaagcatggcctccttgaagggagcactggcgaaccaagaggacgtcctcgcccgagctgccgcccttgggcgcggagcagccaccacgggcttcaagaggttccttgcattgacagaggccgccaaagatcgcaaggatgggccgttccgcaagctcttcaacgcctaaaatgtcgctcaccgttgtgttcatagttcgtgcccctcgtgcagtgaacatagatataggaaatcctttccacatcgtgtacacaccattaccgttaaccgacagtctataacaaccattttgacagattatcctatcccatcctgcggagaacgattagctcagttgtagcatagagattttgagacagtttgagctattagataagtttttccccctggttttgtgcatgcaaacccaagattctatactcgtgattgaataatcgtttctctccttttttttttc

SEQ ID NO: 209850 - DNA, 2035 bp, Zea Mays
gttttcgcgacctgtgtgagaatgttttcttaatacaatgcctagggttgcctcccgccccgcacgcggcaggcgttccagagaaccattgaatttgaggaagaattggcagagaaattcagtggtggaactacaaatgctagaaataaagagacaacaagtgatgatgaagatgagggtgggggacacaataaaattgtttcggacatacgaaagaaatatgagaagaaattggctgcacccagtgatgaggacaaagataagcagaaagatttgtcagttcctggtgctgggttcaactttcatgggatcatatcttcttgttttgaaccatatatgactgtatacattgaacttgaggagaaatctttagtggatcaattagaaaaacttgtccaggaagaaagatgggaaatcgaggaaggaagtcagacgaacattctatcaagcagcatgcaggttttcttggtgattagaaaaagcttaaagaggtgcagcgcattaacaaagaaccaaacattgttcaacttatttcaggtatttcaaagaatactcaaggcctatgcggctaagttatatgccagattaccaaaaggtggaactggtattgttgcagctgccactggcactgatggacagatcaggacctcagacagggacgagagaatgatatgctacattgtcaacactgctgaatattgtcatcagacatcaggtgagctagctgagaatgttgctaagatgattaaccctcagtttgctgacaaggtggacatgtctgaagttcaggatgaattctcagccgtgatcacaaaagcactaatgactcttgttcacggacttgaaaccaaatttgatgctgaaatggttgcaatgactcgcgttccatgggctacccttgaaagcgttggtgatcaatcagaatatgtgaatggtatcagctctattctgtcaagcagtattcctgtgcttggtaccctgctttcacctacctacttccagtatttcctggacaaacttgcagcatctcttgggcctcggttttatctcaacatatacaagtgcaaacatatatcagaaactggtgcacagcaggtacatgttaaatgccaggctaattttattttatttactactcattcggacatatctcattgctttgcattttgcccccaagatgcttttggacacccaagcagtaaagactattctcctagacatcccagctcttggaaaacagagtacaggtgcagctagctactcgaaatttgtcagccgagaaatgggtaaagccgaagctctacttaaggtcattttgtcgccagttgattctgtcgctaacacataccgtgccctccttcccgaaggcacgcctcttgagtttcagcggatacttgacctcaagggcttgaagaaagcagaccaacaagctatcctggaggacttcaacaaacacgcccctgcaccagcccccgccatcaaacaccctgccgttgctccgacggtggcgacaccagttgccacagcatctgtccagattgtgccctcggtggcaactccagctgtttcgattacaccaagcatggcctccttgaagggagcactggcgaaccaagaggacgtcctcgcccgagctgccgcccttgggcgcggagcagccaccacgggcttcaagaggttccttgcattgacagaggccgccaaagatcgcaaggatgggccgttccgcaagctcttcaacgcctaaaatgtcgctcaccgttgtgttcatagttcgtgcccctcgtgcagtgaacatagatataggaaatcctttccacatcgtgtacacaccattaccgttaaccgacagtctataacaaccattttgacagattatcctatcccatcctgcggagaacgattagctcagttgtagcatagagattttgagacagtttgagctattagataagtttttccccctggttttgtgcatgcaaacccaagattctatactcgtgattgaataatcgtttctctccttttttttttc

SEQ ID NO: 209851 - DNA, 2165 bp, Zea Mays
atgcctaactggcgcctcgtttatctcgccctgcagcggtggacggagcaggctaggttgccggctgcccccggtcgtccctccttcgccgtcgagctggaggacacgcgtagcaacgccgggttcttctgcggcgagctgtggtgtggcctcatggagcccaagggcgagttggctcagaagcgtatccttccttctcgtttcgctcacccgtacgctattgaagaagcaatcaacagcttggaaattgatgctagcacgaaggcaagcaatgtcaacttgcctgctaagaaagacgcaagttcttcagatgcagtatcttgcatttcctccggcgatgcagctagtactgccaaggaaagtgaaatgaaccgagaaacttcttttggggaccaagggatgtattactatgggtattattatcctggttcatacggaggatgggatgagaatggctactttgttggatataatggcgtagaggtgcacccagcagtggttcaaactgacaatggttcatatctgtgtcatcttccgggatatgaaaatggatatgcttcttatagtcaggttgttcctggaggcattgctagtgtggatggtcaatatgtcagcaaagaaccatattattccactgcacttccaattcaggatcctaggacacctggcatttttgctcagccaattgcttacagaactgaactagcatctgcatactcatgggacccttctttcgttcttctggatggggttcagggacatccagttggtgtgcatcaaacaaattatgctgcaagaccaaaatattcttttaataagcatgttattccttcttcgaaagccacccgcagtgcaaaatccgcagcagatactgtcaaaggctcatcatcagctctagaaactgtaacaaatgctgtcaatagcagcccaccatcaaagagtgcaaataaggttaatgcaagtggtcagttctgtggcgtggctgagatggttggtccagtagatttcaacaggaacatgaacttctggcaacaggacaagtggaatggtttcttctcggtaaaatggcacattatcaaggatgttcccaatccacaatttcgccatataattttggagaataatgagaataaacctgtgacaaacagcagggacacacaagaggtcaatttttcacaaggtacagagatgttgaacattttcaagaacttcacatgtaaaacatcaatactggatgactttgacttctatgaaaatcggcagaaagtaatgcaggacagaagaggcaagctgcttactacatcgtttgatcacccattgccaaaagctgaaaaatctccagaaattaaaagccaaacacaattgataagtggcccagaagttggtagagccaagagtgatgaggggcagggcaacaatgttgggatggtacttgatacaaccaagaaaaatgaggagcagagcagcaatgttccagaaatactcgatgcagcctgtagtaacaaggagcaacccaacaaaattgcaatagaaggatgatgcctcggctagttggtctgggaaaacgagatagcctctggaactgacttcaacctgaaatgataagtttgatgtgtgcaatatcaagaaaccaccattggtcatgggttctcttccattatctcatggaagcggggaaagggaaaaaatgaagcaaaggagctgtcttcccacgagaattgttcgatgactgggaaaaaaggttctaggactcatttaggttgaggaccctagtgctaaggcattagagcgccctccatgtctattttttccccatcttggagggtcctttcttttgtcgtgttgtgtctttttttctcttctttttttctattatactgcggctgatgtccaaagaagccagtctgccttatgggtgggtgtgctttaagggaatgtttgttgctttgtgggttgtcctctaggatgtggtatgttttgtttgttttctttaatctgtgcacttgttctagagactgacatagaagaaaagagaaaaaaagattgtgagggattaggaattaattacagtaacattatcttatgtctctgtttcttccattatcaagaaaagggaacaaaaaggattttaaaagctgttgatgtgtacttcgccgataccattt

SEQ ID NO: 209852 - DNA, 2470 bp, Zea Mays
atgcctaactggcgcctcgtttatctcgccctgcagcggtggacggagcaggctaggttgccggctgcccccggtcgtccctccttcgccgtcgagctggaggacacgcgtagcaacgccgggttcttctgcggcgagctgtggtgtggcctcatggagcccaagggcgagttggctcagaagcctattgaagaagcaatcaacagcttggaaattgatgctagcacgaaggcaagcaatgtcaacttgcctgctaagaaagacgcaagttcttcagatgcagtatcttgcatttcctccggcgatgcagctagtactgccaaggaaagtgaaatgaaccgagaaacttcttttggggaccaagggatgtattactatgggtattattatcctggttcatacggaggatgggatgagaatggctactttgttggatataatggcgtagaggtgcacccagcagtggttcaaactgacaatggttcatatctgtgtcatcttccgggatatgaaaatggatatgcttcttatagtcaggttgttcctggaggcattgctagtgtggatggtcaatatgtcagcaaagaaccatattattccactgcacttccaattcaggatcctaggacacctggcatttttgctcagccaattgcttacagaactgaactagcatctgcatactcatgggacccttctttcgttcttctggatggggttcagggacatccagttggtgtgcatcaaacaaattatgctgcaagaccaaaatattcttttaataagcatgttattccttcttcgaaagccacccgcagtgcaaaatccgcagcagatactgtcaaaggctcatcatcagctctagaaactgtaacaaatgctgtcaatagcagcccaccatcaaagagtgcaaataagacacctggtgcttccataacaaaaggatatcttccatatagcaagtctgtgatgcacactaataaccaagaaaaaaacagtgtttatcaaagcaaaggcatcaatgtgaaagaaagtggcagaagctggaacagccgagagaagcttgggagaagtaagctaaatggacagggtgattctgaatctaatgagaacaaccataccgataacctgaaacatagtttgagccatcggtctgatgttgttggattgtcaagtgcaggggatgccaatgctagcataccttcacctgttgcaataagcaaaaatgcatgcaatctttcagatttcgttacaaagttaatgcaagtggtcagttctgtggcgtggctgagatggttggtccagtagatttcaacaggaacatgaacttctggcaacaggacaagtggaatggtttcttctcggtaaaatggcacattatcaaggatgttcccaatccacaatttcgccatataattttggagaataatgagaataaacctgtgacaaacagcagggacacacaagaggtcaatttttcacaaggtacagagatgttgaacattttcaagaacttcacatgtaaaacatcaatactggatgactttgacttctatgaaaatcggcagaaagtaatgcaggacagaagaggcaagctgcttactacatcgtttgatcacccattgccaaaagctgaaaaatctccagaaattaaaagccaaacacaattgataagtggcccagaagttggtagagccaagagtgatgaggggcagggcaacaatgttgggatggtacttgatacaaccaagaaaaatgaggagcagagcagcaatgttccagaaatactcgatgcagcctgtagtaacaaggagcaacccaacaaaattgcaatagaaggatgatgcctcggctagttggtctgggaaaacgagatagcctctggaactgacttcaacctgaaatgataagtttgatgtgtgcaatatcaagaaaccaccattggtcatgggttctcttccattatctcatggaagcggggaaagggaaaaaatgaagcaaaggagctgtcttcccacgagaattgttcgatgactgggaaaaaaggttctaggactcatttaggttgaggaccctagtgctaaggcattagagcgccctccatgtctattttttccccatcttggagggtcctttcttttgtcgtgttgtgtctttttttctcttctttttttctattatactgcggctgatgtccaaagaagccagtctgccttatgggtgggtgtgctttaagggaatgtttgttgctttgtgggttgtcctctaggatgtggtatgttttgtttgttttctttaatctgtgcacttgttctagagactgacatagaagaaaagagaaaaaaagattgtgagggattaggaattaattacagtaacattatcttatgtctctgtttcttccattatcaagaaaagggaacaaaaaggattttaaaagctgttgatgtgtacttcgccgataccattt

SEQ ID NO: 209853 - DNA, 2806 bp, Zea Mays
ccactctccatctcgaggatcaaaagttcaaaacaacagagaccgaaactcgccatccaccagacagaaaaagcttccagctcccctcgccgaaactcgccgccgtctcctcgccttctgcctcgccaccggtcccgtcgcggtttcacacgcatccgtccggtggacggagcaggctaggttgccggctgcccccggtcgtccctccttcgccgtcgagctggaggacacgcgtagcaacgccgggttcttctgcggcgagctgtggtgtggcctcatggagcccaagggcgagttggctcagaagcgtatccttccttctcgtttcgctcacccctattgaagaagcaatcaacagcttggaaattgatgctagcacgaaggcaagcaatgtcaacttgcctgctaagaaagacgcaagttcttcagatgcagtatcttgcatttcctccggcgatgcagctagtactgccaaggaaagtgaaatgaaccgagaaacttcttttggggaccaagggatgtattactatgggtattattatcctggttcatacggaggatgggatgagaatggctactttgttggatataatggcgtagaggtgcacccagcagtggttcaaactgacaatggttcatatctgtgtcatcttccgggatatgaaaatggatatgcttcttatagtcaggttgttcctggaggcattgctagtgtggatggtcaatatgtcagcaaagaaccatattattccactgcacttccaattcaggatcctaggacacctggcatttttgctcagccaattgcttacagaactgaactagcatctgcatactcatgggacccttctttcgttcttctggatggggttcagggacatccagttggtgtgcatcaaacaaattatgctgcaagaccaaaatattcttttaataagcatgttattccttcttcgaaagccacccgcagtgcaaaatccgcagcagatactgtcaaaggctcatcatcagctctagaaactgtaacaaatgctgtcaatagcagcccaccatcaaagagtgcaaataagacacctggtgcttccataacaaaaggatatcttccatatagcaagtctgtgatgcacactaataaccaagaaaaaaacagtgtttatcaaagcaaaggcatcaatgtgaaagaaagtggcagaagctggaacagccgagagaagcttgggagaagtaagctaaatggacagggtgattctgaatctaatgagaacaaccataccgataacctgaaacatagtttgagccatcggtctgatgttgttggattgtcaagtgcaggggatgccaatgctagcataccttcacctgttgcaataagcaaaaatgcatgcaatctttcagatttcgttacaaagtatgaacaagctctattctttgtaattaagtcctacagtgaagatgatattcacaagagtgttaagtacaatgtctgggcaagtactcctaatggaaataaaaggcttgacaatgcctatagggttgcacaggaaaggatagcagaaaaaggaaccaaatgtcctgttttccttttcttctcagttaatgcaagtggtcagttctgtggcgtggctgagatggttggtccagtagatttcaacaggaacatgaacttctggcaacaggacaagtggaatggtttcttctcggtaaaatggcacattatcaaggatgttcccaatccacaatttcgccatataattttggagaataatgagaataaacctgtgacaaacagcagggacacacaagaggtcaatttttcacaaggtacagagatgttgaacattttcaagaacttcacatgtaaaacatcaatactggatgactttgacttctatgaaaatcggcagaaagtaatgcaggacagaagaggcaagctgcttactacatcgtttgatcacccattgccaaaagctgaaaaatctccagaaattaaaagccaaacacaattgataagtggcccagaagttggtagagccaagagtgatgaggggcagggcaacaatgttgggatggtacttgatacaaccaagaaaaatgaggagcagagcagcaatgttccagaaatactcgatgcagcctgtagtaacaaggagcaacccaacaaaattgcaatagaaggatgatgcctcggctagttggtctgggaaaacgagatagcctctggaactgacttcaacctgaaatgataagtttgatgtgtgcaatatcaagaaaccaccattggtcatgggttctcttccattatctcatggaagcggggaaagggaaaaaatgaagcaaaggagctgtcttcccacgagaattgttcgatgactgggaaaaaaggttctaggactcatttaggttgaggaccctagtgctaaggcattagagcgccctccatgtctattttttccccatcttggagggtcctttcttttgtcgtgttgtgtctttttttctcttctttttttctattatactgcggctgatgtccaaagaagccagtctgccttatgggtgggtgtgctttaagggaatgtttgttgctttgtgggttgtcctctaggatgtggtatgttttgtttgttttctttaatctgtgcacttgttctagagactgacatagaagaaaagagaaaaaaagattgtgagggattaggaattaattacagtaacattatcttatgtctctgtttcttccattatcaagaaaagggaacaaaaaggattttaaaagctgttgatgtgtacttcgccgataccattt

SEQ ID NO: 209854 - DNA, 2849 bp, Zea Mays
ctgcaactctgcaagcaaccccacaaggcagccgttctccactctccatctcgaggatcaaaagttcaaaacaacagagaccgaaactcgccatccaccagacagaaaaagcttccagctcccctcgccgaaactcgccgccgtctcctcgccttctgcctcgccaccggtcccgtcgcggtttcacacgcatccgtccggtggacggagcaggctaggttgccggctgcccccggtcgtccctccttcgccgtcgagctggaggacacgcgtagcaacgccgggttcttctgcggcgagctgtggtgtggcctcatggagcccaagggcgagttggctcagaagcgtatccttccttctcgtttcgctcacccgtacgctattgaagaagcaatcaacagcttggaaattgatgctagcacgaaggcaagcaatgtcaacttgcctgctaagaaagacgcaagttcttcagatgcagtatcttgcatttcctccggcgatgcagctagtactgccaaggaaagtgaaatgaaccgagaaacttcttttggggaccaagggatgtattactatgggtattattatcctggttcatacggaggatgggatgagaatggctactttgttggatataatggcgtagaggtgcacccagcagtggttcaaactgacaatggttcatatctgtgtcatcttccgggatatgaaaatggatatgcttcttatagtcaggttgttcctggaggcattgctagtgtggatggtcaatatgtcagcaaagaaccatattattccactgcacttccaattcaggatcctaggacacctggcatttttgctcagccaattgcttacagaactgaactagcatctgcatactcatgggacccttctttcgttcttctggatggggttcagggacatccagttggtgtgcatcaaacaaattatgctgcaagaccaaaatattcttttaataagcatgttattccttcttcgaaagccacccgcagtgcaaaatccgcagcagatactgtcaaaggctcatcatcagctctagaaactgtaacaaatgctgtcaatagcagcccaccatcaaagagtgcaaataagacacctggtgcttccataacaaaaggatatcttccatatagcaagtctgtgatgcacactaataaccaagaaaaaaacagtgtttatcaaagcaaaggcatcaatgtgaaagaaagtggcagaagctggaacagccgagagaagcttgggagaagtaagctaaatggacagggtgattctgaatctaatgagaacaaccataccgataacctgaaacatagtttgagccatcggtctgatgttgttggattgtcaagtgcaggggatgccaatgctagcataccttcacctgttgcaataagcaaaaatgcatgcaatctttcagatttcgttacaaagtatgaacaagctctattctttgtaattaagtcctacagtgaagatgatattcacaagagtgttaagtacaatgtctgggcaagtactcctaatggaaataaaaggcttgacaatgcctatagggttgcacaggaaaggatagcagaaaaaggaaccaaatgtcctgttttccttttcttctcagttaatgcaagtggtcagttctgtggcgtggctgagatggttggtccagtagatttcaacaggaacatgaacttctggcaacaggacaagtggaatggtttcttctcggtaaaatggcacattatcaaggatgttcccaatccacaatttcgccatataattttggagaataatgagaataaacctgtgacaaacagcagggacacacaagaggtcaatttttcacaaggtacagagatgttgaacattttcaagaacttcacatgtaaaacatcaatactggatgactttgacttctatgaaaatcggcagaaagtaatgcaggacagaagaggcaagctgcttactacatcgtttgatcacccattgccaaaagctgaaaaatctccagaaattaaaagccaaacacaattgataagtggcccagaagttggtagagccaagagtgatgaggggcagggcaacaatgttgggatggtacttgatacaaccaagaaaaatgaggagcagagcagcaatgttccagaaatactcgatgcagcctgtagtaacaaggagcaacccaacaaaattgcaatagaaggatgatgcctcggctagttggtctgggaaaacgagatagcctctggaactgacttcaacctgaaatgataagtttgatgtgtgcaatatcaagaaaccaccattggtcatgggttctcttccattatctcatggaagcggggaaagggaaaaaatgaagcaaaggagctgtcttcccacgagaattgttcgatgactgggaaaaaaggttctaggactcatttaggttgaggaccctagtgctaaggcattagagcgccctccatgtctattttttccccatcttggagggtcctttcttttgtcgtgttgtgtctttttttctcttctttttttctattatactgcggctgatgtccaaagaagccagtctgccttatgggtgggtgtgctttaagggaatgtttgttgctttgtgggttgtcctctaggatgtggtatgttttgtttgttttctttaatctgtgcacttgttctagagactgacatagaagaaaagagaaaaaaagattgtgagggattaggaattaattacagtaacattatcttatgtctctgtttcttccattatcaagaaaagggaacaaaaaggattttaaaagctgttgatgtgtacttcgccgataccattt

SEQ ID NO: 209855 - DNA, 2140 bp, Zea Mays
cggccctcaagcagaatccccaggaggagatggcgctcacaagaatcggtcttgctggccttgcggtcatggggcagaaccttgccctcaacattgcagagaaagggttccccatctctgtgtacaacaggacaacctccaaggtggacgagaccgtgcagcgtgccaaggcagaaggaaaccttcccgtctacggcttccatgaccccgcgtcctttgtgaagtccattcagaagccacgggtggtgatcatgctcgtcaaggccggcgcgccagttgaccagaccatcgcgacgctcgcagctcacttggagcagggcgactgcatcatcgatggggggaacgagtggtacgagaacacggagaggagggagaaggccatggaggagcgcggcctcctgtatcttggcatgggtgtctctggaggagaggagggtgcccgcaacggcccgtccttgatgcccggaggctcgttcgaggcttacaagtacgtcgaagacattgtcctcaaggtggctgctcaggtccctgacagtggcccgtgtgtcacgtacattggcaaaggtggatcgggcaactttgtcaagatggttcacaacggaatcgagtatggcgatatgcagctgatttccgaggcatacgacgttctcaagtcggtcggtaagctcaccaacagtgagctgcaccaggtgttctccgagtggaacaagggcgagctcctgagcttcttgatcgagatcacggccgacatctttggcatcaaggacgagcatggcgatggctacctggtggacaaggtccttgacaagaccgggatgaaagggacagggaagtggacggtgcagcaggccgccgagctgtcggtggccgctcctacgatcgaggcgtccttggactcgaggttcctgagcgggctgaaggacgagcgggtggaggcctccaagatcttccagggtgactactactccaccggctcgccggtggacaaggcgcagctggtggaggacgtgaggcaggccctgtacgcgtccaagatctgcagctacgcgcagggcatgaacatcatcaaggccaagagcgcggagaaaggctgggggctcaacctcggcgagctggccaggatctggaagggcgggtgcatcatccgcgccatcttcctggaccgcatcaagaaggcctacgacaggaacccgggcctcgccagcctgctcgtagaccccgagttcgcgcaggagatcatggacaggcaggcggcgtggcgcagggtggtgtgcctcgccatcaacaacggcgtcagcaccccgggaatgtccgctagcctggcctacttcgactcctaccgcagggacaggctgcctgccaacctggtgcaggcccagagggactacttcggggctcacacctacgagagggtcgacatgcctggctctttccacaccgagtggttcaagattgcgcgcaacatctccaacaactgatgagctgctcaacggatggcatgcccggtgttgactactccagtcggtaatgagatttcctgcaggaacttgtctattgatctttgtaagttaattatttatatgaataaaataagagcagacatgcttgtgtttgggcaccctctgttttctcctccctgttaatcaatgcaccatgctccaaaggtgatgtacataattcagacaagtctcgatgatgtacatgttacagaactagcgaaagagttcagcttggtcgccgcagaaaacctccattgcctcgatgtgcgtccacattggagaggtcttcacgaaaggaggaggatgagttgagaagccatcaggtgttgtgattgaaacaaacttggacattggtctaccctcacaagcttttgggtgcagccagcagtgcaatctttgagctagtctccataactttgcttgcatggatgaagcacggtgatcatctcctgtgttaggggtccatgttcctcttctggtgcagccagcagtgttatctttgagctagtctccatagctttacttggcatagatgaagcacgatgatcatccctctgtattagggggtccatgttcctcttctggtgcagccaacagtgttatccttgagctagtcttcatagttttgcttgccgtggatg

SEQ ID NO: 209856 - DNA, 855 bp, Zea Mays
ccagtggtcacagtctctgtccctcccaaccgatttgttttagatggagcactgcacacacgatctgctcaggcttttgttttagatggagccagtggtcagctagacacaacattttccctgtttgtctcaagcgcacatgctttggcctttctagtggctcgcacatctgatctgatctgttctgttctgtcatgcacgcgcatgcacaatgcactagctacggcctacagcgctggcgctgggaccgggacggcgggtaccaccaccggcaccacgaccgcgggcggtgcgacgacgggcaccctgagccctggcgtgggcatcggcggcctcaacggcacggggatgggcggcagcaccggcctgggaccggcggacaacaccctggacgccgccgcgcccggcctgctccccggcgccgcatccctcgccgccgccgccgccgccctctccttgctcgccctgctgcagcattgattacgtgggctagctgcttgctctgtggtccgtgaaaaagaaagggggcacgggggattgtactggagaatgtgaattggttcggttggttggaggacggatccgatttcacttcacccatctttgttagtagtggcaggcggtggttgggggcggtgtattctttctttcttttccttatgcctttttgatgtatggtttatttagcggtaggatgccagtctctttcctacaaggaccattgtctctcctctctctctctttctttttaaattttgtttatttataaaagttgtacttgctatcctcttttcttaacctctctgtttttattagaccagtttcaataaaaattcttaagaagtattgttttta

SEQ ID NO: 209857 - DNA, 538 bp, Zea Mays
gaagaatattgctccccttcgttcacctcgcgtacgcgacaactaggctgaccgccgccgccctacgctcaactgcccacctgccctggtcttcgactcttcgtcgtgcgctttgccggcggcgagcacccatcacaccaggtatgtccgccagtcaaaccaaaggtgaaccaggaagcggctttttcgaaaagccggctttcccacattgcaaaaattaaaatcatcattagacaactgcagaagctcgtggtaaactactgcgactggggagggagcagcaggggcatcaggtacgctaattatcgagatgcgatggccagggtctaggttgacccctagtggtgcaaaggatggcctacttcgagaggcgatgtcggcggaccaatctagaagattgatgatctctacataaacacaagattacattgattcaactctgatctggtgtatgaaatattgattgatactcatttatattatttttttattatattattattaaatatatatgtctgtgtatttctctttcaaatta

SEQ ID NO: 209858 - DNA, 506 bp, Zea Mays
agaatattgctccccttcgttcacctcgcgtacgcgacaactaggctgaccgccgccgccctacgctcaactgcccacctgccctggtcttcgactcttcgtcgtgcgctttgccggcggcgagcacccatcacaccaggtatgtccgccagtcaaaccaaaggtgaaccaggaagcggctttttcgaaaagccggctttcccacattgcaaaaattaaaatcatcattagacaactgcagaagctcgtggtaaactactgcgactggggagggagcagcaggggcatcagggtctaggttgacccctagtggtgcaaaggatggcctacttcgagaggcgatgtcggcggaccaatctagaagattgatgatctctacataaacacaagattacattgattcaactctgatctggtgtatgaaatattgattgatactcatttatattatttttttattatattattattaaatatatatgtctgtgtatttctctttcaaatta

SEQ ID NO: 209859 - DNA, 579 bp, Zea Mays
aaaagactcagtagggtgtaggcaagcgcagggaggccagaaagttaccccccggcccccgaccggaccaatctatcaccaccacgccgccctaggtcgtcgccggcaacaatgtccccttctgccatcttcgtcttcctcctcgtctctgcggtgcatatgctggagtgcatcctcgacctcaagaggaggaggggatccatttctgatgatcagctcagactgcgtgtagagatcacgcaacttctcaaggaggccagtgctttgtcaacgccctcgacgtttgcgcaagccgcaaaactgaagcggttggctggtgctaaagagaaggagctggcaaaaaggaggaggaaggagaggttcttcggggcgctgcggctgcggctgcggctgcggatgcgatggccgtggctcgcgtccgtgtaccggcgcgcgctgcggcggctgaggacgagctacgagcaggccctgcgtgaactcatcgacggcagcatgctcgtgggcgcgctgcacgcgcccatcggcgtcgactgcgcccacgccgcctccttcgggcccatggccaccgtcgggttctga

SEQ ID NO: 209860 - DNA, 2482 bp, Zea Mays
actcgggtccctctttcgaggccgatgttgcatggcatggcatagccttcttccatgccaatcgccaaccacacaaaagcaagctgctccgttccgcagaggactcgagagcacgagaccgcagcaggcagcagctgaggcggcgctatattctccgaaactcctgatcaagatctgaagacacctcgggtccctctccttctcttctctccatctctctcctccctccaatgccccaaccacctcgccatgacataggttcagactcccgttttggcatcgctagccaccgagacagagaggagagctcggcctggcctggccttgtctggccaggatgaagtttatgaaactcggcacccgcccggacaccttcttcaccgccggctccgtgaggtctgtctgcacagaggtggccacagacctgcagatccttgtggataactgcctctaccatctccacaagttccctctgctctcgaaatgcatgctcctgcaagcgctctgcgccgacgccgtcgccggcgacgtcgtcgagctccggggattcccgggcggcggtgaggcgttcgaggcctgcgccaggttctgctacggcatcaccgtcacagtgagcgcgcgcaacctcgtgccgctccggtgcgcggccgcgcacctcgggatgtccgaggccaccgacaggggcaacctggccgccaagctcgacgcgttcctcgcctcctgcctcctccggcgctggaaggacgcgctgggcgtgctgcactccacgcgccactacgccccgctctgcgaggacctcggcctcacgtcccgctgcgtcgacgccgtggccgccctcatcgccagcccggataccgccctgccgtctaggtcgacgtcggcgtcgccgtggtgggcgcacgacatcgccgagctcggggtcgacctcttctggcggatcatagtcgctgtcaaggcgaccggtgccatccacgacaggaccgtcggcgacgcgctcaaggcgtacgcgcggcgttggctgcccaacgtcgccaaggatgggcacgggctctcggcgggccagccgttcgaccacgacgccggcagtgcggtcgtgaagcaggtcaccacgaggcaccgcctcctgctcgagacgatcgtgagcctgctcccagcggagagggacgccgtctcctgcagcttcctgctcaggctcctcgaggctgccaacatcctgagcgcgtccaaggcggagctggtcaagagggtggcgtggcagctggaggaggccagcgtcgccgacctgctgatcccgtcgctgtcctgcgtcagcgagacgctgtacgacgtggacgccgtgtcggccatcatcgacgagttcgcactgcggtgcgcggcggtcccgccggcgctggctctgtccgggagccccgacgacagcccggcgcactcggccgggcaccggcggtcacgttcggcggagagcgtgagcttcgacggcacgcgacgctccctgtcagccgcacccgtgtcgcagggcgctctggtgcaggtgggcaggttggtggacgggttcttgattgaggcggcaaaggatcccaacatgccgctggacaagctgctcgccattgccgaggccgtgccagacagcgcccggccggagcacgatggcatgtacaaagtcgtcgacacatacctcaaggcgcatccggagatgagcaaaagcgcgaggaagcggctgtgccgggtgctcaactgccggaagctgtcggagaaagcgtgcacacacgcggcgcagaacgagctcctcccgctgcgcgtggtcgtgcaggtgctcttcttcgagcacgcgcgcgccgcggcgctggcgccgggcgcgcacgccctggccgcggctgacctgccgagcaacatccgggcgctgctgtccaagtccgggtcgtccgaggacgaggaggcggagcgcgccgacgagcagcggctccgggcgctggccgccggcgcgtctcccggcggcgactggagcgtggagggcctccgtcgcgccgcgtccaagatcgccacgctgcggatgaagctggcggaggacgaagaccgtgacgccgacgagttcgcgcgcaaggccggcgtggcgcgcagcgcgtcgctgcggttcagggcgttctgcgcctttcccgccgggaagccgaagcggatgctcagcaggctgtggccgctgggcagaaacggcgttagccactagtagcagccatggttaggtacttaggtcctgtgatctcctgcctttttcttttctgagggtgatctgtttgtctcttctactagtactttctcggctcctccccttttgagttataattccaaggcaaattgtaccttgcattgcatgtagttgtgaattcaatggcaacaataaagatagaaattgcgctgggaacttactcctcgtatctgtaaataatatattacagttctctaaatattagatatacctaaaaaactg

SEQ ID NO: 209861 - DNA, 3474 bp, Zea Mays
ctcctccatcctgcccaccagccccgaagccattgcgccccgaagccgtcgcagatgctgttgcggaggcccgggaccgaaatttaactgcggttggtgaggtggcggcggaccgggtggcggcgggggcgggggcccagcgtggtagggcggcgccggcatcctgtttagggcgcctgcggtggcggcggcgtgtacggattcatctgcggcgggtagccgccctgcggaggcggcggtgcgtacggcctgtaagacgccatcgcgcggcggctagggttcctcggaacccgagccccagcacacagacaccgcgccggcggacactgctcgctcccccttctcctccgtcgccgccaccgcagaagcctctaccactgcacgtccgaggccaccgacacatattctaccaaatctatgggagcgcgaggtagtcggcgtctcggcgatttggcgaggagctggaaggaaggaaggaaggggcgatgagaatttcacgacagcttgtgaatcctcgcctaggatgccgacgggcacggcgcccacggtggtcaccttctgcgcctcttcgaggtggtgctcatcggctccatagatctggcaccatgcttagccgaccatggcgaggccatcaaggaggacaccggccacgatccgtcagatgatggagcccacgagccattttcacgtaaacttcttgaagataagcctcggatcacaaatggtccgtggatatatgagcaacactgagcttgagaccgctgtacatgcctttggaagtcgttgttccaatatctccagggtgtacagtatcaaatttacacactggcgaacacttctggttattcttgtagtgggtgattgaaatatcagacaagcccaagcaaagggaatctgaaccagcattcaagttcattggaaacgttcatggtgatgagcctgttgcaagagaggttcttatgcatcttgcaaattggctgtgtgataactatctgaaagattcactggcaactctcattgttgagaacatgcaccttcatatacttccgacaatgaaccctgatgggtttgctcttagatggcatggtaatgcaaacaatattgatctcaacagggattttcctgaccaaggggctcttgttgccaactatccatgggatggaactagagacacaagggctcaatatgactttgtttcacattgtaacatcctcaacaatgattttacttcttacaacaaacactactacggatgtcctgatgataagacattccagcacatggcatctgtgtatagtcggtctcactataacatgtctttgagcaaagaatttgaaggagggataacaaatggagcattctggtactacgtaggttgtgtatttgttggctttgaatcaaacaacatcattgcttgtggtccagattgcaagaacgggactgctaagcaagctaagatttcaatggcctattccttcatacacaggccattgagcgacgaggaacgccgtgtcacttgcaatgaccagagacgggaggtcttcgttgcccaggacatcgctaacaaggaaattgaccgcaccgttgcattcgacaaggtaagatggattagcaaataatattgtttgacatttaggtttttatattttatataatacactattaggtgagtgcctgtgcgttgcaggcctgggtttctctttgatatcattacggacgactcgtgaatattgtcatccatatcataatcgtataacacatatgtatatataagttatcgagatattatatgtccccgttgcaacgcacgggcactgacctagtattcatatatggactaatagtaatatggtcaagccaattcatggttcctcatatcttattcactttggcttgaccaatcctcgtaatcacttcaacctctattatgatcatatttatgcatagtaatttctcaggtcttgtccatacatttaaaccaatatagagatcatattatatccatttgcattgtctcactggttatttaaccttgtgttgaacctttgttcactgtcattatacactattcaagtatgttcatcatactgaatttcctgttcaacacttaccaaacttgttagtcctttaaatgtgttgtcatccaaatcaccaaaactcacaaaagggatgaatgcactttcagtctccccctttttggtgattgatgacaacacatttaaagcttacataagatttgataaataagattttgaatccaatgatatagtttcctccccctaaatatgtgcatttcagaaaataccaattttgtactcaaatggcaaaagcacatatttgggtcaaagtatggagacaactatatcatactattcatggggtgcactgagccataaaataaacgtcactcatcaatttcctacatcttatgttttacttatgattctcccccttttgtcaattatttccccccttttcaaaagtcttcttacacttagttacataagactaaaggtaagctttaacgcacaatttctccccctttgtcataaatctccaaaaaagatataaagaatataaagggtagaaattatgattaatcaagatttgaacacactatcatgaaaagggtccttatatggcacaaaggtaatggagaagtgtcataagtgatgtacctttgcgttttaccttttaaaaggggtgttccacacttgtgttgtatttagagttcattttgcaatctcttgttggcataattgtgacataggtccaagatatcaaatgaatattgtcatactaattgaaagataaatcttgatacctggagtctagatgtcacctagcattttcttatgataacaagaggcagcatgaaaattgcacaagtacagattatacaactagtgatcatgtacgaaaaatatcaattgaaaaccatcaattgatacaatttgatagataatcagatcactaattgcatattacactaagttctcctcaagttttagtgcacacatattgttggggaccttcggcttccgaaggtcctcaaaaacaggatttaacagtatttctggagtataatgtgtgaacaggtatcttcgaactcaagtcggcatcacagtagaccagaataatacgaaggttggtacagcgccgaaggtgtgagcaggaaagcttcggcgtagcagcaaaaagtgaaaccgacttaaagatgaaaaggctatttagacctcgacagattactatagaattattatcaagtgtaaagggcatgaatgtaattttgtatgggttgtgtcccgcgcctataaataggtgaacagtacccccgtactgttcacgctgacttggcattcgctttttgcgtcacgcttgtactatcatctccttccagttaaaggtacacttgtaattcaacgatatttctgtctatgcctgataataatacataattgtttatgttggctt

SEQ ID NO: 209862 - DNA, 1725 bp, Zea Mays
aattaatagtgttgggtgtgtttggttgcgggacggccaggacaaggatgtcccctggcgtcctctctcgttcctccaattttgagggataactggggacaacactgggatagtcatgtcccaactcttgaccctgaaccaaacaaccttatttgagggatcgtcccatcccgtcccgtcctgtcctatcattgcaaccaaacgcatcctaaaacttctcatgaagtattgcccaaaaactatcttcccatggttctaatggttatttgaagtttggattgcaagtaggggccttaatatttcctaataagatgtttccactttccactgttagttgcatttttattctttatatgaaaatggtttgttttactatcactgccctcttgacacctaaacaaaattttgactcattttgctctcccaaactatttaatctgggccagttcaccccctaatgaaaatattatatttccttctccatgttcaaatattgatatacttttgtatcataaggtctgttggcatctatcattttgcaaatttgcaccagcaacagaacatgtacatggcgaagacaaatcattaggtggcgacttttttctcaccacggtaacactgaatttcattatggcagcaacaaagttacaatattcaggtttcattaggtggtgttttttactaatatttgaagagtttgagttgggcgacaggggggtattgccagcaactggttaatgaactgttatggctgaagtgaaccattaatatagagtttgagttattctgtgttgtcacagacaaccgtatttacacacacagtatctcgcccgctcctccaagtctccctctctcaatataagcctatttctgaattctatttgtggtcgctttctttgatttgctgattgtcaccactggtttttagggctcaatatgactttgtttcacattgtaacatcctcaacaatgattttacttcttacaacaaacactactacggatgtcctgatgataagacattccagcacatggcatctgtgtatagtcggtctcactataacatgtctttgagcaaagaatttgaaggagggataacaaatggagcattctggtactacgtaggttgtgtatttgttggctttgaatcaaacaacatcattgcttgtggtccagattgcaagaacgggactgctaagcaagctaagatttcaatggcctattccttcatacacaggccattgagcgacgaggaacgccgtgtcacttgcaatgaccagagacgggaggtcttcgttgcccaggacatcgctaacaaggaaattgaccgcaccgttgcattcgacaaggtatcttcgaactcaagtcggcatcacagtagaccagaataatacgaaggttggtacagcgccgaaggtgtgagcaggaaagcttcggcgtagcagcaaaaagtgaaaccgacttaaagatgaaaaggctatttagacctcgacagattactatagaattattatcaagtgtaaagggcatgaatgtaattttgtatgggttgtgtcccgcgcctataaataggtgaacagtacccccgtactgttcacgctgacttggcattcgctttttgcgtcacgcttgtactatcatctccttccagttaaaggtacacttgtaattcaacgatatttctgtctatgcctgataataatacataattgtttatgttggctt

SEQ ID NO: 209863 - DNA, 3225 bp, Zea Mays
aattaatagtgttgggtgtgtttggttgcgggacggccaggacaaggatgtcccctggcgtcctctctcgttcctccaattttgagggataactggggacaacactgggatagtcatgtcccaactcttgaccctgaaccaaacaaccttatttgagggatcgtcccatcccgtcccgtcctgtcctatcattgcaaccaaacgcatcctaaaacttctcatgaagtattgcccaaaaactatcttcccatggttctaatggttatttgaagtttggattgcaagtaggggccttaatatttcctaataagatgtttccactttccactgttagttgcatttttattctttatatgaaaatggtttgttttactatcactgccctcttgacacctaaacaaaattttgactcattttgctctcccaaactatttaatctgggccagttcaccccctaatgaaaatattatatttccttctccatgttcaaatattgatatacttttgtatcataaggtctgttggcatctatcattttgcaaatttgcaccagcaacagaacatgtacatggcgaagacaaatcattaggtggcgacttttttctcaccacggtaacactgaatttcattatggcagcaacaaagttacaatattcaggtttcattaggtggtgttttttactaatatttgaagagtttgagttgggcgacaggggggtattgccagcaactggttaatgaactgttatggctgaagtgaaccattaatatagagtttgagttattctgtgttgtcacagacaaccgtatttacacacacagtatctcgcccgctcctccaagtctccctctctcaatataagcctatttctgaattctatttgtggtcgctttctttgatttgctgattgtcaccactggtttttagggctcaatatgactttgtttcacattgtaacatcctcaacaatgattttacttcttacaacaaacactactacggatgtcctgatgataagacattccagcacatggcatctgtgtatagtcggtctcactataacatgtctttgagcaaagaatttgaaggagggataacaaatggagcattctggtactacgtaggttgtgtatttgttggctttgaatcaaacaacatcattgcttgtggtccagattgcaagaacgggactgctaagcaagctaagatttcaatggcctattccttcatacacaggccattgagcgacgaggaacgccgtgtcacttgcaatgaccagagacgggaggtcttcgttgcccaggacatcgctaacaaggaaattgaccgcaccgttgcattcgacaaggtaagatggattagcaaataatattgtttgacatttaggtttttatattttatataatacactattaggtgagtgcctgtgcgttgcaggcctgggtttctctttgatatcattacggacgactcgtgaatattgtcatccatatcataatcgtataacacatatgtatatataagttatcgagatattatatgtccccgttgcaacgcacgggcactgacctagtattcatatatggactaatagtaatatggtcaagccaattcatggttcctcatatcttattcactttggcttgaccaatcctcgtaatcacttcaacctctattatgatcatatttatgcatagtaatttctcaggtcttgtccatacatttaaaccaatatagagatcatattatatccatttgcattgtctcactggttatttaaccttgtgttgaacctttgttcactgtcattatacactattcaagtatgttcatcatactgaatttcctgttcaacacttaccaaacttgttagtcctttaaatgtgttgtcatccaaatcaccaaaactcacaaaagggatgaatgcactttcagtctccccctttttggtgattgatgacaacacatttaaagcttacataagatttgataaataagattttgaatccaatgatatagtttcctccccctaaatatgtgcatttcagaaaataccaattttgtactcaaatggcaaaagcacatatttgggtcaaagtatggagacaactatatcatactattcatggggtgcactgagccataaaataaacgtcactcatcaatttcctacatcttatgttttacttatgattctcccccttttgtcaattatttccccccttttcaaaagtcttcttacacttagttacataagactaaaggtaagctttaacgcacaatttctccccctttgtcataaatctccaaaaaagatataaagaatataaagggtagaaattatgattaatcaagatttgaacacactatcatgaaaagggtccttatatggcacaaaggtaatggagaagtgtcataagtgatgtacctttgcgttttaccttttaaaaggggtgttccacacttgtgttgtatttagagttcattttgcaatctcttgttggcataattgtgacataggtccaagatatcaaatgaatattgtcatactaattgaaagataaatcttgatacctggagtctagatgtcacctagcattttcttatgataacaagaggcagcatgaaaattgcacaagtacagattatacaactagtgatcatgtacgaaaaatatcaattgaaaaccatcaattgatacaatttgatagataatcagatcactaattgcatattacactaagttctcctcaagttttagtgcacacatattgttggggaccttcggcttccgaaggtcctcaaaaacaggatttaacagtatttctggagtataatgtgtgaacaggtatcttcgaactcaagtcggcatcacagtagaccagaataatacgaaggttggtacagcgccgaaggtgtgagcaggaaagcttcggcgtagcagcaaaaagtgaaaccgacttaaagatgaaaaggctatttagacctcgacagattactatagaattattatcaagtgtaaagggcatgaatgtaattttgtatgggttgtgtcccgcgcctataaataggtgaacagtacccccgtactgttcacgctgacttggcattcgctttttgcgtcacgcttgtactatcatctccttccagttaaaggtacacttgtaattcaacgatatttctgtctatgcctgataataatacataattgtttatgttggctt

SEQ ID NO: 209864 - DNA, 1209 bp, Zea Mays
gccgcgccggattttcctttttgcccgagatcatgcacgcgatgtggaagcccgccaagttcaaatacatctacctgctggcgacgctgtacgtgttcacgctgacgctgccgtcgtcggcggccatgtactgggcgttcggcgacgagctgctgacccactcgaacgccttctcgctgctgcccaagacccggtggcgcgacgcggcggtgatcctgatgctgatccaccagttcatcaccttcggcttcgcgtgcacgccgctctacttcgtgtgggagaaggtgatcgggatgcacgacgccaagagcatcttcaagcgcgcgctggcgaggctgcccatcgtcgtgcccatctggttcctcgccatcatcttccccttcttcgggcccatcaactccgccgtcggcgcgctgctcgtcagcttcaccgtctacatcatcccggccctggcgcacgtcctcacctaccgcacggcgtccgcgcgcatgaacgccgcggagaagccgcccttcttcctgccgagctggacggggatgttcgtcctcaacatgttcatcgtggtgtgggtgctggtggtcggcttcgggctgggcggctgggccagcatggtcaacttcgtgaggcagatcgacacgttcgggctgttcgccaagtgctaccagtgcccgaagccgccggtcccggcggccgcgcagtcaccggcgccgctgccgcaccactagggcgcgcaggccccgtgacggcatggagctagcgtcgctgcttgcattgcagccggtgttaattgctactaggttttggtcgccttgtaatatacaagcctcctctagggtcgtagaactcgatcacagcagagtcacgcaaaggcggctcgtgccgtgccgtgccgccgccgcgttgctttcccgcccgccctcctctgcctgatcggtccgtcggcattggtgtcgttttgttttcgtttggcttgccaccggtattaaaaagttgagtgatggtcatggcttcttaatccatatgatgatatgacatacgtatcctatataggttcattagttatttttccttgttggttcgtggaggtcggtccatgttgtgtagcgtgtgggtgactgtaatggactgcgctggaatgctagctaaaggcagaaaacaaaaaaccacagtgcccttttgtttgttattgccctctgctcattagtttct

SEQ ID NO: 209865 - DNA, 3405 bp, Zea Mays
gcaaggcgcttgttataaagccgcaagtggtaccatttctcactcgccctctctccgctcgctcgctctctctctcaccgaatcacacacacaggcaggccagtgaggcaggggcacgaaggcgcggctccctctctcaagcccctcgccattactcgctcataaaggaagaacagagcgagcgggtagcgaggaagaagctgggccgcggggcaagaggagagaggtccccagccgtaggtctgctgtgcaactccggctcgccgcctgccaaccgcgcggcgcggccaccacgctaggcccctcgccctcctccgggcggagacgggaaggccgtgcgctcaaggatggcgcgcgagcagctggaggagtccatcgtggccgacggcaacggcaaggaggaagaggtcggggtcatgggcatcggcgccgcggacggcgccgacgaccagcacggcggcggcaagctcagcatgaagagcctgctgtggcacggcggctccgtctgggacgcgtggttcagctgcgcctccaaccaggtggcgcaggtgctcctgacgctgccgtactccttctcccagctggggatgctgtccggcgtgctgctgcagatcttctacggcttccttggcagctggaccgcgtacctcatcagcgtcctctacgtcgagtaccgctcccgcaaggagaaggagggcgtcagcttcaagaaccacgtcatccagtggttcgaggtgctggacgggctgctgggcccctactggaaggcggcgggtctggccttcaactgcacgttcctgctgttcggctccgtcatccagctgatcgcctgcgcgagcaacatctactacatcaacgaccggctggacaagcggacatggacgtacatcttcggcgcctgctgcgccaccacggtgttcatcccgtccttccacaactaccggatctggtccttcctgggcctcggcatgaccacctacaccgcgtggtacctcgccatcgccgcgctcctcaacggccaggccgaaggcgtggcgcactccggccccaccaagctcgtgctctacttcaccggcgccaccaacatcctctacaccttcggcggccacgccgtcacagtcgagatcatgcacgcgatgtggaagcccgccaagttcaaatacatctacctgctggcgacgctgtacgtgttcacgctgacgctgccgtcgtcggcggccatgtactgggcgttcggcgacgagctgctgacccactcgaacgccttctcgctgctgcccaagacccggtggcgcgacgcggcggtgatcctgatgctgatccaccagttcatcaccttcggcttcgcgtgcacgccgctctacttcgtgtgggagaaggtgatcgggatgcacgacgccaagagcatcttcaagcgcgcgctggcgaggctgcccatcgtcgtgcccatctggttcctcgccatcatcttccccttcttcgggcccatcaactccgccgtcggcgcgctgctcgtcagcttcaccgtctacatcatcccggccctggcgcacgtcctcacctaccgcacggcgtccgcgcgcatggtacgtatacatatgcatgcgtgcatttgcattgcattgcacccccgtcgtttagcaaacaataacaacggcgtcctgtggcctggccggccgtcgcgttgcctaatgcctactggttcgggtacgagtaagtgacccgatccgttcatccccgttgcctagctagagtgcagtagtaccgccaccagtcgcagcagctgtcacgaacagtggcaggactgcaacacgaaatagacagtggagatccgtgcacacgcagcagccagttcacgttagatgcaaagcaccggtcccccacttgggcaaatcccccaatcattgaatggagacaacagccacattcaattcgaagccggccccgcccccgcggcgcccgacaacgatatgggacgacggatcggggatcggaacaccgcatcacccccacgtcatcatccgcgtctctgcccgtcgcctcgccgaatgccggtgcccatggcagatgtaggcttcactgtgccggttccgacagctggcgggggcggtttcggagcgacttttttgcgagtacggcacggcggcgatggcaacgccggcgtgggtcaaggaaccgcttgcctgtgacggaagatctgacgtagcgccgatgcggtgctgacgttgggtgtcgcgctgtgacggaagaccctcctggcgaggcgcgacgcgacggtggtcgcgacgtcgcggcactggcgcgcgtctggacgcactcggccggccaatcgcgctcccaggtcccagggcccggcatcgtgtggcggtgtggctggaacgcgagagatgatggctcctctgtcctccgtagacaacgggatggcgatggagatgtgagatctcggtgtgcgctggagggttcctttcctcgccctccgttttccccagctttttatttccgaaaggaattcgagcagtgaccctgtgaaaatgcctcgaaaaggatagggctaggaacaagctaaggcggggcacgccgcgatgcttatcttttattcatgtcagtgcttctggcgatcgatttcattctgacgactgctgctctgtgtttccctgcaaaaaaaaaattatttgtttttgcaacagaacgccgcggagaagccgcccttcttcctgccgagctggacggggatgttcgtcctcaacatgttcatcgtggtgtgggtgctggtggtcggcttcgggctgggcggctgggccagcatggtcaacttcgtgaggcagatcgacacgttcgggctgttcgccaagtgctaccagtgcccgaagccgccggtcccggcggccgcgcagtcaccggcgccgctgccgcaccactagggcgcgcaggccccgtgacggcatggagctagcgtcgctgcttgcattgcagccggtgttaattgctactaggttttggtcgccttgtaatatacaagcctcctctagggtcgtagaactcgatcacagcagagtcacgcaaaggcggctcgtgccgtgccgtgccgccgccgcgttgctttcccgcccgccctcctctgcctgatcggtccgtcggcattggtgtcgttttgttttcgtttggcttgccaccggtattaaaaagttgagtgatggtcatggcttcttaatccatatgatgatatgacatacgtatcctatataggttcattagttatttttccttgttggttcgtggaggtcggtccatgttgtgtagcgtgtgggtgactgtaatggactgcgctggaatgctagctaaaggcagaaaacaaaaaaccacagtgcccttttgtttgttattgccctctgctcattagtttct

SEQ ID NO: 209866 - DNA, 1207 bp, Zea Mays
ccctcaaccgcgcattcccctctcccacacccgcctcgttcgcccctaccgcgccatcaacgcgcctcccccgccgcacaccccgtcctccccatgccgaatcgtgatggttatgctccccacccacgcgccacgtgcctcctccttccccgccgctcccacccgagatggttagctcccctccttcttctggtcccttcccctgcctcactgccagccagcgatggagcaaggccaagggattcgccggattcaccgagcgggctctggtggcggccggcgctgccgtcgtgtccgccattcttgtcaacccccttgacgtcgccaagaagtaatattgctcgaaaatgtagagctgactcttgaagcctttgactacatgcagctgccattcacgctgaaaggacaaattaggaagctaagcatctagataggagaatttgattggttcgtgtcaatatttaatttcttagctcactctgttcatgcctttgtggttcatggacaactgctgctacgtgctcccttccccgacagcgcattctaacacgacatgatacaccagcaattggaatgttgtcaacatcagcggcaacgacgacaacgccacatcgagaaacaacaactgtgggccagggagcacaatcccgtggtgcggtgacttgcccacgtttgccatgctgccttgatgcatggcacatcaacaagaagagcaccagtttggaaggctaattccgaaggaattgagatgtgcagagggagatgaagaatgtggagaaagacatcagggtagctaccaagcgcaatgacatgttatctgcaaagggtaccatcaggtccgcatgcaccaagcagatgtggagaagccggcttttcgcacccaccatggacattttgaattcctggttatggcttttggattgtgtaatgctccttctaccttctaggccttaatgaatgaggtgctctctaagttccttcgcaaattcgtcttggtcttcttcgacgatattcttgtatacagtatatcctgggaggatcatctagagcaccttgctttagttttagctcaacttcgtcatcatcagttgtatcttaaacattccaagtgtgcctttgctcaagatacaatgggttatcttggccatgttatttcaaccaagggagtggaggctgacccgaacaaagttcaagatgtggattgttg

SEQ ID NO: 209867 - DNA, 2619 bp, Zea Mays
cgcgcgcctgccctgtcccgggtggcggtgatcgatccagcagttaaaacgggcgggacgcctcctctcccgcgtaaaaaggagctcccaccgctcgccaccactaatctatcgtcctcctcccaccctccctgcggccggtcaccaacgccggttgctgctgttctcgcgcgctccccgcctcttcttctcttctaggtgccgtcggagcttgcttttggggagtccggcgaaggtggagaggaaccgagaaattaaagatgtcttgctgcggtggcgccgaggaggacagctacggcccgccggccaaccaggcggtcccaccacccaacgccaacgcccccggtaacagaggcggtccgagggggccgggcgcgcccagggtcggcggccccgcaaagcccatcagcatcgacgcgccctccatacccttggacgagctaaagaagatcaccaacaacttcagcgagcgcgccctcatcggcgagggctcctacggccgcgtctacaacgccacgctcggcgacggccgcgccgccgtcatcaagaagctcgacaccagcgcctcgcaggactccgacaccgacttctccgcgcagatagccatggtctccaagctcaagaacgagtatttcctggagctcctggggtactgcttggaggacggcaaccggatggtagcctaccagttcgccacgatgggttccttgcataacatactacacgggaagaaaggagtccagggcgcggagcccggccccgtcctcaactgggctcagcgcgtgaagatagcctacggagccgcgagaggtctggagtacctgcacgagaaggtgcagccgtcgatcgtccaccgggacatccgctccagcaacgtcctcatcttcgacgatttcagctccaagatcgccgacttcaacctcaccaaccagggcaccgacacagccgcgcgcttgcactctactcgtgtgctggggacctttgggtaccatgctccagaatcaaccagaagagcgacgtctacagtttcggtgtgatccttctggagctactcaccgggcggaagccagtcgaccacaccatgccgaaaggccagcaaagccttgttacctgggccactccaaggttgagcgaagacaaagtgaagcagtgtgtcgatccgaagctcaacagcgactaccctccaaaggcggttgcaaagctggcggcggttgcagcgctgtgcgttcagtacgagtccgacttccggccaaacatgaccatcgtggtgaaggcgatcacgcctctcctgaacgcacctaaaccggctgctccggccgcgccgcaatcctgatcaaccaaccagccagatgacagaatttagccaacaccgcggtttccctctgtttctgatcatagatatgtgtttcaaggaaccgcgcatccttgctccatccatccagcgcttatgcttctgtaaaggaaaaaacaacactgatctgctggtgctgcaggacacatataggggaatttttaaaaatgttaatctgctactctgaattcgtgtgcttcttgctgtaagtttgtgttataccatgtgcagttttagagagtacacatgcagtttctagctacaaaagtaggcacgacgatggtttccagcttttccaaatataaaacaaattcacagccacagctacaggagtgcatcagatcaagatagtattggctctttttcaccatatataattgctggtaccaattacaaaaaggagcaaactctgatgactccaaagtttgcttacgcttaaaccaaaactttggtgagcaactggaaaaactactacatagaatggacatgcaaaactttcaccggttgtttgcattatgaccactagggaggcattgcacatgtgtccagatcacatgacgtgctgatgaatactgcggttgtctcccactagcatttgagcactgtaaatagaaaaaggtcagcaaaaattaaaaaggataaaaacactcagaagccttttcctaaagaaaaaggtcagcaaatttctaaagtataacatgtgaagtgaaggttgatcctgcataatttgacatgattcaggtagtgatttgttacttgatcttttaccgactacctcgattcctcgaaactacatcatgtcttgaaccaattggatcgaaatggcagaggtgagcatccctgtcattctctcaataccagcaaaaaaaatcaataaataagtaaaaggttcaggttaactcctgctaggaactgtcacagtacttaatagctctcaaggcctgttttactctataccagttgagatacaatgatacatgtatcagtggaaaatctgaatgtaacaatttcaatattccctccattccaagcaggaacataagctattgagagtgagattttgaatcacacttctggctacaggccaattttccatatttttttaacaacatgggacattgggaaatctgggggattaatttttgttcaattgagatttttatgtaataatgcaaattgcaatccagatttggatctctggttccaagcagtagctagttgtgaaacatctttcattcgaattgcatctaaacagaactaaacagaat

SEQ ID NO: 209868 - DNA, 1066 bp, Zea Mays
gtgctgcgcagatagcgtggcgccaaaccagcgccgtccaactgaaccagtggacagggctcgaggaggcagccccgcactacactactcgagggaagcagggaaccgtcgaaccgaggccccgtccgtcccaactcacgtttagcaagaagaaggacggtgccaataaggaggccacagcggccaagccgaagaaggccgcggcgctgccgctgccggagatgatgcaggaggagatcatcccgccgctgaaggccgccttggaggcggaggaggacgtgtcccaggtccagctcgccttcgaaaacaacacgctagagggatccttcataaaggacgacgtcccttattgtttctgggccttctttccaaaaggagacctcacaggacccaagggcttcgcgctatcgtcctacagcaacgaggtgagcaccatcgagccgttcctgatcgacgagaagagggtaacggccaagtacgtggtgttctgggtttacaagaggctggctgggcaaggcatccttccggtctggaaggaagaggagggggaggatcatcaggacgccaagtagaacacacgcaggaggcaggagggtgctgctgtgaacctacacacagtcatcatgtctgaaactgttaaagttcgtctgctaatatatatacagatgctaagagctgctgagacacatgcatttcagcatttggcttctgctgcataggcgcatagccattcgcagtcgcaatcccttcgtaatcttgtgctgcagaagccagtcaaatttgttgaacaatcgaaaccttcgtgggccgggatcgacgacgagtcccgtctgaaagctatggtatctgaatattattatttgttatcgccagtcctgcgtgccgtactctatccgtccagcccttcgccatctgtttagaatagaataccttcatgtaaatcaagagatttcagagattattaatttaagcgaaaactgttatcttattgttcggttgcatggtattctgctccctcacaattttaaatggtaaaaaaaagtaaaaaaatatacataaataaaga

SEQ ID NO: 209869 - DNA, 1999 bp, Zea Mays
ggaagagaagtggagcaccagcgaaccgcatatgctcggggttcttcgtcgcgcagccctcgccgcagcgtcatcgccggcggcggacctccgacagaccaagaagtttcatatggtcttaattgggctattgctggaaaaggtgtcattgtgaaagataaggtcctccataacttggaaacatctgagcttcagaaaggtggcgctacttaccctgactttttgtctggtataccacttcatgttagaggagatgttattggtggtgtccctggtgtttctaaagctcaatttgcaaagcttctaaaactggtgacgttccatctttcatccatctcgtgtctatatgttcaagatggcgccattggttcctcagcagaatgtgatgcaaaggttcgggtcattagtgataatccctctgctgttatgttactgtcgaatgtcctttggaaaataccagatcgtgcgatttcccatgacacatcccctttgactatatatgctaccagttcaataagtaacaacgttaagactgttcttggttctggaacacaatatgctaatggatttgctgtggcggatattgaacgatcatctctaatcctatgcggtaaagcatttgctgattcagctatcgtgaaagatgcacttactgctatgacagccccaatattgtctgcaagaggaggcctccctgttccaggatggattctgaactttggtggttctactgtattattgtttgccccagtggaaatcatgatgtcctgcgtagaaatccacaatgctctattgtccattgactgtggtgcagtcatatcttccaaggggtctactgtgcttttcccaacaaaggcaagcagggagcagaaactgcttaccaaaccaactgcagtaattatcgtatcatctgatagctctggcgccataccatctgtatgtaagctctctcctggccaggctgcctaccatttcttggctggatatcacgatggaaaatttgtcccagcatacaacagagccccctctcctgctgacccacttgcacttgcaagttctttattctcacatttgaaagaagatgatacaccatcgtatctgatcaacgctaagcactctggaaagtacattgacggcaatgggtttatgaaattattaaagctggcactatctcacgatcttcctgacatcaaaactgaaggctctagaggttagtacgtagttcttggtgccctacatactcaatatcttggttagtgatatccataaagtacggtccaattttaaccgacaaaaatacatctttggttgaagttggggaactcaaggggaagtacaggagctttctatccagcaagtttggccaatgtttacccgaggaattctctttttaggagatacaccctgaggttgcaatgaacatgtatatttactggcataggtttacattttggtttgaaaaggtgtcagtattcccattctgtctcagtttcaatgtaatactctattaccttacattgcatctttccgcctcctggtgtttggatatactgacgtaacgacaatgtagctagtacctacatgcatgaattgtcttgtgcactccgcttcagtcaaattttgttaagcagcagaaaattggaaactctcagtatacatgtcacgtgcgactttgtgagctgcactgtgcactgcagagatcggactgtactattctgtaggatcgcttcgctccagattcccagtaacaaccaaatggtccaaagctgctcttcatcattctgcagtgtccccggcttcactttaccggacactgttgcctcttcacaattactactcctggggctggggcaaccagagtgcagaatgcagtgaactgtgaagcattggaggacacggtcaaccgtcgacattgagaaattgaaccttaccctttcgttttacgcgggagctgccagagcttcacatggttacgctgagaagaccggcgcggtggtcc

SEQ ID NO: 209870 - DNA, 1912 bp, Zea Mays
gaacggtggaagagaagtggagcaccagcgaaccgcatatgctcggggttcttcgtcgcgcagccctcgccgcagcgtcatcgccggcggcggacctccgacagtttcagtgtgcttaccatagaagcagtgagagattatcacctatccgagagaagaccaagaagtttcatatggtcttaattgggctattgctggaaaaggtgtcattgtgaaagataaggtcctccataacttggaaacatctgagcttcagaaaggtggcgctacttaccctgactttttgtctggtataccacttcatgttagaggagatgttattggtggtgtccctggtgtttctaaagctcaatttgcaaagcttctaaaactggtgacgttccatctttcatccatctcgtgtctatatgttcaagatggcgccattggttcctcagcagaatgtgatgcaaaggttcgggtcattagtgataatccctctgctgttatgttactgtcgaatgtcctttggaaaataccagatcgtgcgatttcccatgacacatcccctttgactatatatgctaccagttcaataagtaacaacgttaagactgttcttggttctggaacacaatatgctaatggatttgctgtggcggatattgaacgatcatctctaatcctatgcggtaaagcatttgctgattcagctatcgtgaaagatgcacttactgctatgacagccccaatattgtctgcaagaggaggcctccctgttccaggatgtggaaatcatgatgtcctgcgtagaaatccacaatgctctattgtccattgactgtggtgcagtcatatcttccaaggggtctactgtgcttttcccaacaaaggcaagcagggagcagaaactgcttaccaaaccaactgcagtaattatcgtatcatctgatagctctggcgccataccatctgtatgtaagctctctcctggccaggctgcctaccatttcttggctggatatcacgatggaaaatttgtcccagcatacaacagagccccctctcctgctgacccacttgcacttgcaagttctttattctcacatttgaaagaagatgatacaccatcgtatctgatcaacgctaagcactctggaaagtacattgacggcaatgggtttatgaaattattaaagctggcactatctcacgatcttcctgacatcaaaactgaaggctctagagttggggaactcaaggggaagtacaggagctttctatccagcaagtttggccaatgtttacccgaggaattctctttttaggagatacaccctgaggttgcaatgaacatgtatatttactggcataggtttacattttggtttgaaaaggtgtcagtattcccattctgtctcagtttcaatgtaatactctattaccttacattgcatctttccgcctcctggtgtttggatatactgacgtaacgacaatgtagctagtacctacatgcatgaattgtcttgtgcactccgcttcagtcaaattttgttaagcagcagaaaattggaaactctcagtatacatgtcacgtgcgactttgtgagctgcactgtgcactgcagagatcggactgtactattctgtaggatcgcttcgctccagattcccagtaacaaccaaatggtccaaagctgctcttcatcattctgcagtgtccccggcttcactttaccggacactgttgcctcttcacaattactactcctggggctggggcaaccagagtgcagaatgcagtgaactgtgaagcattggaggacacggtcaaccgtcgacattgagaaattgaaccttaccctttcgttttacgcgggagctgccagagcttcacatggttacgctgagaagaccggcgcggtggtcc

SEQ ID NO: 209871 - DNA, 2100 bp, Zea Mays
cgccgcagcccgcagcccgcagccaaacgccgccaggccggggaaggggaacggtggaagagaagtggagcaccagcgaaccgcatatgctcggggttcttcgtcgcgcagccctcgccgcagcgtcatcgccggcggcggacctccgacagtttcagtgtgcttaccatagaagcagtgagagattatcacctatccgagaccaagaagtttcatatggtcttaattgggctattgctggaaaaggtgtcattgtgaaagataaggtcctccataacttggaaacatctgagcttcagaaaggtggcgctacttaccctgactttttgtctggtataccacttcatgttagaggagatgttattggtggtgtccctggtgtttctaaagctcaatttgcaaagcttctaaaactggtaggttctaaattttggcttcaccactcaggccctgttcgttttttgtcaaacaatggggattgagggggaacaaatcccctataagtcaaaatcctcctcaatcccttccaatccccccccccccaaatccccatgattttgggatgaaacgaacatggcctcaatgggatgatgatattcaatgatgattgtcatgaatggagctgaaatactgttagtccctttttttagcatctgattttttttctcatttttaatttagttgtgacatctccctatttgttgaagggcagtcctggtgcaacaatgagagctgtctcactgagtcatcaggtcacgggttcgaagtagtctctccgtatttgcgggggaaggcttgcttcggtttatccctatcctagacgtcacatatgggagcctccaacagtggatctacctttttttatctccctgtttgttgacagactacttgcttgcataggtgacgttccatctttcatccatctcgtgtctatatgttcaagatggcgccattggttcctcagcagaatgtgatgcaaaggttcgggtcattagtgataatccctctgctgttatgttactgtcgaatgtcctttggaaaataccagatcgtgcgatttcccatgacacatcccctttgactatatatgctaccagttcaataagtaacaacgttaagactgttcttggttctggaacacaatatgctaatggatttgctgtggcggatattgaacgatcatctctaatcctatgcggtaaagcatttgctgattcagctatcgtgaaagatgcacttactgctatgacagccccaatattgtctgcaagaggaggcctccctgttccaggatggattctgaactttggtggttctactgtattattgtttgccccagtggaaatcatgatgtcctgcgtagaaatccacaatgctctattgtccattgactgtggtgcagtcatatcttccaaggggtctactgtgcttttcccaacaaaggcaagcagggagcagaaactgcttaccaaaccaactgcagtaattatcgtatcatctgatagctctggcgccataccatctgtatgtaagctctctcctggccaggctgcctaccatttcttggctggatatcacgatggaaaatttgtcccagcatacaacagagccccctctcctgctgacccacttgcacttgcaagttctttattctcacatttgaaagaagatgatacaccatcgtatctgatcaacgctaagcactctggaaagtacattgacggcaatgggtttatgaaattattaaagctggcactatctcacgatcttcctgacatcaaaactgaaggctctagagagatcggactgtactattctgtaggatcgcttcgctccagattcccagtaacaaccaaatggtccaaagctgctcttcatcattctgcagtgtccccggcttcactttaccggacactgttgcctcttcacaattactactcctggggctggggcaaccagagtgcagaatgcagtgaactgtgaagcattggaggacacggtcaaccgtcgacattgagaaattgaaccttaccctttcgttttacgcgggagctgccagagcttcacatggttacgctgagaagaccggcgcggtggtcc

SEQ ID NO: 209872 - DNA, 1584 bp, Zea Mays
gcgagcgccgcagcccgcagcccgcagccaaacgccgccaggccggggaaggggaacggtggaagagaagtggagcaccagcgaaccgcatatgctcggggttcttcgtcgcgcagccctcgccgcagcgtcatcgccggcggcggacctccgacagtttcagtgtgcttaccatagaagcagtgagagattatcacctatccgagccattacaaaatatctgcaaaatttctcgactactttttgttgcacagagaagaccaagaagtttcatatggtcttaattgggctattgctggaaaaggtgtcattgtgaaagataaggtcctccataacttggaaacatctgagcttcagaaaggtggcgctacttaccctgactttttgtctggtataccacttcatgttagaggagatgttattggtggtgtccctggtgtttctaaagctcaatttgcaaagcttctaaaactggtgacgttccatctttcatccatctcgtgtctatatgttcaagatggcgccattggttcctcagcagaatgtgatgcaaaggttcgggtcattagtgataatccctctgctgttatgttactgtcgaatgtcctttggaaaataccagatcgtgcgatttcccatgacacatcccctttgactatatatgctaccagttcaataagtaacaacgttaagactgttcttggttctggaacacaatatgctaatggatttgctgtggcggatattgaacgatcatctctaatcctatgcggtaaagcatttgctgattcagctatcgtgaaagatgcacttactgctatgacagccccaatattgtctgcaagaggaggcctccctgttccaggatggattctgaactttggtggttctactgtattattgtttgccccagtggaaatcatgatgtcctgcgtagaaatccacaatgctctattgtccattgactgtggtgcagtcatatcttccaaggggtctactgtgcttttcccaacaaaggcaagcagggagcagaaactgcttaccaaaccaactgcagtaattatcgtatcatctgatagctctggcgccataccatctgtatgtaagctctctcctggccaggctgcctaccatttcttggctggatatcacgatggaaaatttgtcccagcatacaacagagccccctctcctgctgacccacttgcacttgcaagttctttattctcacatttgaaagaagatgatacaccatcgtatctgatcaacgctaagcactctggaaagtacattgacggcaatgggtttatgaaattattaaagctggcactatctcacgatcttcctgacatcaaaactgaaggctctagagtgtccccggcttcactttaccggacactgttgcctcttcacaattactactcctggggctggggcaaccagagtgcagaatgcagtgaactgtgaagcattggaggacacggtcaaccgtcgacattgagaaattgaaccttaccctttcgttttacgcgggagctgccagagcttcacatggttacgctgagaagaccggcgcggtggtcc

SEQ ID NO: 209873 - DNA, 2203 bp, Zea Mays
caggcagcgagcgccgcagcccgcagcccgcagccaaacgccgccaggccggggaaggggaacggtggaagagaagtggagcaccagcgaaccgcatatgctcggggttcttcgtcgcgcagccctcgccgcagcgtcatcgccggcggcggacctccgacagtttcagtgtgcttaccatagaagcagtgagagattatcacctatccgagagaagaccaagaagtttcatatggtcttaattgggctattgctggaaaaggtgtcattgtgaaagataaggtcctccataacttggaaacatctgagcttcagaaaggtggcgctacttaccctgactttttgtctggtataccacttcatgttagaggagatgttattggtggtgtccctggtgtttctaaagctcaatttgcaaagcttctaaaactgtcctggtgcaacaatgagagctgtctcactgagtcatcaggtcacgggttcgaagtagtctctccgtatttgcgggggaaggcttgcttcggtttatccctatcctagacgtcacatatgggagcctccaacagtggatctacctttttttatctccctgtttgttgacagactacttgcttgcataggtgacgttccatctttcatccatctcgtgtctatatgttcaagatggcgccattggttcctcagcagaatgtgatgcaaaggttcgggtcattagtgataatccctctgctgttatgttactgtcgaatgtcctttggaaaataccagatcgtgcgatttcccatgacacatcccctttgactatatatgctaccagttcaataagtaacaacgttaagactgttcttggttctggaacacaatatgctaatggatttgctgtggcggatattgaacgatcatctctaatcctatgcggtaaagcatttgctgattcagctatcgtgaaagatgcacttactgctatgacagccccaatattgtctgcaagaggaggcctccctgttccaggatggattctgaactttggtggttctactgtattattgtttgccccagtggaaatcatgatgtcctgcgtagaaatccacaatgctctattgtccattgactgtggtgcagtcatatcttccaaggggtctactgtgcttttcccaacaaaggcaagcagggagcagaaactgcttaccaaaccaactgcagtaattatcgtatcatctgatagctctggcgccataccatctgtatgtaagctctctcctggccaggctgcctaccatttcttggctggatatcacgatggaaaatttgtcccagcatacaacagagccccctctcctgctgacccacttgcacttgcaagttctttattctcacatttgaaagaagatgatacaccatcgtatctgatcaacgctaagcactctggaaagtacattgacggcaatgggtttatgaaattattaaagctggcactatctcacgatcttcctgacatcaaaactgaaggctctagagttggggaactcaaggggaagtacaggagctttctatccagcaagtttggccaatgtttacccgaggaattctctttttaggagatacaccctgaggttgcaatgaacatgtatatttactggcataggtttacattttggtttgaaaaggtgtcagtattcccattctgtctcagtttcaatgtaatactctattaccttacattgcatctttccgcctcctggtgtttggatatactgacgtaacgacaatgtagctagtacctacatgcatgaattgtcttgtgcactccgcttcagtcaaattttgttaagcagcagaaaattggaaactctcagtatacatgtcacgtgcgactttgtgagctgcactgtgcactgcagagatcggactgtactattctgtaggatcgcttcgctccagattcccagtaacaaccaaatggtccaaagctgctcttcatcattctgcagtgtccccggcttcactttaccggacactgttgcctcttcacaattactactcctggggctggggcaaccagagtgcagaatgcagtgaactgtgaagcattggaggacacggtcaaccgtcgacattgagaaattgaaccttaccctttcgttttacgcgggagctgccagagcttcacatggttacgctgagaagaccggcgcggtggtcc

SEQ ID NO: 209874 - DNA, 2089 bp, Zea Mays
atcgtcccctccgccgttgcggcgagcaggcagcgagcgccgcagcccgcagcccgcagccaaacgccgccaggccggggaaggggaacggtggaagagaagtggagcaccagcgaaccgcatatgctcggggttcttcgtcgcgcagccctcgccgcagcgtcatcgccggcggcggacctccgacagtttcagtgtgcttaccatagaagcagtgagagattatcacctatccgagccattacaaaatatctgcaaaatttctcgactactttttgttgcacagagaagaccaagaagtttcatatggtcttaattgggctattgctggaaaaggtgtcattgtgaaagataaggtcctccataacttggaaacatctgagcttcagaaaggtggcgctacttaccctgactttttgtctggtataccacttcatgttagaggagatgttattggtggtgtccctggtgtttctaaagctcaatttgcaaagcttctaaaactggtgacgttccatctttcatccatctcgtgtctatatgttcaagatggcgccattggttcctcagcagaatgtgatgcaaaggttcgggtcattagtgataatccctctgctgttatgttactgtcgaatgtcctttggaaaataccagatcgtgcgatttcccatgacacatcccctttgactatatatgctaccagttcaataagtaacaacgttaagactgttcttggttctggaacacaatatgctaatggatttgctgtggcggatattgaacgatcatctctaatcctatgcggtaaagcatttgctgattcagctatcgtgaaagatgcacttactgctatgacagccccaatattgtctgcaagaggaggcctccctgttccaggatggattctgaactttggtggttctactgtattattgtttgccccagtggaaatcatgatgtcctgcgtagaaatccacaatgctctattgtccattgactgtggtgcagtcatatcttccaaggggtctactgtgcttttcccaacaaaggcaagcagggagcagaaactgcttaccaaaccaactgcagtaattatcgtatcatctgatagctctggcgccataccatctgtatgtaagctctctcctggccaggctgcctaccatttcttggctggatatcacgatggaaaatttgtcccagcatacaacagagccccctctcctgctgacccacttgcacttgcaagttctttattctcacatttgaaagaagatgatacaccatcgtatctgatcaacgctaagcactctggaaagtacattgacggcaatgggtttatgaaattattaaagctggcactatctcacgatcttcctgacatcaaaactgaaggctctagagttggggaactcaaggggaagtacaggagctttctatccagcaagtttggccaatgtttacccgaggaattctctttttaggagatacaccctgaggttgcaatgaacatgtatatttactggcataggtttacattttggtttgaaaaggtgtcagtattcccattctgtctcagtttcaatgtaatactctattaccttacattgcatctttccgcctcctggtgtttggatatactgacgtaacgacaatgtagctagtacctacatgcatgaattgtcttgtgcactccgcttcagtcaaattttgttaagcagcagaaaattggaaactctcagtatacatgtcacgtgcgactttgtgagctgcactgtgcactgcagagatcggactgtactattctgtaggatcgcttcgctccagattcccagtaacaaccaaatggtccaaagctgctcttcatcattctgcagtgtccccggcttcactttaccggacactgttgcctcttcacaattactactcctggggctggggcaaccagagtgcagaatgcagtgaactgtgaagcattggaggacacggtcaaccgtcgacattgagaaattgaaccttaccctttcgttttacgcgggagctgccagagcttcacatggttacgctgagaagaccggcgcggtggtcc

SEQ ID NO: 209875 - DNA, 2046 bp, Zea Mays
atgggatcgtcccctccgccgttgcggcgagcaggcagcgagcgccgcagcccgcagcccgcagccaaacgccgccaggccggggaaggggaacggtggaagagaagtggagcaccagcgaaccgcatatgctcggggttcttcgtcgcgcagccctcgccgcagcgtcatcgccggcggcggacctccgacagtttcagtgtgcttaccatagaagcagtgagagattatcacctatccgagagaagaccaagaagtttcatatggtcttaattgggctattgctggaaaaggtgtcattgtgaaagataaggtcctccataacttggaaacatctgagcttcagaaaggtggcgctacttaccctgactttttgtctggtataccacttcatgttagaggagatgttattggtggtgtccctggtgtttctaaagctcaatttgcaaagcttctaaaactggtgacgttccatctttcatccatctcgtgtctatatgttcaagatggcgccattggttcctcagcagaatgtgatgcaaaggttcgggtcattagtgataatccctctgctgttatgttactgtcgaatgtcctttggaaaataccagatcgtgcgatttcccatgacacatcccctttgactatatatgctaccagttcaataagtaacaacgttaagactgttcttggttctggaacacaatatgctaatggatttgctgtggcggatattgaacgatcatctctaatcctatgcggtaaagcatttgctgattcagctatcgtgaaagatgcacttactgctatgacagccccaatattgtctgcaagaggaggcctccctgttccaggatggattctgaactttggtggttctactgtattattgtttgccccagtggaaatcatgatgtcctgcgtagaaatccacaatgctctattgtccattgactgtggtgcagtcatatcttccaaggggtctactgtgcttttcccaacaaaggcaagcagggagcagaaactgcttaccaaaccaactgcagtaattatcgtatcatctgatagctctggcgccataccatctgtatgtaagctctctcctggccaggctgcctaccatttcttggctggatatcacgatggaaaatttgtcccagcatacaacagagccccctctcctgctgacccacttgcacttgcaagttctttattctcacatttgaaagaagatgatacaccatcgtatctgatcaacgctaagcactctggaaagtacattgacggcaatgggtttatgaaattattaaagctggcactatctcacgatcttcctgacatcaaaactgaaggctctagagttggggaactcaaggggaagtacaggagctttctatccagcaagtttggccaatgtttacccgaggaattctctttttaggagatacaccctgaggttgcaatgaacatgtatatttactggcataggtttacattttggtttgaaaaggtgtcagtattcccattctgtctcagtttcaatgtaatactctattaccttacattgcatctttccgcctcctggtgtttggatatactgacgtaacgacaatgtagctagtacctacatgcatgaattgtcttgtgcactccgcttcagtcaaattttgttaagcagcagaaaattggaaactctcagtatacatgtcacgtgcgactttgtgagctgcactgtgcactgcagagatcggactgtactattctgtaggatcgcttcgctccagattcccagtaacaaccaaatggtccaaagctgctcttcatcattctgcagtgtccccggcttcactttaccggacactgttgcctcttcacaattactactcctggggctggggcaaccagagtgcagaatgcagtgaactgtgaagcattggaggacacggtcaaccgtcgacattgagaaattgaaccttaccctttcgttttacgcgggagctgccagagcttcacatggttacgctgagaagaccggcgcggtggtcc

SEQ ID NO: 209876 - DNA, 2568 bp, Zea Mays
cgcagccgcactgttgggctacccgagttgaattaggaatgggatcgtcccctccgccgttgcggcgagcaggcagcgagcgccgcagcccgcagcccgcagccaaacgccgccaggccggggaaggggaacggtggaagagaagtggagcaccagcgaaccgcatatgctcggggttcttcgtcgcgcagccctcgccgcagcgtcatcgccggcggcggacctccgacagtttcagtgtgcttaccatagaagcagtgagagattatcacctatccgagagaagaccaagaagtttcatatggtcttaattgggctattgctggaaaaggtgtcattgtgaaagataaggtcctccataacttggaaacatctgagcttcagaaaggtggcgctacttaccctgactttttgtctggtataccacttcatgttagaggagatgttattggtggtgtccctggtgtttctaaagctcaatttgcaaagcttctaaaactggtaggttctaaattttggcttcaccactcaggccctgttcgttttttgtcaaacaatggggattgagggggaacaaatcccctataagtcaaaatcctcctcaatcccttccaatccccccccccccaaatccccatgattttgggatgaaacgaacatggcctcaatgggatgatgatattcaatgatgattgtcatgaatggagctgaaatactgttagtccctttttttagcatctgattttttttctcatttttaatttagttgtgacatctccctatttgttgaagggcagtcctggtgcaacaatgagagctgtctcactgagtcatcaggtcacgggttcgaagtagtctctccgtatttgcgggggaaggcttgcttcggtttatccctatcctagacgtcacatatgggagcctccaacagtggatctacctttttttatctccctgtttgttgacagactacttgcttgcataggtgacgttccatctttcatccatctcgtgtctatatgttcaagatggcgccattggttcctcagcagaatgtgatgcaaaggttcgggtcattagtgataatccctctgctgttatgttactgtcgaatgtcctttggaaaataccagatcgtgcgatttcccatgacacatcccctttgactatatatgctaccagttcaataagtaacaacgttaagactgttcttggttctggaacacaatatgctaatggatttgctgtggcggatattgaacgatcatctctaatcctatgcggtaaagcatttgctgattcagctatcgtgaaagatgcacttactgctatgacagccccaatattgtctgcaagaggaggcctccctgttccaggatggattctgaactttggtggttctactgtattattgtttgccccagtggaaatcatgatgtcctgcgtagaaatccacaatgctctattgtccattgactgtggtgcagtcatatcttccaaggggtctactgtgcttttcccaacaaaggcaagcagggagcagaaactgcttaccaaaccaactgcagtaattatcgtatcatctgatagctctggcgccataccatctgtatgtaagctctctcctggccaggctgcctaccatttcttggctggatatcacgatggaaaatttgtcccagcatacaacagagccccctctcctgctgacccacttgcacttgcaagttctttattctcacatttgaaagaagatgatacaccatcgtatctgatcaacgctaagcactctggaaagtacattgacggcaatgggtttatgaaattattaaagctggcactatctcacgatcttcctgacatcaaaactgaaggctctagagttggggaactcaaggggaagtacaggagctttctatccagcaagtttggccaatgtttacccgaggaattctctttttaggagatacaccctgaggttgcaatgaacatgtatatttactggcataggtttacattttggtttgaaaaggtgtcagtattcccattctgtctcagtttcaatgtaatactctattaccttacattgcatctttccgcctcctggtgtttggatatactgacgtaacgacaatgtagctagtacctacatgcatgaattgtcttgtgcactccgcttcagtcaaattttgttaagcagcagaaaattggaaactctcagtatacatgtcacgtgcgactttgtgagctgcactgtgcactgcagagatcggactgtactattctgtaggatcgcttcgctccagattcccagtaacaaccaaatggtccaaagctgctcttcatcattctgcagtgtccccggcttcactttaccggacactgttgcctcttcacaattactactcctggggctggggcaaccagagtgcagaatgcagtgaactgtgaagcattggaggacacggtcaaccgtcgacattgagaaattgaaccttaccctttcgttttacgcgggagctgccagagcttcacatggttacgctgagaagaccggcgcggtggtcc

SEQ ID NO: 209877 - DNA, 2173 bp, Zea Mays
ctcatgcactccaagcgctaacaattgttgggccattggcaacgcgtccagtccagcaaatcgtcatgggccgatgaccctacatgggctaccccgcagccgcactgttgggctacccgagttgaattaggaatgggatcgtcccctccgccgttgcggcgagcaggcagcgagcgccgcagcccgcagcccgcagccaaacgccgccaggccggggaaggggaacggtggaagagaagtggagcaccagcgaaccgcatatgctcggggttcttcgtcgcgcagccctcgccgcagcgtcatcgccggcggcggacctccgacagtttcagtgtgcttaccatagaagcagtgagagattatcacctatccgagaccaagaagtttcatatggtcttaattgggctattgctggaaaaggtgtcattgtgaaagataaggtcctccataacttggaaacatctgagcttcagaaaggtggcgctacttaccctgactttttgtctggtataccacttcatgttagaggagatgttattggtggtgtccctggtgtttctaaagctcaatttgcaaagcttctaaaactggtgacgttccatctttcatccatctcgtgtctatatgttcaagatggcgccattggttcctcagcagaatgtgatgcaaaggttcgggtcattagtgataatccctctgctgttatgttactgtcgaatgtcctttggaaaataccagatcgtgcgatttcccatgacacatcccctttgactatatatgctaccagttcaataagtaacaacgttaagactgttcttggttctggaacacaatatgctaatggatttgctgtggcggatattgaacgatcatctctaatcctatgcggtaaagcatttgctgattcagctatcgtgaaagatgcacttactgctatgacagccccaatattgtctgcaagaggaggcctccctgttccaggatggattctgaactttggtggttctactgtattattgtttgccccagtggaaatcatgatgtcctgcgtagaaatccacaatgctctattgtccattgactgtggtgcagtcatatcttccaaggggtctactgtgcttttcccaacaaaggcaagcagggagcagaaactgcttaccaaaccaactgcagtaattatcgtatcatctgatagctctggcgccataccatctgtatgtaagctctctcctggccaggctgcctaccatttcttggctggatatcacgatggaaaatttgtcccagcatacaacagagccccctctcctgctgacccacttgcacttgcaagttctttattctcacatttgaaagaagatgatacaccatcgtatctgatcaacgctaagcactctggaaagtacattgacggcaatgggtttatgaaattattaaagctggcactatctcacgatcttcctgacatcaaaactgaaggctctagagttggggaactcaaggggaagtacaggagctttctatccagcaagtttggccaatgtttacccgaggaattctctttttaggagatacaccctgaggttgcaatgaacatgtatatttactggcataggtttacattttggtttgaaaaggtgtcagtattcccattctgtctcagtttcaatgtaatactctattaccttacattgcatctttccgcctcctggtgtttggatatactgacgtaacgacaatgtagctagtacctacatgcatgaattgtcttgtgcactccgcttcagtcaaattttgttaagcagcagaaaattggaaactctcagtatacatgtcacgtgcgactttgtgagctgcactgtgcactgcagagatcggactgtactattctgtaggatcgcttcgctccagattcccagtaacaaccaaatggtccaaagctgctcttcatcattctgcagtgtccccggcttcactttaccggacactgttgcctcttcacaattactactcctggggctggggcaaccagagtgcagaatgcagtgaactgtgaagcattggaggacacggtcaaccgtcgacattgagaaattgaaccttaccctttcgttttacgcgggagctgccagagcttcacatggttacgctgagaagaccggcgcggtggtcc

SEQ ID NO: 209878 - DNA, 940 bp, Zea Mays
agttgtctgcatcctcttaatggatggccatcttgagaactatactagcgactacaccctacaggtgttggtaggctactgcgccgtgtacatcttcatgcagaccttcatgatcccaggaacgatattcatgtcactgcttgctggtgctctgtttgggcagctccggggcgtggccctggtagtcttcgccgccactgctggcgcttcttcgtgctatttcctgtcgaagatgattgggaagccactggtgttcacgctgtggccagataaactcagcttcttccagagacagggtgaccccaacattgccaaataccttcatcaacttggcttcaccgatagtagatgtcccctaccacatattcttactgggaactctcattggccttatcccagcttcttatgtgactgtcagggctggaatcgctcttggagaattaacttcgctaagcgacctttacgacacccagtcgatagcgctgctattcctgatcggtgttgtttcagtcacaccagcattgttgggcaaggacgaggcacaagaaaaaccatcagaaatggctgtaggcgcgtcgtgatcaccaaagcaccgagcacctgtacatatcaacatgcagccatgcagtggcttcattagttcagatcgacgggcccgtgtggctggatgacaaaaacggttcgcatggctactacacagcttggataggccattcagcacattatgattatgaacgattgaatgaatctgggaagcagaatgcccgttccacaagctgctctgatgtgtaaacgagtagtgctgttcggataggcctggcatttagtctaatccctgtttatattgaccagattcattcaatccatattcagtggttcaaagataatgccctgtccagctgctgtgttcctcaatgtctttctccatttctaatttccc

SEQ ID NO: 209879 - DNA, 825 bp, Zea Mays
agttgtctgcatcctcttaatggatggccatcttgagaactatactagcgactacaccctacaggtgttgatgattgggaagccactggtgttcacgctgtggccagataaactcagcttcttccagagacaggttgctaaaagaagagagaagctcttgaattacatgcttttcctcagggtgaccccaacattgccaaataccttcatcaacttggcttcaccgatagtagatgtcccctaccacatattcttactgggaactctcattggccttatcccagcttcttatgtgactgtcagggctggaatcgctcttggagaattaacttcgctaagcgacctttacgacacccagtcgatagcgctgctattcctgatcggtgttgtttcagtcacaccagcattgttgggcaaggacgaggcacaagaaaaaccatcagaaatggctgtaggcgcgtcgtgatcaccaaagcaccgagcacctgtacatatcaacatgcagccatgcagtggcttcattagttcagatcgacgggcccgtgtggctggatgacaaaaacggttcgcatggctactacacagcttggataggccattcagcacattatgattatgaacgattgaatgaatctgggaagcagaatgcccgttccacaagctgctctgatgtgtaaacgagtagtgctgttcggataggcctggcatttagtctaatccctgtttatattgaccagattcattcaatccatattcagtggttcaaagataatgccctgtccagctgctgtgttcctcaatgtctttctccatttctaatttccc

SEQ ID NO: 209880 - DNA, 1015 bp, Zea Mays
agctcctcatttttttctttgtccggttggttggtgccggtggtgcacgaaagcttccgccttctctctgttttctcgtacgaaatttgatgccgatatgccctatgattatctgcacgcaagttgtctgcatcctcttaatggatggccatcttgagaactatactagcgactacaccctacaggtgttgctccggggcgtggccctggtagtcttcgccgccactgctggcgcttcttcgtgctatttcctgtcgaagatgattgggaagccactggtgttcacgctgtggccagataaactcagcttcttccagagacaggttgctaaaagaagagagaagctcttgaattacatgcttttcctcagggtgaccccaacattgccaaataccttcatcaacttggcttcaccgatagtagatgtcccctaccacatattcttactgggaactctcattggccttatcccagcttcttatgtgactgtcagggctggaatcgctcttggagaattaacttcgctaagcgacctttacgacacccagtcgatagcgctgctattcctgatcggtgttgtttcagtcacaccagcattgttgggcaaggacgaggcacaagaaaaaccatcagaaatggctgtaggcgcgtcgtgatcaccaaagcaccgagcacctgtacatatcaacatgcagccatgcagtggcttcattagttcagatcgacgggcccgtgtggctggatgacaaaaacggttcgcatggctactacacagcttggataggccattcagcacattatgattatgaacgattgaatgaatctgggaagcagaatgcccgttccacaagctgctctgatgtgtaaacgagtagtgctgttcggataggcctggcatttagtctaatccctgtttatattgaccagattcattcaatccatattcagtggttcaaagataatgccctgtccagctgctgtgttcctcaatgtctttctccatttctaatttccc

SEQ ID NO: 209881 - DNA, 1059 bp, Zea Mays
tcttggcctagaaaagcaaagtgagggacgagaaagggagggaagtgtgaaggtaggagagagagagagggagccaagggaagctctcttctttcttcctcctcctcgtcctctcgaattccgtctcttgtctctgtcctcctcgctcggcttccccggttcttgagaggggaaataggaggcggagccgaggagagggatggggagggacgagaggttcccagtgtgggaggccgcgctcggcgctggggtcgccgccgccttcgccgctgggctcgtcggggtttacctttccatgccggactccgactacagcttcctcaagctgccacgtaatctccaggaactccaaatcctcactggccatcttgagaactatactagcgactacaccctacaggtgttgctccggggcgtggccctggtagtcttcgccgccactgctggcgcttcttcgtgctatttcctgtcgaagatgattgggaagccactggtgttcacgctgtggccagataaactcagcttcttccagagacaggctggaatcgctcttggagaattaacttcgctaagcgacctttacgacacccagtcgatagcgctgctattcctgatcggtgttgtttcagtcacaccagcattgttgggcaaggacgaggcacaagaaaaaccatcagaaatggctgtaggcgcgtcgtgatcaccaaagcaccgagcacctgtacatatcaacatgcagccatgcagtggcttcattagttcagatcgacgggcccgtgtggctggatgacaaaaacggttcgcatggctactacacagcttggataggccattcagcacattatgattatgaacgattgaatgaatctgggaagcagaatgcccgttccacaagctgctctgatgtgtaaacgagtagtgctgttcggataggcctggcatttagtctaatccctgtttatattgaccagattcattcaatccatattcagtggttcaaagataatgccctgtccagctgctgtgttcctcaatgtctttctccatttctaatttccc

SEQ ID NO: 209882 - DNA, 2991 bp, Zea Mays
cggcgacaccctcaacgctttccctactctgtccagcagcctgagtgcctgacttaactttgcttaaaccctcttctccctccatctcccgcgccgccgccgcaaaaccctagctccgacgcccctccgccgttgccgcggccgccagaaccagccatggcttcgacgcatgtttataagaagaactaccgctgcgaccgctccctgcagcagttctacacgggcgggccctttgcggtcgggctcgcccccggcggcgatggcgagggcggcgccgaggctgaggccttcctcgcgtgcgcgtgcggtggagaggtacgcgtggtgtccgccgcggacgcctccgccataggggagcccgtcgacggagactcggaggccatcaccgcgctagcgctgtcccccgactcacggctcatattcgccgcgggccacagcaggcttattagggtctgggacctcgcgtcccgaacttgcatacgcagctggaagggacatgatggtcctatcatggccatggcatgccatgcttctggtggtttgcttgcaactgccggagcagacaagaaggtctgcgtatgggatgtggatggtggattttgcacccattttcttagaggtcatatgggcgttgtgacaaccattatgtttcacaaagatccaaagcgccttttgttgttttcaggaagtgaagatggcactgtgcgagtgtggaaccttgaaaccaaaaaatgtgttgctgttcttaaagagcatttttcagcagtcacttcattggcattgtctgatgatggacaaacattgctcagcgctgggagggataagattgttaccgcatgggatattcgtaagtacagctcaaagaagacaataccgacatatgaaatgatagaagctgtttccttcattggatcaggaagtgagctcttggcttgtttgggcatagaactggcaaatataaaggagaaatctgctggttattttcttacagttggtgaacgtggggtcgtgcgtgtctggtgcttggagagttgtgtttgcgtgttcgagcagcaaacatctgatgtaactgttaactcagagaacgaggaaaccaggaggggctttacatctgctgttatgttgccaaatgatcaaggattgctatgtgttactgctgatcagcagtttttgttctattgtcccaaaagaactgatgatggggactttgaactgtctctatatagacgactaataggttataatgatgagattcttgacttgaagtttatcggggaggaggaacaataccttgccgtggctaccaacttggagcaggtccgtgtttacgatgttgcgtcgatgtcatgttcttatgtactcgctggccacactgaaatagttgtttgcattgacacctgtgtctctgcttccgggaagacacttgtcgtaactgggagcaaggatcatactgtaaggttatgggatgccgaaagaaaaggctgtattggcattggcaaaggccatctgggagctgttggttctgttgccttctcaaagaaaacaaataacttttttgttagtggcagcagtgatcgaaccatcaaggtatggacctgggacgatgcacttggtgatgctgaggatgaagtccctcttaaagcaaaggctgttgtagctgcacatgataaagatattaattctctggcaatttcacctaatgatggccttgtttgcagtggttctgaggaccgaactgcttgcatatggaagctccctaacctagtgttatctgttgtccttaagggacacaaaagaggaatctgacatttgaaggtcatacatcaagtgttctgcgagcttctttcctttcacgtggaactcaagttatttcttgcggaagtgatggtctagtgaagctatggacaatcaagacaaatgaatgtattgctacttatgataagcatgatgggaaggtctgggcattggctgttggcatgaaaactgaaatggttgctactggtggaaccgatgctgtcctcaacctgtggcatgattccaccatggaagataagcaggaagattttcgtaagaaggaggaagaagttttaagaggccaggaattggaaaatgctgtgtcagattctgactacgcaaaggcaatacaacttgcatttgagcttagaagaccacacagacttctagatttattctcaaagcttgcaaggagagctgatgcagaggatccaatagaaaaggctcttcttggtcttccaacggatggccttcgcgtgcttcttgaatacgtccgtgaatggaatacgaagcccaagttctgtcatgttgcacagtttgtgctttttcggttattgaggagtttctctcccactgatatcctggagatcaagggcatcagtgagctccttgagggccttattccgtattcgcagaggcatttcagccgagtcgatagactagtccgaagcacgtttctgttggactatacgctgatgcgaatgtccgtggtagatccagatgtagatgcgggaacaatcaaagatgaaatgaacggttcgtctgtggagaacggtgaacttgcagagcctcggcctgcttcacctgtaccacagaagtcaagcaagaagagaaaatctggcaaatcaggtaaaaagggcaaggagaagaaggtgaaggttgcctcaagcggactactcagcaaggatgtttctgttgaaccctaaatatctagctgagaatctgttttttttatgcatgccgccaattttgtagctgctgttgcaacggacgttgcccaacacacgaatcccatatgatgtaaatgcatttttgctgatttattaggagggcgaagtgttatcaaaatctgccatgccaaatgttctggtaagcaaaagttgccaaaagttggatggaataatttttacatagatttggtaagccaagtatgaggtattggtaagttctggtctcaaaccaaatggctggcaaaag

SEQ ID NO: 209883 - DNA, 2045 bp, Zea Mays
ctcttttctaaacaactttgaagagtatgtttcaacacattgcctttggccggaacaactttgaattcagaaaaaaggaatcctgtgccggagtgagaccattcgaggatataaactttgaatatcagtttgactggtgcatcgagagattggtaatatgctggattcggagtgagaccattcgaagacaagccggcctggccaggaggagaatgcccttgtcatctgggaatgcataatagtagtccctccgattaaaatttagtaagttggatataaacattacgtgtattggcatgaactatctggaacgtgcaagctagaagattgctgctgctggagactggtggtagaaacgagcatccccagccacctagacacgctcctcctactcctagtcaggagaatgagaagacgaagcccaacagacacggacgaccccagaaaaaaccaagacatgatccaactagaaattcaaaaggggcacctgctcctaaagcctggccatcaccatctgcttctggatctcatcatccatcggcagcgcctccccgaccgcatagacactcctccagagagtacagcttggtcgctgcagggagtgcagtttttcttgtcatggctgcagcttgccagcttctgttatgtactgtcgagtcaagaaggtgggcaccgtcaggcggccatgggccacagggttaagcggccagctgcagcgagcattcgtaacaggtgtacctgcgttgaaacgatctgagctggaagcagcctgcgaggacttcagcaacatagttggctctacgcctagctgcatgcatgctgtacaagggtacattatcgagtggagttgaaatagcagttgtgttaacatccgccaaggaatggtcaaaacaatgtgaaacccactacaggaacaagtttatctcaagttagccacaagaatttcatgaatctactcggctattgctaggaagatcaaccttttaccagagcaatggttttcgaatacgcgctatgttagagaagccgatcaccgattggactgggcggcccggctgaggatatccatgggggtcgcttactgtctggagcacatgcaccagctgaaccacctgttgtgccaaggaaccttgactccagcactatatacctcactgatggcttcgctgcaaaggtctcggacactgccaccaccaagggatcggattccagctcaaccgctgatgacgagctctcctcggtttcaggcatagatgccatggttcatcagtatggcatgctattgctggagagactaaccggaaaagttgcctactccgaagaagacgacgacgacggggtttcactggagcacttggcgtctcgctacttggatgatggcagcatgccccttgcggagctgattgacccgagcctcggttggttccctcaagaagccgcgcacgcactgtgcgaggtcgcaaggtcttgggttgggtggacccagaccccaacaagagaccactgatggtacaggtggctgctaggatgaaggagatcgcaattcgcaaggtcttgcgtggacccagacctcaacaagagatcgaccacggatggtacaggtggctgctaggatgaaggagatcaccgcgctggggccgggcctgagggagcgactcccaaggtgtcgccgctctggtgggcagagctggagatcatgtcatctgactgaaactagcttatgcatgcacttatccattctcaatctcctcccgctgtcactggcaattctttggtttgttgtgttgtggttgcggagcctgaagcaaagttccatcattccttggtatttgaggtgtcattttctttctttcttgatagcattgcgtacgtgtgtatatattataatcatcagcagcagcgttgtttcagcagactgactgtaaaagtgagaaggcagcaaaaagggaatacttatgatcgtgctcaatgccggcgttggaacggcttgatttggtcacagtagtttttttaatgataacatatttggtgttaatgagagtttg

SEQ ID NO: 209884 - DNA, 1920 bp, Zea Mays
cgggaaacgtcaaaaaagtcactcgcgactcgcgagttggaactctggcgtccgccatcggcccatcgccactcgtcgtcttcctcgctcgcacacccgtcccatccagtttttaaatggcgacggcgatgatgactatgcgacgcgcggcggcgctcggcgcccgacacatcccgcccgccgccgccttctcccgccacatgagtgcggacgcgagcgccgcgatggagaagatccgcgccgcgggtctgctcaaaatccagcaactggtgaggtccttgcaaacgtgtcctttatgggcagcagagaaacatctgatgctattgcttctgctcacagtacattctattcttggagtaaactcactgcaagtgagagaggcaaggcactaagaaaatggtacgatctaattatttcacacaaggaagagcttgcacttctcatgacactggagcaggggaaacctatgaaagaagcccttggtgaggtcaattatggtgcaagtttcatagaatattttgcagaggaagcaaagcgcatatatggtgatataattcctccaactttatctgatcgtagattgttggttctgaagcagcctgttggggtagttggagctattacaccatggaattttccattagcaatgataacccgaaaggttggaccagctttggcctgtggctgcactgttgttgtcaagccatcagagttcacacctctgacatcattagctgcagcagatcttgctcttcaagctggaataccagcgggtgcactaaatgttgtgatgggcaatgctcctgagataggtgatgcattactgcagagtacacaggtcagaaagattacgttcactggatcaacagctgttggcaaaaaactgatggctgaatctgcaaatactgtgaaaaaggtctctttggaacttggtgggaatgcaccttgcattgtttttgatgatgcagacattgatgttgctgttaaaggcagtcttgctgccaagttccgtaacagtggacagacatgtgtttgtgcaaacaggatattggtgcaagaaggtatctacgagaagtttgcatctgcattcatcaaggctgttcagagtttgaaggttgggaatgggctagaagagagtacatctcagggtcctctgattaacgaagctgctgttcaaaaggtggagaagttcataaatgacgcgacttcaaagggagcaaatgtcatgctaggtggtaaaagacacagcctggggatgtcattttatgagccaactgtagtagggaatgtcagcaatgatatgcttcttttcagagaagaagtttttggtccagttgcaccccttataccattcaaaactgaggaagaagcagtccatatggccaacgatacaaacgcaggtggcaccatttggcggagtaaagcagtctggtcttgggagagaaggatcgaagtacggcgtcgacgaatacttggagctcaagtacatctgcatgggcaacttgggttgagtcatgaaatcggcctcaggctagaaacgcatggaagagatgatgaaccgagagaccaagaaggcaggcgtctagctacaagaccggaggaacatggctgaaaggggccggccactggttgtgggggagcagttttcgaataaagcgaataagccgcggaacatgaacaaaagaagccgaaatgagttgtaaatgacgtgaactataaagtatggcttcgcctccggacttttgtatacgtaatcatggcactacttgtctatagtgtctccaaagacgtccatgttacagaataaaagcgtatagggtggatgctacgttacaggctgtcggtggtatgtacacctcgcctgattcctgacgaaataaagctggatactgcattcttgcggctcttgcctgcaggggt

SEQ ID NO: 209885 - DNA, 2042 bp, Zea Mays
cgggaaacgtcaaaaaagtcactcgcgactcgcgagttggaactctggcgtccgccatcggcccatcgccactcgtcgtcttcctcgctcgcacacccgtcccatccagtttttaaatggcgacggcgatgatgactatgcgacgcgcggcggcgctcggcgcccgacacatcccgcccgccgccgccttctcccgccacatgagtgcggacgcgagcgccgcgatggagaagatccgcgccgcgggtctgctcaagacgcaggggctcatcgccggacagtgggtcgacgcatacgatggcaagaccatcgaggtgcaaaatccagcaactggtgaggtccttgcaaacgtgtcctttatgggcagcagagaaacatctgatgctattgcttctgctcacagtacattctattgtacgatctaattatttcacacaaggaagagcttgcacttctcatgacactggagcaggggaaacctatgaaagaagcccttggtgaggtcaattatggtgcaagtttcatagaatattttgcagaggaagcaaagcgcatatatggtgatataattcctccaactttatctgatcgtagattgttggttctgaagcagcctgttggggtagttggagctattacaccatggaattttccattagcaatgataacccgaaaggttggaccagctttggcctgtggctgcactgttgttgtcaagccatcagagttcacacctctgacatcattagctgcagcagatcttgctcttcaagctggaataccagcgggtgcactaaatgttgtgatgggcaatgctcctgagataggtgatgcattactgcagagtacacaggtcagaaagattacgttcactggatcaacagctgttggcaaaaaactgatggctgaatctgcaaatactgtgaaaaaggtctctttggaacttggtgggaatgcaccttgcattgtttttgatgatgcagacattgatgttgctgttaaaggcagtcttgctgccaagttccgtaacagtggacagacatgtgtttgtgcaaacaggatattggtgcaagaaggtatctacgagaagtttgcatctgcattcatcaaggctgttcagagtttgaaggttgggaatgggctagaagagagtacatctcagggtcctctgattaacgaagctgctgttcaaaaggtggagaagttcataaatgacgcgacttcaaagggagcaaatgtcatgctaggtggtaaaagacacagcctggggatgtcattttatgagccaactgtagtagggaatgtcagcaatgatatgcttcttttcagagaagaagtttttggtccagttgcaccccttataccattcaaaactgaggaagaagcagtccatatggccaacgatacaaacgcaggcttagctgcatacatatttaccaagagcatacctcgttcatggcgtgtatccgaatctcttgaatacggcttagttggggtaaacgaggggattatttcaacagaggtggcaccatttggcggagtaaagcagtctggtcttgggagagaaggatcgaagtacggcgtcgacgaatacttggagctcaagtacatctgcatgggcaacttgggttgagtcatgaaatcggcctcaggctagaaacgcatggaagagatgatgaaccgagagaccaagaaggcaggcgtctagctacaagaccggaggaacatggctgaaaggggccggccactggttgtgggggagcagttttcgaataaagcgaataagccgcggaacatgaacaaaagaagccgaaatgagttgtaaatgacgtgaactataaagtatggcttcgcctccggacttttgtatacgtaatcatggcactacttgtctatagtgtctccaaagacgtccatgttacagaataaaagcgtatagggtggatgctacgttacaggctgtcggtggtatgtacacctcgcctgattcctgacgaaataaagctggatactgcattcttgcggctcttgcctgcaggggt

SEQ ID NO: 209886 - DNA, 658 bp, Zea Mays
ctgttcctattgtttttagaggaccaaatggagctgctgctggagttggtgctcaacactcacagtgttatgcagtttggtttgcacatgttccaggacttaaggttctcacaccatactcttcagaagatgcccgaggcttgcttaaagctgctattagggatcctgatcctgttattttcttggaaaatgaattgctttatggagaatctttcccagtttctgctgaagtgcttgattctagtttttgcctaccgattggcaaagctaagatagaacgtgggggtaaagatgttaccattactgcgttctccaagatggttggctatgctctccaggctgcagagatactgtccaaggaaggaatcagtgctgaggtgatcaaccttcgatcgatcagaccacttgatagagctgctattaatgcatctgttaggaaaaccaaccgattggtgactgttgaagaagggttccctcaacatgggattggtgccgagatatgcatgtctgttgtagaagaaagctttgagtaccttgatgccccagttgagaggatcgctggagctgatgtacctatgccctatgctgccaaccttgagagaatggctgttccacagtattccgaggatggagcgaggaagcatatatttgtggcgac

SEQ ID NO: 209887 - DNA, 730 bp, Zea Mays
ctgttcctattgtttttagaggaccaaatggagctgctgctggagttggtgctcaacactcacagtgttatgcagtttggtttgcacatgttccaggacttaaggttctcacaccatactcttcagaagatgcccgaggcttgcttaaagctgctattagggatcctgatcctgttattttcttggaaaatgaattgctttatggagaatctttcccagtttctgctgaagtgcttgattctagtttttgcctaccgattggcaaagctaagatagaacgtgggggtaaagatgttaccattactgcgttctccaagatggttggctatgctctccaggctgcagagatactgtccaaggaaggaatcagtgctgaggtgatcaaccttcgatcgatcagaccacttgatagagctgctattaatgcatctgttaggaaaaccaaccgattggtgactgttgaagaagggttccctcaacatgggattggtgccgagatatgcatgtctgttgtagaagaaagctttgagtaccttgatgccccagttgagaggatcgctggagctgatgtacctatgccctatgctgccaaccttgagagaatggctgttccacaggtcgatgacattgtgcgggcagcaaagcgggcctgctacagggcagtaccaatggccgcagctgcctgattgtattccgaggatggagcgaggaagcatatatttgtggcgac

SEQ ID NO: 209888 - DNA, 355 bp, Zea Mays
ctgttcctattgtttttagaggaccaaatggagctgctgctggagttggtgctcaacactcacagtgttatgcagtttggtttgcacatgttccaggacttaaggttctcacaccatactcttcagaagatgcccgaggcttgcttaaagctgctattagggatcctgatcctgttattttcttggaaaatgaattgctttatggagaatctttcccagtttctgctgaagtgcttgattctagtttttgcctaccgattggcaaagctaagatagaacgtgggggtaaagatgttaccattactgcgttctccaagatggttggctatgctctccagtgggctgttattttggt

SEQ ID NO: 209889 - DNA, 370 bp, Zea Mays
ctgttcctattgtttttagaggaccaaatggagctgctgctggagttggtgctcaacactcacagtgttatgcagtttggtttgcacatgttccaggacttaaggttctcacaccatactcttcagaagatgcccgaggcttgcttaaagctgctattagggatcctgatcctgttattttcttggaaaatgaattgctttatggagaatctttcccagtttctgctgaagtgcttgattctagtttttgcctaccgattggcaaagctaagatagaacgtgggggtaaagatgttaccattactgcgttctccaagatggttggctatgctctccagggatttggatgtactgcatcaatgcacttttg

SEQ ID NO: 209890 - DNA, 2094 bp, Zea Mays
ccgaaaggccaagccggctccccgtcccatcgctcgcttccccctcccgcgaatcattcgattcggcccgcctcgtctcgcccgcccgattcgatttggccgtcagggtgatcggagccggcgctagggttagggttccggcgatccccatacctatggtgcagctgccgagctcggggaagcggcacgcggagccggccatggctccggcgcggcgcgcggcgacggtcaagctagaggtggaggagctcggggccgacgagcgctgcccgctcagcaagcgcgccaaggcagctctgccgatgcccccgacgcctccgcagccgcagcaggatatgtaccacaatgtactcgatgaacctagcccattgggtctgcggctgaaaaaaagtccatcactcttggatttgattcagatgagactttctcaagcatccaatgctggcgagtcatccatggacaacagcggttctgagccttccaagaagaaagacaataaatctggtgcttctgcagcaggcgaacgactaaaagcttcgaattttcctgcaagtatattgaagattggttcatgggagtatgtgtcacggtacgaaggtgatttggtggcaaagtgttactttgcaaagcataaacttgtgtgggaagttctggaaggtggccttaagagtaagatagagattcaatggtcagatattactgctttgaaggcaacttgccccgaaaatggccaaggaaccttggacgtggcgatccgcagccaagaaaacacacactgtggcaggctacctcagatttcactggtggtcaagcgagtgtgcacaggcggcattttctgcagtgcccttcaaccttgttgagcaagaattttgagaagcttattcagtgtgatcagcggctatatcaattgagtcaacaaccggaaatcacattagactctgcgttgtttgaacctaggagctcaatatttgaggatccggttgaatcaaaatgtgctgggtttactaatttgaaagatgaacatgaggctctacctggctattcaggcccggtgtcaccatgtgctggttcctccatatctgctaagaatgaaaacaatgattccattggaatgacagctgaatatctttctcagacagtaggaacaggagttggtgctgtaggtgtacaagctgttggcagaaatgtgaatggtgcagcaccagaattcactattccccactggtggagtcaattgaaggtgcctgggcttagaccatcgatgtctgtggatgattttgtgaaccacctaggcaactgcatctcagagcagatcacttcaggcaatccggcgttggccaacaacgaggtgccgaccaaagaaacacttgaggggattgctcagtaccttcttggtgacacacaaggcccaccggtttctgcttcagacgagagatcactgatggccagggtggactccctctgctgtttgattcagaaagacacagtgccggttaccaaaccaaaacctgagccaaatgacagcgacagcatcggtgttgaagcctcggatggttccgacgaagaattcagctctgcaccaactgggaaacctacagatgccaccaatctaccagccatgtcaagaaaggattcgtttggggagctgctgactaacctcccccgcattgcctcgctaccacagttcctcttcaagataccagagggtacagagaactgaagctggaagtcaagacctcgcgcccttatgctgtaaagattgtacccaagcaataagaaatccggtaggttgtattctggtgcaccagttccccgccctgtaaatgtgacactcggtaggttgccccagctgtgtgtttcgcgactgaaatgggtagtggaaaaattgagatgttcgttggttcttttaactcaatcgtgtcccacgcaaaacttctgagcttaattttcaggcggcacctccactggtaccctgtatgttcctgattgacgtgtatataaaggttgtttcgatctgtcatgaacgtaaggttttcagattgacatgttccagattgacgtgaatgtaatgttttcatctgtcataactcataa

SEQ ID NO: 209891 - DNA, 2516 bp, Zea Mays
gaaaaaaaaaacagaggctgccttcctgtctgcctcattcacgtaataaaacgcacttctctacctcctccgtctccccccgtgtgtcaaatcgaacgcacatgcggcgcgactccctttcacggcctccccgcgtctcagcctacacgtccgagccgccagccgtgcgctttaagtgagcgcacccacgaaaagcagccaggcagcggagccggagagaagaagcagcagtagcagcagggccgtcaacaccatggcggtgggcgcgaccgccacgaagctcctcccgtcggcggccgcggccgcgcgccgcccatcgatgctccacctcgcggccgtcgccgtcctctgctcgctgtcctacctcctcggcatctggcaccacggcggcttctccgcggggcccgccgccggcgactcctcctcctcggtctctatcgccaccgccgtctcctgcgccacccccgccccgacgaccgcctcctcgtctccccccgcgggaccgctcgacttcgccgcgcaccacacggcggagggggtggaggcggagggcgcgctccgccatcgcaactacgaagcatgccccgccaagtactccgagtacacgccctgcgaggacgtggagcgttccttgcggttcccccgcgaccgcctcgtctaccgggagcgccactgccccgcggccggcgagcgcctccggtgcctcgtcccggcgcccaagggctaccgcaacccgttcccgtggccggccagccgcgacgtcgcctggttcgccaacgtgccgcacaaggagctcagcgtcgagaaggcggtgcagaattggatccgcgtcgacggcgacaagttccgcttccccgggggcggcaccatgttccctcgcggcgccggcgcctacatcgacgacatcggcaagcttatccccctccacgacggatccatccggaccgctcttgacaccggctgcggggtggcgagctggggagcctacttgctgtcacgcaacatccttgccatgtccttcgccccgcgagactcccacgaggcgcaggttcagtttgcactagagcgtggtgtgccggcgatgattggggtccttgcctccaatcaactcacttatccggcacgttcctttgacatggcgcattgctctcgttgcctcatcccatggcagctttacgacgggctgtacttgatagaggttgatcgtatcctgcgtcctggaggttattggattttgtctggaccaccaataaactggaagaaacactggaaggggtgggacaggactaaagaagacctggacgcagagcagaaagccatcgaggcagttgccaggagcctatgttggaagaagatcaaggaggagggcgacattgctatctggcagaaaccaactaaccacattcattgcaaggccatccacaaagttatcaagtcaccgcccttctgttctaacaaaaacccagatgctgcctggtacgacaagatggaggcttgcataactccactaccagaggtcagtgacttaaaggaggttgctggcggctcgttgaagaaatggccggagcggctcactgcagtgccgcccaggattgccagtggcagcatcgagggggtcacggaagagatgtttgtggaagatactgagttatggaagaagagagttgggcactacaagtccgtgattgctcaactcggccagaaaggccggtaccgcaacttactggatatgaatgcaaagtttggcggattcgctgcggcattggtgaatgaccccttgtgggtcatgaacatggtccctactgtggggaactcaacaacccttggggtaatatacgagcgtggcctcattgggagctaccaggactggtgtgagggcatgtccacttatccccggacctacgacctcattcatgcagatacagtgttcacactgtacaatggcagatgtgaggcggagaacattctgctcgaaatggacagaattctgaggccagagggcacggtcatcatcagagatgacgtggacctcttagtgaagataaagagcatggcggacgggatgagatggaatagccagatcgtggatcacgaagatggtccgctcgtccgtgagaagctcctccttgttgtgaagacatactggactctcgatggcagcgaacaatagcaataacgtcaaataaaagagttggaatgattatatggcatgatcggcagatgtgactgcctacccatttgccctgtgaatctggtggagtttgttttctgtttttttggggggtattcattttaggagatagttaacataatggagagataatctccttgttaagatatcaaagagcagcccagcacagattttgacataaaaacaacaaattgtgcgaagtgggtaaatagaaagtacagtactgggatcagttctgtctccgggtgcacattgttttgttgtacttatgatgttctgtgatcccttttatatgaatgtcataaaaatctaaactaggacttgt

SEQ ID NO: 209892 - DNA, 666 bp, Zea Mays
tgagttccagcataccagatcaccaagcaaagctgcaaggatgttttcaggaacacaagacaagtgtgcgacttgtggtaaaactgcgtatcctcttgagaaggtaacagtcgaagagaagtcctaccataagtcatgcttcaaatgctcccacgggggctgcgcgattacaccttccaactatgcagccttggagggcatcctctactgcaaacaccatttctcccaacttttcaaggagaagggaagctacaaccacttgatcaagtgcgcgtccgtcaagcgcgctgctgaagcacagccagaacaaccggcctctgattcctcctcctgaccacgccatttaaacagtgggggtttggaggcgagagagttgggaagcctcctgtttctacttaaaaccgcgtgatgtatgttattccatctatgccccgaggatactagactactactctattttggtatcctctgctgtgctagctggatcatatcagcgaaccatggaattgctgtcattttcaatgaaactgttgtgcatcaagtagtgaaatcttcactgaaatcgggtatcttgcctttattgatcaatatattatctatgttgttttgttgtctttagtactatgcaatctggtttggtaaatggtcaaactaaaaggttctttt

SEQ ID NO: 209893 - DNA, 1448 bp, Zea Mays
ctcaatataacttgcgcaggcagagatcccaagcgtccgattttggatgcctgtggctgctgtcactcctaggagggtgcaaacccaacattcactacttattacatgagatgactacttactctagataggcagaataatgcatcatgatattaatggctggcaaactgtaattcagatgccagaaggagaaatagaagagttgccatatgcacttaagaaagtagaacctgtagaccggttggagatcagccaggagaacggtacagagttatccgaaaaggcttctttctataaaggagtattctacaactaccttagcattgggatggatgctcaggttgcatatggcttccatcatcttcgtgatgaaaagccatatcttgcacaaggaccagttgcaaataagttgatttatgctggatatagctgcactcaggggtggttttgtacaccttgcacagcgagtccacagctaagggggcttaagaacattttgcgactttccattaaaaaggccaattgttcagagtgggagcaagtgaaaatgccttcaagcgttagatccctagttgtgttaaatttatacaattatggcagtggaaggcatccatggggtgatctaagacctgagtatctcgaaaagaaaggctttgttgaagcccattcagatgatggcttgcttgaaatatttggtctgaaggaaggttggcatgcttcatttgtcatggccgagcttatcaaagcaaagcacattgcccaggctgcggctatcaagttcgaaatgaggggtggcgagtggaaccgagcatatgttcagatggacggagagccgtggaaacaaccgctgctacaggagcactcaaccatcgtggaaataaacaaagttccgtatcattctctcatgataaacggggagtaatgagatttttactccgtcaaccagatcgttaggatcgtgtacagttcaggagcagcgggcactagatccttagaactgggtcggacggactgcagcgaggatggcatgcatgttcgttggccttttgtcgtgctatggtcgaagccatggccggagcgtgatgtggcaccatgcattgttgtattcgtaccataatatgtgcgttgttgtatcctaagttctttttgaaggaaacatgattgatttgtttgtattgtaacgttgtgtcattgcaaaagaataacctggtgtaaaactgtaaaatgtgacagtctgccgtttgcacagccctgtagcattttttttttgttcttgttaactttttttttatgaaagcattaactgatttgacttgtcagagttttctattaggaatgccagggagcaatttccctctaccaacttgtacgtagaaactaggaagtactagtgtggtagtaatttatgaggccgttgatcctggcatctccaccgatacagagtgtgg

SEQ ID NO: 209894 - DNA, 1677 bp, Zea Mays
aatctatggaatctgataagcgtgtgcattacccttgacaggtctttgatctttccgttgtgaagccttcagattttgttcaccatggtttgagttgtttggagaggttagctgaccaaggcgataaccgtgcgaaggctgttcgtgagaaaatgaggattgtggttgctgggggtgatggtacagttggttgggtgcttggatgtctctcagatctttataagatgaaaagggaaccggttccacctacaggaatcattccacttggtacaggaaatgatcttgctagatcgtttggatggggtggctcttttccctttggttggcgctcagctgtaaagcgttatctcagcaaagcttccagatctcccatttgccgtcttgacagctggcaaactgtaattcagatgccagaaggagaaatagaagagttgccatatgcacttaagaaagtagaacctgtagaccggttggagatcagccaggagaacggtacagagttatccgaaaaggcttctttctataaaggagtattctacaactaccttagcattgggatggatgctcaggttgcatatggcttccatcatcttcgtgatgaaaagccatatcttgcacaaggaccagttgcaaataagttgatttatgctggatatagctgcactcaggggtggttttgtacaccttgcacagcgagtccacagctaagggggcttaagaacattttgcgactttccattaaaaaggccaattgttcagagtgggagcaagtgaaaatgccttcaagcgttagatccctagttgtgttaaatttatacaattatggcagtggaaggcatccatggggtgatctaagacctgagtatctcgaaaagaaaggctttgttgaagcccattcagatgatggcttgcttgaaatatttggtctgaaggaaggttggcatgcttcatttgtcatggccgagcttatcaaagcaaagcacattgcccaggctgcggctatcaagttcgaaatgaggggtggcgagtggaaccgagcatatgttcagatggacggagagccgtggaaacaaccgctgctacaggagcactcaaccatcgtggaaataaacaaagttccgtatcattctctcatgataaacggggagtaatgagatttttactccgtcaaccagatcgttaggatcgtgtacagttcaggagcagcgggcactagatccttagaactgggtcggacggactgcagcgaggatggcatgcatgttcgttggccttttgtcgtgctatggtcgaagccatggccggagcgtgatgtggcaccatgcattgttgtattcgtaccataatatgtgcgttgttgtatcctaagttctttttgaaggaaacatgattgatttgtttgtattgtaacgttgtgtcattgcaaaagaataacctggtgtaaaactgtaaaatgtgacagtctgccgtttgcacagccctgtagcattttttttttgttcttgttaactttttttttatgaaagcattaactgatttgacttgtcagagttttctattaggaatgccagggagcaatttccctctaccaacttgtacgtagaaactaggaagtactagtgtggtagtaatttatgaggccgttgatcctggcatctccaccgatacagagtgtgg

SEQ ID NO: 209895 - DNA, 251 bp, Zea Mays
cttagatcatgttattccacaattgatgtaataatgctggtacattgtgcagatggttttttctgctcttgctttgtctcaatgcgaggtgatttggtacttccaacatgtggggattgcatcatcaaaatctactcgattgaaaactgttgacattgatgcgatagacccaactattggtttcttactagatggaataggcaaactttgttgcctggttcgtaaatacatagcagcaataaaaggttatg

SEQ ID NO: 209896 - DNA, 978 bp, Zea Mays
cagccctgctcgctcccgcgcgcgggctaatacacaatatctggcgccgctcctcctcggcttcggctgcccctcgcgcactcgcttcccgtgggccgcgcgggtgaaggagcgtacgtgcgggtggttgatttgtggctagctggtgcgcgcgggatggcgtcgctcgccgtgtccggcgcgaggctcggggtggtcgtgcgggccggcggctcggcgggatcgggcggggagcgcaggagtggggtggccttgccgtcggtgctcttcaggaggaaggacgccttctctcgtgtcgttctgggctgtgatggtgctcctggaaaagagctgctgatggccggatgtggcagtgatcacttgctttcatccacagagcctgtcgtggatgctctgcagcggtctgaaggattacagcctgctgcagcctgtgcactggagcagcaggggcgagagtggaggcgagagctgacgtggcaggggcgaaagggaggctgtgcactggactcagccttacaagtttgagttaagattatgagattctaatgcaaaatttagaagttgcgtggctaataataagattcttaaaacgagatatgaaccaaccatgcccatgccatagatcacaggaggaaacctgggaggggggcaaacatttggtccttgtagctacatctaatttttgatctcatatctatttttggaatacgtaatacatctatttttttggaatacataaaatctcatatatatttgttcgtcgctagttatttacatagtgcgcgccatcgagaaaaggtatgtttcattcataacaggtctattttggtttgtttggatgaaactgagacccaaacatcgattgattctgtaagagatacttcctttgtcctacaatacaattcgttttagcacttaggttttatgtctatattcaaatagatgacgataaatttaaacacatatataaaacaaata

SEQ ID NO: 209897 - DNA, 939 bp, Zea Mays
ggaagattgtggtgtgatggcatggcagtgaggcccagccactggaaaattataaaccaaacctgttgagcaaagacactggaaagcacaggcgctggattgattcttcttcctgaccacaaataggacaggctgctggatgaggagtcctctcttggcaagctgatcagcagcagctgtgcaaagcaagccagataatatcttgcaaaggctgtgccagaggagcacaagaggtttctgcatgatttggtttggatacatgaagaggaaaatgtgccagttgatatggatggaggacaaatcatctgcaatctgattgctgtccatgctggcctagagaggaccatagatttgaatgagcaacttagagttttaagaactagagacacaagggtgccaaaggttcaaatgcttagtgggaggcaagatgtttgggacacacccaagggtctggccggcaagcagactattattgtaagtggccaccacgggaagctccacatcgacggcctccgatttataatcgacgaaggtggtggttatgaagacaaacctattgctgcgatagtttttccttcaaagacattgatcagaagtaccgaggaagcgggaaccacatcagagaggtgatctagagttctagacatcgtcaggagcagtgaacacggaggcacagttttttctctcttgaagttactgcttgtagtcatgtactcatgtcaaacgacaataggaataacgtccaaaggcaataagttggtgaaccggacctgcgttttctcaatttagtcactgatgactatatgtctatatatattgtaccttgatgctgtcaatttagacgagaccgtacatcctctttttttagggcaataaactttactccctgtcctcaaatatttgtacacaaagagtggtggtgagcaattacgatattac

SEQ ID NO: 209898 - DNA, 853 bp, Zea Mays
gcgcctgtgtaagcaggtagcgagggcaacgacgtaagcaagcaaagacgatggctagtgcagacaaggctaccgggtgtcagcgcaacggagctgtcaggtcatcgattgagatcttgcaaaggctgtgccagaggagcacaagaggtttctgcatgatttggtttggatacatgaagaggaaaatgtgccagttgatatggatggaggacaaatcatctgcaatctgattgctgtccatgctggcctagagaggaccatagatttgaatgagcaacttagagttttaagaactagagacacaagggtgccaaaggttcaaatgcttagtgggaggcaagatgtttgggacacacccaagggtctggccggcaagcagactattattgtaagtggccaccacgggaagctccacatcgacggcctccgatttataatcgacgaaggtggtggttatgaagacaaacctattgctgcgatagtttttccttcaaagacattgatcagaagtaccgaggaagcgggaaccacatcagagaggtgatctagagttctagacatcgtcaggagcagtgaacacggaggcacagttttttctctcttgaagttactgcttgtagtcatgtactcatgtcaaacgacaataggaataacgtccaaaggcaataagttggtgaaccggacctgcgttttctcaatttagtcactgatgactatatgtctatatatattgtaccttgatgctgtcaatttagacgagaccgtacatcctctttttttagggcaataaactttactccctgtcctcaaatatttgtacacaaagagtggtggtgagcaattacgatattac

SEQ ID NO: 209899 - DNA, 902 bp, Zea Mays
cttactgattatacactttgatccgaagcgaaagccggtgtcgttctgggctgtgatggtgctcctggaaaagagctgctgatggccggatgtggcagtgatcacttgctttcatccacagagcctgtcgtggatgctctgcagcggtctgaaggattacagatcttgcaaaggctgtgccagaggagcacaagaggtttctgcatgatttggtttggatacatgaagaggaaaatgtgccagttgatatggatggaggacaaatcatctgcaatctgattgctgtccatgctggcctagagaggaccatagatttgaatgagcaacttagagttttaagaactagagacacaagggtgccaaaggttcaaatgcttagtgggaggcaagatgtttgggacacacccaagggtctggccggcaagcagactattattgtaagtggccaccacgggaagctccacatcgacggcctccgatttataatcgacgaaggtggtggttatgaagacaaacctattgctgcgatagtttttccttcaaagacattgatcagaagtaccgaggaagcgggaaccacatcagagaggtgatctagagttctagacatcgtcaggagcagtgaacacggaggcacagttttttctctcttgaagttactgcttgtagtcatgtactcatgtcaaacgacaataggaataacgtccaaaggcaataagttggtgaaccggacctgcgttttctcaatttagtcactgatgactatatgtctatatatattgtaccttgatgctgtcaatttagacgagaccgtacatcctctttttttagggcaataaactttactccctgtcctcaaatatttgtacacaaagagtggtggtgagcaattacgatattac

SEQ ID NO: 209900 - DNA, 1995 bp, Zea Mays
gcttcttccacctccgccgcacacgttgctgccccccattccttccctcccagccagccctgctcgctcccgcgcgcgggctaatacacaatatctggcgccgctcctcctcggcttcggctgcccctcgcgcactcgcttcccgtgggccgcgcgggtgaaggagcgtacgtgcgggtggttgatttgtggctagctggtgcgcgcgggatggcgtcgctcgccgtgtccggcgcgaggctcggggtggtcgtgcgggccggcggctcggcgggatcgggcggggagcgcaggagtggggtggccttgccgtcggtgctcttcaggaggaaggacgccttctctcgtgtcgttctgggctgtgatggtgctcctggaaaagagctgctgatggccggatgtggcagtgatcacttgctttcatccacagagcctgtcgtggatgctctgcagcggtctgaaggattacagcagcgaaaatcgaagtcgtccggggtaacggagaccggaccagacccagcgcggcggcggcggcggacggaggtgtggcgtggcggtcgagcacggcgcaaggatggggagaggcgccgtccaaagtccaggcgagatggaagcggaagggccgaaggggtggggactggggactactctctgcatcgagttggacggcgtggatcaagccactctagaatcgaacgcctccggcgaacagccgtagcggaaacgccgcccgagatgtctgctccctccgccccaccccgcacggtgatctgtgtgggcgacgtccacggctacatcacgaagctggagagcctctggtccaacctccaggccgcactccccgccgacgccttcgccaccgcgctggtcatcttcctcggcgactacaacgaccgcggcccgcacacccgcagggtcctcgacttcctcctcgcgctcccgacgcgctaccccgcgcagcgccacgtcttcctctgcggcaaccacgacctcgccttcgcggcgttcgtcggggcgctgccgccgccgcccgacggctccccgttctcggccacctgggacgagtacatccacaacgaggagcacgaggggtggttccgcgggccgggattcgagggcatgcacgtgcaggggaggcggtggggcggggtcatcaaggagaggtggaaccccaagaagggcctcccgtacaagggctccatctacgacgcgcagcccaccttcgaatcctatggcgtcgcccatggttcctctgatcttgcaaaggctgtgccagaggagcacaagaggtttctgcatgatttggtttggatacatgaagaggaaaatgtgccagttgatatggatggaggacaaatcatctgcaatctgattgctgtccatgctggcctagagaggaccatagatttgaatgagcaacttagagttttaagaactagagacacaagggtgccaaaggttcaaatgcttagtgggaggcaagatgtttgggacacacccaagggtctggccggcaagcagactattattgtaagtggccaccacgggaagctccacatcgacggcctccgatttataatcgacgaaggtggtggttatgaagacaaacctattgctgcgatagtttttccttcaaagacattgatcagaagtaccgaggaagcgggaaccacatcagagaggtgatctagagttctagacatcgtcaggagcagtgaacacggaggcacagttttttctctcttgaagttactgcttgtagtcatgtactcatgtcaaacgacaataggaataacgtccaaaggcaataagttggtgaaccggacctgcgttttctcaatttagtcactgatgactatatgtctatatatattgtaccttgatgctgtcaatttagacgagaccgtacatcctctttttttagggcaataaactttactccctgtcctcaaatatttgtacacaaagagtggtggtgagcaattacgatattac

SEQ ID NO: 209901 - DNA, 3373 bp, Zea Mays
cttgctgagtacacttgagcgacactgtgtgagctgtggttgaatagttgagaaaaaaaaactcaaaaagaaaaggctacgcctctagctcgagtggggagagagagagtgagagacgagacggggaggcaaaggcaccacgagccactctagagacgcctcctccgtttgttcgagctgcctgggcgggaaagagaaagcgagaccgagaccgcagggattgaaaaaagagggtgcaaaagcaaggctcggattcttgcggggcgagcgactcgtttctcgtctctgcgctgcgagcgaggctcctgctcctcgcggtctcgcttccctccaagttccaatccagcaccgggcgccaccgctaatcagtgctgatatatgaaccccgcatttggacatttggtggtggcaaggcaacgccaaccttccctgttgctgctttgaatgttctggtggttgtcggatggatcgccgcagttggctctggaagcgcaagtcattggataagagccctggggagagcgatagctctggctctgcttcatcacactctgagccttccttcgatgatcaggaatgatgatgttccagattctgtaaagaatttgaatgagaaggtgtccccaaagtttaaggtcgatgatgtccaggattctgtaaagagtttgaatgagaaactttctgctgcccttttgactatcaatgataaagatgacttggtaaagcagcacactagagttgcagaagaggctgttgcaggttgggaacaagctgaagctgaagttgcttctctgaagcaactacttgaaactgcatcaaagaagaatacctctctggaggatcaggtcagccacctagatgacgcccttaaagaatgtgtaaggcagcttcgccaagcacgtgaagaacaagagaataaaatccatgagacagttgctaagaagtctaaagaattggagtctgagaagtttgagctccagcaccatattgctgaactcagtaagcagttgcaagccacgaaactagaagctactacggtgcgtgtccagcgtgatctgcaggaaaagcttcagatagtggagaaagaaaacaaagacctcaaggtagaattactcgcactgtccaaggacctgaagatacttgcacgggaaagagacctgagcaaccaagcagcagaaacagcaagcaaacttcacctggaaagtgtgaaaaagataacaagagttgaggcagaatgccttaagttgcgtcatttaacgcggcgtacgtccttgaccaatgattcaaggctgataactaacagtgcttgcatggaatctcagactgacagtcagtctgacagtggggagcacatgctagttgatgagatgaaaaattctgattcatgggcaacagctctgatagctgaacttgatcagttcaagaatgccaacaacgacacaagaaatcttgtgaataattcggttgaaattgacctgatggatgatttcctcgagatggaaaagctggctgcactgcctgaagtagactgtgtaagctctagctttggagctgaaactgattctgaccaaggtgtgagtagagataaatcatcaaaagttaaaactgaaccattgcagtgtcaggtgacagatttgcacgcaaagatcgagaagattgaaggtgagaaaagggagcttgaaatggcccttgcagatgccagagttcagcttggcacatcatgtgatgctctaatggtggccaacaacaggttgattgatttgcagatgcagttggacttggcaaatgagtccaaacatgctgctttcggagaagctgagcgactgaatggtgagaggaaagatttggcattgcaactggagtccaggtcttcacaagttgatgagcttcagctgatggtggcatcgctggaaaagaatgtagacaggaaggtgttggaattgcagttagagttagtttctgtggaggctgcagatctgcgcaagacagtggcttccctggaagagaagattgatgcagagataactctctctatgcagcacaaaacaaatgcagacctggcagaggcgtccaaagaatcattagaggcgcagctgcagtctgcaaacacagagatagggaaactgaacgggattgtgcaaactttagagaatgaggtgaggaaagagacagattctcgtgaagaactactgaaacagatagaggctatgaaaattgagtcagagagatcactatctgtggtgtctaccaaagagtcattagaggtgcagctccaggtggcgaattcagaagttgcaaagttgcgtgggatggtgaatgctctggagtgtgatgcggcgaacgagaaggcatattcttcagatctccagatgcaacttgaggcagtggaaggtatcaggaaggtgttggaatctgagcttgagtcttcacaccaggaggtgatgaggctgaaggagaaagtttcgtccttggaagcaaggatcaaggaccagacctcgttgcttgtagaatatacagctaaatcagaggatgcagtgtcccggaaaaaggcaatggagggtcaactagaagcagcaaatctggaagttacaaaactgagaaacaaggtgagcctgatacaaggcaaggtggagcaggagaagcttctgtcagaagagtacgaagcaaaatgccgcaagctggaggcgcaggtgttgagggacagccgagaggcgaaactttggcgcctcacgaactcaaacggagacctgaaggtgaagcaggagaaagaactagtcagtgctgccgggaagcttgcggagtgccagaagactattgctaaccttggccgccagctgaaatcgctaacagatcttgatggcgtggtggccgatcctgaaaagctggaatcgagggacacgcacctggacttcagagatggcggagacgtggctgatggactgtatgaactgggtcttcctaagaggaacggtagctgcctctcaccccttcggtcggatccgtcgccgaggggtttgccgtcccttagtagctacctgagcaaaacaaaaaggtgaaaagtctgatgggatcattcaccattgtgcttgtgcataaattatttgacagtctatggatgatgccagttgtgacctggtggtagatcggtgtacatttacagaacttgatggttgctcacatgtgtactttctccttttgttttgctctcattttgcgagactgcagggtttgtgacaaatttactagatcttgtgagactgtagtgcgttattctcgcgttggaattcaactcgtctacaacaaaaatagaagaaaaaaaacaaattcaaccggtcggcaaagtagaagtagggcagaccaaaccaacgttcag

SEQ ID NO: 209902 - DNA, 3198 bp, Zea Mays
cacgcctacaccagcatcgcttgctgagtacacttgagcgacactgtgtgagctgtggttgaatagttgagaaaaaaaaactcaaaaagaaaaggctacgcctctagctcgagtggggagagagagagtgagagacgagacggggaggcaaaggcaccacgagccactctagagacgcctcctccgtttgttcgagctgcctgggcgggaaagagaaagcgagaccgagaccgcagggattgaaaaaagagggtgcaaaagcaaggctcggattcttgcggggcgagcgactcgtttctcgtctctgcgctgcgagcgaggctcctgctcctcgcggtctcgcttccctccaagttccaatccagcaccgggcgccaccgctaatcagtgctgatatatgaaccccgcatttggacatttggtggtggcaaggcaacgccaaccttccctgttgctgctttgaatgttctggtggttgtcggatggatcgccgcagttggctctggaagcgcaagtcattggataagagccctggggagagcgatagctctggctctgcttcatcacactctgagccttccttcgatgatcaggttgggaacaagctgaagctgaagttgcttctctgaagcaactacttgaaactgcatcaaagaagaatacctctctggaggatcaggtcagccacctagatgacgcccttaaagaatgtgtaaggcagcttcgccaagcacgtgaagaacaagagaataaaatccatgagacagttgctaagaagtctaaagaattggagtctgagaagtttgagctccagcaccatattgctgaactcagtaagcagttgcaagccacgaaactagaagctactacggtgcgtgtccagcgtgatctgcaggaaaagcttcagatagtggagaaagaaaacaaagacctcaaggtagaattactcgcactgtccaaggacctgaagatacttgcacgggaaagagacctgagcaaccaagcagcagaaacagcaagcaaacttcacctggaaagtgtgaaaaagataacaagagttgaggcagaatgccttaagttgcgtcatttaacgcggcgtacgtccttgaccaatgattcaaggctgataactaacagtgcttgcatggaatctcagactgacagtcagtctgacagtggggagcacatgctagttgatgagatgaaaaattctgattcatgggcaacagctctgatagctgaacttgatcagttcaagaatgccaacaacgacacaagaaatcttgtgaataattcggttgaaattgacctgatggatgatttcctcgagatggaaaagctggctgcactgcctgaagtagactgtgtaagctctagctttggagctgaaactgattctgaccaaggtgtgagtagagataaatcatcaaaagttaaaactgaaccattgcagtgtcaggtgacagatttgcacgcaaagatcgagaagattgaaggtgagaaaagggagcttgaaatggcccttgcagatgccagagttcagcttggcacatcatgtgatgctctaatggtggccaacaacaggttgattgatttgcagatgcagttggacttggcaaatgagtccaaacatgctgctttcggagaagctgagcgactgaatggtgagaggaaagatttggcattgcaactggagtccaggtcttcacaagttgatgagcttcagctgatggtggcatcgctggaaaagaatgtagacaggaaggtgttggaattgcagttagagttagtttctgtggaggctgcagatctgcgcaagacagtggcttccctggaagagaagattgatgcagagataactctctctatgcagcacaaaacaaatgcagacctggcagaggcgtccaaagaatcattagaggcgcagctgcagtctgcaaacacagagatagggaaactgaacgggattgtgcaaactttagagaatgaggtgaggaaagagacagattctcgtgaagaactactgaaacagatagaggctatgaaaattgagtcagagagatcactatctgtggtgtctaccaaagagtcattagaggtgcagctccaggtggcgaattcagaagttgcaaagttgcgtgggatggtgaatgctctggagtgtgatgcggcgaacgagaaggcatattcttcagatctccagatgcaacttgaggcagtggaaggtatcaggaaggtgttggaatctgagcttgagtcttcacaccaggaggtgatgaggctgaaggagaaagtttcgtccttggaagcaaggatcaaggaccagacctcgttgcttgtagaatatacagctaaatcagaggatgcagtgtcccggaaaaaggcaatggagggtcaactagaagcagcaaatctggaagttacaaaactgagaaacaaggtgagcctgatacaaggcaaggtggagcaggagaagcttctgtcagaagagtacgaagcaaaatgccgcaagctggaggcgcaggtgttgagggacagccgagaggcgaaactttggcgcctcacgaactcaaacggagacctgaaggagaaagaactagtcagtgctgccgggaagcttgcggagtgccagaagactattgctaaccttggccgccagctgaaatcgctaacagatcttgatggcgtggtggccgatcctgaaaagctggaatcgagggacacgcacctggacttcagagatggcggagacgtggctgatggactgtatgaactgggtcttcctaagaggaacggtagctgcctctcaccccttcggtcggatccgtcgccgaggggtttgccgtcccttagtagctacctgagcaaaacaaaaaggtgaaaagtctgatgggatcattcaccattgtgcttgtgcataaattatttgacagtctatggatgatgccagttgtgacctggtggtagatcggtgtacatttacagaacttgatggttgctcacatgtgtactttctccttttgttttgctctcattttgcgagactgcagggtttgtgacaaatttactagatcttgtgagactgtagtgcgttattctcgcgttggaattcaactcgtctacaacaaaaatagaagaaaaaaaacaaattcaaccggtcggcaaagtagaagtagggcagaccaaaccaacgttcag

SEQ ID NO: 209903 - DNA, 3732 bp, Zea Mays
ggaaaaatagagcaacttgaccccattcatccgtcgaacacactgcacctgttagtattatagcaacagtatttcagtaccagtgctcaatctaggcaaaagcccgcaagcgcacagttaacaacacgctacacgcctacaccagcatcgcttgctgagtacacttgagcgacactgtgtgagctgtggttgaatagttgagaaaaaaaaactcaaaaagaaaaggctacgcctctagctcgagtggggagagagagagtgagagacgagacggggaggcaaaggcaccacgagccactctagagacgcctcctccgtttgttcgagctgcctgggcgggaaagagaaagcgagaccgagaccgcagggattgaaaaaagagggtgcaaaagcaaggctcggattcttgcggggcgagcgactcgtttctcgtctctgcgctgcgagcgaggctcctgctcctcgcggtctcgcttccctccaagttccaatccagcaccgggcgccaccgctaatcagtgctgatatatgaaccccgcatttggacatttggtggtggcaaggcaacgccaaccttccctgttgctgctttgaatgttctggtggttgtcggatggatcgccgcagttggctctggaagcgcaagtcattggataagagccctggggagagcgatagctctggctctgcttcatcacactctgagccttccttcgatgatcaggaacctaaacctgtgtctagtaattcttctccaaatcatagtcattcgcctgatgtttcttctagaataatttataatgagaatcaagaagctgaaagagcagaatcattgaatgagaagctggtgttagcaactagctcgaatgattcttctccacaacatgatcaatcgatgaagccagatatataccaatcacctctgctattcccaaatatcaggaatgatgatgttccagattctgtaaagaatttgaatgagaaggtgtccccaaagtttaaggtcgatgatgtccaggattctgtaaagagtttgaatgagaaactttctgctgcccttttgactatcaatgataaagatgacttggtaaagcagcacactagagttgcagaagaggctgttgcaggttgggaacaagctgaagctgaagttgcttctctgaagcaactacttgaaactgcatcaaagaagaatacctctctggaggatcaggtcagccacctagatgacgcccttaaagaatgtgtaaggcagcttcgccaagcacgtgaagaacaagagaataaaatccatgagacagttgctaagaagtctaaagaattggagtctgagaagtttgagctccagcaccatattgctgaactcagtaagcagttgcaagccacgaaactagaagctactacggtgcgtgtccagcgtgatctgcaggaaaagcttcagatagtggagaaagaaaacaaagacctcaaggtagaattactcgcactgtccaaggacctgaagatacttgcacgggaaagagacctgagcaaccaagcagcagaaacagcaagcaaacttcacctggaaagtgtgaaaaagataacaagagttgaggcagaatgccttaagttgcgtcatttaacgcggcgtacgtccttgaccaatgattcaaggctgataactaacagtgcttgcatggaatctcagactgacagtcagtctgacagtggggagcacatgctagttgatgagatgaaaaattctgattcatgggcaacagctctgatagctgaacttgatcagttcaagaatgccaacaacgacacaagaaatcttgtgaataattcggttgaaattgacctgatggatgatttcctcgagatggaaaagctggctgcactgcctgaagtagactgtgtaagctctagctttggagctgaaactgattctgaccaaggtgtgagtagagataaatcatcaaaagttaaaactgaaccattgcagtgtcaggtgacagatttgcacgcaaagatcgagaagattgaaggtgagaaaagggagcttgaaatggcccttgcagatgccagagttcagcttggcacatcatgtgatgctctaatggtggccaacaacaggttgattgatttgcagatgcagttggacttggcaaatgagtccaaacatgctgctttcggagaagctgagcgactgaatggtgagaggaaagatttggcattgcaactggagtccaggtcttcacaagttgatgagcttcagctgatggtggcatcgctggaaaagaatgtagacaggaaggtgttggaattgcagttagagttagtttctgtggaggctgcagatctgcgcaagacagtggcttccctggaagagaagattgatgcagagataactctctctatgcagcacaaaacaaatgcagacctggcagaggcgtccaaagaatcattagaggcgcagctgcagtctgcaaacacagagatagggaaactgaacgggattgtgcaaactttagagaatgaggtgaggaaagagacagattctcgtgaagaactactgaaacagatagaggctatgaaaattgagtcagagagatcactatctgtggtgtctaccaaagagtcattagaggtgcagctccaggtggcgaattcagaagttgcaaagttgcgtgggatggtgaatgctctggagtgtgatgcggcgaacgagaaggcatattcttcagatctccagatgcaacttgaggcagtggaaggtatcaggaaggtgttggaatctgagcttgagtcttcacaccaggaggtgatgaggctgaaggagaaagtttcgtccttggaagcaaggatcaaggaccagacctcgttgcttgtagaatatacagctaaatcagaggatgcagtgtcccggaaaaaggcaatggagggtcaactagaagcagcaaatctggaagttacaaaactgagaaacaaggtgagcctgatacaaggcaaggtggagcaggagaagcttctgtcagaagagtacgaagcaaaatgccgcaagctggaggcgcaggtgttgagggacagccgagaggcgaaactttggcgcctcacgaactcaaacggagacctgaaggagaaagaactagtcagtgctgccgggaagcttgcggagtgccagaagactattgctaaccttggccgccagctgaaatcgctaacagatcttgatggcgtggtggccgatcctgaaaagctggaatcgagggacacgcacctggacttcagagatggcggagacgtggctgatggactgtatgaactgggtcttcctaagaggaacggtagctgcctctcaccccttcggtcggatccgtcgccgaggggtttgccgtcccttagtagctacctgagcaaaacaaaaaggtgaaaagtctgatgggatcattcaccattgtgcttgtgcataaattatttgacagtctatggatgatgccagttgtgacctggtggtagatcggtgtacatttacagaacttgatggttgctcacatgtgtactttctccttttgttttgctctcattttgcgagactgcagggtttgtgacaaatttactagatcttgtgagactgtagtgcgttattctcgcgttggaattcaactcgtctacaacaaaaatagaagaaaaaaaacaaattcaaccggtcggcaaagtagaagtagggcagaccaaaccaacgttcag

SEQ ID NO: 209904 - DNA, 866 bp, Zea Mays
tggatctctgttaggctgtgaagccttttttatcataaagtggaaggcgtgctgattattttaactctatctctaattcaactgaggataagaatagggataatatgagctcatctcgatcaaccgaagagctgtggcaagtgttctttgccaatcctcttgactggtgggataacaggacaaataagaagaacccaaggtatccagacttcaagcataagcagactggcgaagcactatgggttgacgggaggaacaaccccaactgggttatatctcagctggcggttttggactcgagaatgagttcgctgcaagacaatgagaggaaaccagtctcctatatgtatgctgacgagttcatgacattggacggcaaccgatagtcgttatggaggagggaagcttcgctcgtgccgattggctggctgttatggcgagcgagatcatgctgtcgacctgtcttagtagctagctcatgcttgctgtctcagttttgttgagcggctctggagggttgcgtgttatgagcgtcgtccgtagtatggtttgtgacataaggtagctatgatgagcctagaacaaacataaacaaagtgcgggggaaacccttgcttttagtgactccattagtagtgctatgtggtttgtgacatggtttttaactatgatgttacgccgaatggtaatatattgaagaacgtgccgtggccctacacaacttagttattatttagactagatggagcacttaccaatgttggacttgttaaatctgggttttctgaatgtaaatgatactagtaattgtggttaagattaatctatggtaggcctggaataccaggactagggctttgaagggg

SEQ ID NO: 209905 - DNA, 1326 bp, Zea Mays
gtttgagaccggctgacagccacaacagcagctcgtgacccattagtaggggagctgctggagcacacgcacggccacgccccgatatcgccatggctatcctcgccgttgcctctccactcaaaaccctaaaccctagccccggggaccacagccgctgccgcctctcctcttccctcctccaccttccgctaccagtgccacgatggcgccgcctccggtgctccgctcagtacagtgaggcggcggcgcagcccacgtcgacaacgacggcgcgtccagcggacataccctggagcaaggagctctgcaactcggtgcggctcattgggactgtaggcaccgacgtagagctgcggcagctgcccagcggctccgccgttgcgaggggtcgcctcgccgtatggaagtcagccaccgagactacatgggtaactctacaattctgggacgatcttgctattgtggcctctgagcatgttaagaagggtgaccggatatttgtttctggacggcttgtgtcagatactgttgatgaggggcctgagaagcggcatgtttactacaagcttgcagttcaacagttgaatttcatcgagtcccagccagttcgattatatgaaccagaggcaagccaggatgccctagaagaacccaaggtatccagacttcaagcataagcagactggcgaagcactatgggttgacgggaggaacaaccccaactgggttatatctcagctggcggttttggactcgagaatgagttcgctgcaagacaatgagaggaaaccagtctcctatatgtatgctgacgagttcatgacattggacggcaaccgatagtcgttatggaggagggaagcttcgctcgtgccgattggctggctgttatggcgagcgagatcatgctgtcgacctgtcttagtagctagctcatgcttgctgtctcagttttgttgagcggctctggagggttgcgtgttatgagcgtcgtccgtagtatggtttgtgacataaggtagctatgatgagcctagaacaaacataaacaaagtgcgggggaaacccttgcttttagtgactccattagtagtgctatgtggtttgtgacatggtttttaactatgatgttacgccgaatggtaatatattgaagaacgtgccgtggccctacacaacttagttattatttagactagatggagcacttaccaatgttggacttgttaaatctgggttttctgaatgtaaatgatactagtaattgtggttaagattaatctatggtaggcctggaataccaggactagggctttgaagggg

SEQ ID NO: 209906 - DNA, 3172 bp, Zea Mays
cctgcttccgccattgctagctttggccgaccatgtcacctcatcatcggcattttacgtcccagttttcttcttcttattatgcccccgtgcgaccccaaagaaggagagaactgaagctgcttccactgcctgattattccccaaccagttgttaccattcaggtcatctccgactagtctcacctgcagtgccctacgagcgagcactgtcagcacttgttggtcgccattcctatcccaccagcagccatggcggccgtgacgacaacgccatcgtcgaaaccaaggaaagtaggagaagaccaaggaaggggaagaaaacagcgcccaaccaaggcgtgcgtgcaccatcgtcgtcggagttgtcgactaggacggcgcagagcggcgacccccttgggcgaaaggagctggggcaacacgtggtgcactggctgaagcagggcatgcgccagatggcctctgaattcgcttcctcagaccagccagagacacaaggtaacaaggcattcctgtggtctgatggtgggcacgcggcccacgcggggtttgtagcgcaggcacaggcacacctttctgccactcccatgcccaagggacaggacgctctgtgccgcacggcctccgctcactaccccacgctgttcgacaacttccagagagagctccgcgatgtcctgctgcggcggtaacaagagggccttcttgttgatgatgactggcgctctacacgctcgtgggcgcttctgaaagagatggctagatcggcggagcatcggacggccgcacgccggtctactgctcctgttctgcacaccacgcttggcgtcagcttggagaagacgaggctgatgcaggctagaatcgatggctttgttcagcaaatgaccggccttcttcggctagaacgagatgcggagctggaactggcccaggatcatgaggtgagtgccgccggtacagtgatggatggaatgccgaaaaagccagtggtagctcatggtcaggcccaagaggatggtgacaccatttgcaatttgagagtcatcagcagctcaaccggattaactggtcaacatctagtcttattcagagccgagggaagccacagacttcctgcaaccagactctcccctggagacacggtttgcgtgagagcatgcgacagccagggcgaggttgccgcttcaactccttgcttgcaagcctccgtccataatctcggtgaggatggacgcagcattacggttgcattcagatcacgccgcggcggtgaacctgccttctccaggttcccagggaaatttgcgcgtattgatcgcatacaggctctagcagatgcagttacatacgagcgcaactgcgaagcactgatggctcttcagaagagagggttacagaaaagaaacgcatccatcggggtagtggccactctgttcggagacaaggaagacgcgacgaagccggagagaaacagtctgacggatcgtcgtggaccagaagcacctgacggcggttcgctggagacgcacagccacagcttcgacacctcccagtcgagggctctcgcactggccctggacaaggagaggccagtcctggtgatccaggggcctcctggaacaggcaagacccgtctgctcagctacctcgtcgcgcgcgtggtgcgccggggtgaacgcgtgctcgtgacggctccaagcaacgcggcggtcgacaacatggcggagagcttgtcagcgagtgggctgaagaacattgtgcgagtcgggaacccttccaggatatctccgtctgtggctcccatgtccctggggcagatcgtggccacgaggctcgagaagctcacccgagagttcgagacgaggagatctgccctgagaaaggacttgaagcgtcgcgtacaggacggcggcgacggttcttcagttcgtcagcaactgaaaaggctcggtaaggactacaggaaggagaagaaggaagcagtcagggaggttctggcaaacgccgaggtggtgctgtcgactaacactggcgcggctgacccacttgtgagggggactggaggttgctttgacctggtgattatagacgaagctggacaggcgattgagccatcatgttggatccctatgttgcaggggaagcgttgcattcttgccggtgaccaccggcagcttgcacccgtagtgctttcaagagaggccatggaaggtgggctgggcatgtctctgttagaaagggcttcgtcgctgcacgacggactgctcgctacgacgttgacgacacagtaccggatgcacgagtctatagctagctgggcgtcgaaggagatgtatgacggattgcttcggtcattcccgtccgttgcttctcgactcctcgtcaattatccatctgtcaaggtcacttggatgactcagtgtgcgttacttttacttgatacccggagggcgtatggaagcctaaatattgattgtgaggagagtttagacccagccggtactggttcattttacaacaatggtgaggcagatatagttgcacatcatgtcctcaatcttgtacaatgtgtccccttacatcgcgcaagtgcaactgttacaagatagactacaagaatatccgatggcttttgatgttgaggtttcaacaatagatagcttccagggtcgggaagcagatgcagtcgtcatatccatggttcgatcaaactccatgggagaagtcggattccttgccgatagaagacgcatgaatgtagctattacaagggcaaagtcacatgtcgcagtggtttgtgacacttctactatttgtaacaatgctttcctggctaggctcctcctccatatccggcaacatggtcaggttcagcatgtggatcccagttccttggatgggggctttcacctgcaagccttaccctctttaggctagcgatcttgccatgaaatgtgacatgcagtaaatgtcgagttccataatatggttgaaaattattccttctatgccatgaaacctacaacaatacattctgtaccatcaaaagttgtgtgctttcttcatggctatccatttttttcaaggtgtcatttagatggatgttgtccataacaggaatcctaaagattcctgtcggctaaaataattctcgttggtctttgac

SEQ ID NO: 209907 - DNA, 1988 bp, Zea Mays
taaatattagctggctacttcccttgcaacgattggttgtgttgtgtggctacaaatacgaatacacagcagccctctgctctctgcacctgcgcattttgtaaaggtacgaggagcaaggtgaggcaccaccagtaccaaccgggctccgagttcatcacgcacgcatggaaggctcggcggcacaggcgccggggaagaccgtcctgagggtggtggcgatctccggctcgctgcgcagggcgtcggccaacaccggcctcatccgcgccgccgcggagatctgcagggagtcgatcccggggctggaggtggagcacgtggacatctcggagctgccgctgctgaacaccgacctggagggcccgggccccggcgcgttcccggcggccgtcgaggcgttccgcggcaaggtgcgcgccgccgactgcttcctgttcgcgtcgcccgagtacaactactccatctcgggcccgctcaagaacgcgctggactgggggtcgcgcccgcccaactgctggggcgacagggccgccgccatcctcagcgcgtcgggcgggtcggggggcagccgctcgcagtaccacgtccgccaggtcggcgtcttcctcgacctccacttcgtcaacaagcccgaggtgttcaccagggcgcaccagccgcccagcaagttcgacgacgacggcaacctcgtcgacccggacaccaaggaccaggtcaccaaggtgctcctggcgctgcaggctctcgcgctcaggctgcacctggggaagctcgctgttgctgcacactcttcttgaacgtcgtcgtcgtcgggggtgcactaaactacactacacatcgtcgccgagctccaaatgccgtgccgtgtccgtgtgtgcgcgcttcaataaattctcggcgtccaacttttaatgagtgatgcacaatcgtgttcatttgtgagatgccctgatcgaatcgatccgtttgcgttttgccacgatcatcaaagaccaaaagagaaagaagaagaggaggaggaagcttccgtgctgacagtaccaacatcagcaagcaacctcctccaagaacaggggaaacagccacgccattgctgccgtaagcaagaggtcgacaggtgcgtgcgttacgtgcgtgctcgtcatgtatattcatgccgtcagagtcaacctccggcgtcaaccggttcctgttgcatcatccctcggttcagtgatacggagtagaatcgaacgtatctactgtgttctaataagttaaaaggtggttgatctcactcagggagttaatatagatcctcactaacttataagatagagtccaatgtacactatccctaaaattatttaaaaaaaaaagggagatatacgtgctacacgcgcgttcactcgccctgccaaagccgccatggccaagacgttccgtgaagggggcgtgatgtgctagaattcaatctcatcaatagcgtctaagttcttcatgcttactcttttctcgcctataataaggacatgtcacacacacacctccctcttagatcacattctctgacaactcgtgtattcctgcatacaagacatctcgctttcttcctcaaagcttcctgatattaccgagaagagcatctccatcaccaaggctctacgtgcatggacccgacaagagtagccctctgaattcctgactgttaaagatcatgtccagggtagcgaccaataaagtttttttgggggaacatttacatgcaactgctcgttggacagctacatcatctactttctaacggttgttcgaaggactgcactgcatcaactcttcactatgttagactttacagctacaccaattaagaacaatcaattagtatgactgctccacttggtaataacgcatccaatacctctggcaatagcttcgcgtcattgtactcttcctcaaacttcttgttttatactatcatggttaaaatgatgttaaacatgcat

SEQ ID NO: 209908 - DNA, 1426 bp, Zea Mays
cttggtcgctagtgagctcaaggtggtgcgaagtggatgctcctggtggtgtctagtggagagcttctccatacatggcatgcacactatcgtgctgttaggtgcctcgggctgtatgactatttgcttgtctcagggtcagaggatgggactatcaaagtttgggatctcatcacggtgcttgatgagcaatcaaggctggaggtccagacaccatatttgtatagtttcagtcagcatgcactgcctgtaactgatattgcttgttttcttggagcaatcgctatatcttcttctgaggatcgaacctgcaaaatttggagtttatctgagggtaggatgctgagaagcatttcatttcctactagcattgattctatagcactagacccaagaagtcatattttctatgctggtggtagagatggaaaaatatatgttactgctatgggtgttgatctcagttttcatggtagggatgagtcatctattctgggtgcattggatgaccacagcaaggcagtaacaagcttagcatcaagcagagatggacttctacttgtctctggatctgaggatggtaatgttcgggtgtgggataccagatgtcagcaagttacccgaaaattcaaacactcccaaggtccagtaaccaatgttcttattgtaacgccacaacgagtaaatctgccaccgctacaaccattacgcaaagttcggtctgcaaatggggaggctgaacggcaggcagtacttcttcatcggcctgaaaatgatgtcccaattcctggaaataagaccttcatttttatggagcgctacttggatgagcttcaggttatttgattttgggccgaatgctcagaatggcactccaaaccaacagggaacagaatggagagatagatacttggagttgcaggatctctttgtacatgaggtcctccatcagatgccatcctcgaggaacccatgatgcacatgctttggatatcgtaggatcatttgtggtgtcgaaacagtgatggttgccattcgggctacaaacgatgtagatgagttctttggagtaattcaactgatggtgctttcggctgcgaggaacttatcagattctgaactaaaaccactagaatcggtgccagcagtcacttggaactggttctcgtttgtgtactagtctagagaaacgctaaaaatcaggtttctcttgattctagttctaattttaaggatacagtgagcttgctacataaagttattttgatttcatagagaaaatgttttgttctcaggggaatctgaattttgaaagttttctactagaatctaagatttgatacgttcagggttaaccataccaattaaggactaaaaagtgctagttagcggtatcggattttcgctggaaaaccgctgtttttcg

SEQ ID NO: 209909 - DNA, 3407 bp, Zea Mays
tctcttcgcttctcctgcctgcggttgtgcggcctgcctccggtaaggagtcagccaagaacgcgatgcgaccggccttctccgcctccaagccgtcgccgtccgggagggagaagggcaggaggaagggcgcctccgcggccgaacagctgctcaccggccaggccgtccccctccgcacccgcctccacgacgctctcgccctcggcctcaccaagtctgatggccacggtgctaaaaaatggcagtctactgatgctggagtacagtctcacgtgctcaaatcggtgggtgcatttgtcggttgtctttcaaatgaactgctcagacttcctcctataaaggagtcaatttcagatatacttgtagcactggaaggtattcttaagacagagaacgtttcagttctgatccaagcagctgacgtgagctcgaagtttttctctactttaggaaattctgttcgccaatactcagttttggagatggtttcgtgcctctcatgccatttgtctgcaaatcagctacgtattgctttaccatgtgcaagtgcattgacttgtatattgaacaaccaagttacagcgagagcttcgactcaggcagaaatttgggaggctctggacaagaccaatgcagttgcgagtgttatttcaactctacagaattacaccgaagatgtccatccactgaactatctgacagagatgatatctctgctaagaagtatactgtggatttggccttcctcgagataccatgtatggagcaatcacaacttgatggccaaactagcacattactgtcttactgctgaaacaacagtttcagctaaaattcttaagctatatgctgctttaggtacatctgtgcctgtgctttatgtggcaatggagcaatggtccttcttaagaatgaagagctgatcattaagactggtaaccttatgggaaaatctcatcctactgttactaggattgaagcattgaggctctgccaggtttttctgagatcttcaaggggctgcaattggttgatgactgcacatggtcagcctattgttcaaggcataaccaatgccatgtctgaaataaatgagaagacattagtaagagagggatgtcggactgcattactggcgcttcgttattctgggaatcatcatagatgcttctggtttaatgctattgataaaatactttataagattctttgtgggagctgcaactcttcatctcatgcacatcagactttgtgccatggggagctgttcaatatagattccaaagatattatggatatacatccctatgtatgggatatactcggatatctagcagtacattgcgacaatgagcatttttcggtagggacatgtcagaataatttcttgcagggactgatatcatgtgcttgctcgctagcaacagatttaactctgaaaaaaagtcccctcaaattgtctaaggaggagcaggaaccggctttgagggcagttcttatgatgcttctctctcctagccaattcattttctctgaggcaagttctaaatttctggaagctgttctaccattagacaatgaatatatgaacatgttcatgtcatcactagaatcgaatgttaccagaaatcttacggcatcttttgactgtgtcaagatcatgaccaacctcatgaacatagcatgcttgttggtagtacaatctaactatagtctcaacaaaaggagtgctgtagatgtattatccaacattatcaaggaatgtctgcacgatcatttgtacattacgagatcaaactttgcttctcatctgcaattttgttttgatggaagttcatgctgctatctctctgaagagtgggagggtgaaaatattgttttattttatggtctcgtagtattgtttaatctgctgaagagtgacaactttatttgtttccactgtaaaagaaagttagatgcggggattgtgtgccatgaatgcagagatcattacaacgaaggtttggttggagtccttaaacaagccttgtgtcagaacatgagcccagggcccaagtcttatattgcacatatactgagtatgtttggcctctgtggttttccaagcaagctaggaggaaatatgagaaatgttttgtgtgacagtgagttagttgatctggaactgttgcttgcagatggcgaatctctaagtgctcatgcggctatcctatcagcaagatgtcctaaattattaccatctgaaaaaacttttgtccgtgatgggtcagtaacttatgaatggggcagaaggtcatgctatcatgttcgaatgtctgatcgtgtagatagtcacgctctgaagaaaattttggagtatgcatacactgggttggtcactgtagatgatgccactgttaagcctgtaaaaacacttgcaaagtattgccatttgagatcgctgcacttgatgcttcagaaagagcaacctagatggcactcatgtcccatatatgatcttactacagcactcgaaccagctaaacattcgttctcggacatcattttggaggcccaatcaaatgacaaaatggagtgtcaccatggttcgtgccagttatcgactcctcatattcatagccataaggtcattctgagcgtgagctgcgaatacctccgtgctttgttccagtctgggatgcatgagagctttgcggagactatcagagttccggtcggatgggaagcactgagaaaactagttcagtggttctactcaggcgagctgcctagagttccacctgactgccgatggaaggctacgagtacagaagagaagctatctatcctgaaatcgtacgcggagctgtcgtccctggcggacttctggttcgtggacgggatgaaggaagagagccttcaagtgttgacctcgtgcctgaattcctccagcacggacgcctccctcgccttcatcggcttcgcggcgaacttgggccagtgggagctggtggaggccgccatcagcagcgtggcgcatctgtaccccaggctgcgagactccggtcggttggagcagctcgatgaggacgtgctcaacatgctgcggacagagcatgtcaggtatttgcagcaccgcagtgcaagtaaatgaatccttaatgtcatggagggttttttttccccgtccactggtggtcgcatagcggtcctgttgtcatgttgtggtggtgtatgcacagctgttgcgttaaaaaaaaactgtacagccacttccgttgaagcttatggcgtcatgaacggggctcatctccgttgaaacaggaccgtgatggttaaaaccgttaatgatacttgcgttagtaccggtgctagtttcttgcctaagagggatcgtgcatgtgtgttagaaaaattataag

SEQ ID NO: 209910 - DNA, 915 bp, Zea Mays
agaacgtctatcagatttgttgcataaagtgccgggacaggctagccagatcaccttttcccaggacgggaccgttcctaccaggaaggcaacctcagtggctggggtggcaaggcagcgtgagcttagccataccgtcgagagtgagggggacagtaagatgaagaggcaggtgtccagtacgaaatccaaggagctcagtggtcacgacatctttgccgatcacgaagatcccaagcccaacaggtcaaggagatcagactatggcagctctgctgctcagtcaccagtgaaaaatgcaaatgtgagctccttctcgtttggagaggccgacattgacagcacagtgaaaacagcaaagaagaaagggtccagcaacttgtctactgatctgaacggcaagaccatgcccaagaaggattcagcgtctgcagagaaacagcctccgaaccgtgcgaggccgaaaggaatgagtggcagcagcaattttgcagacgggaaggcctcaacctcaacaaccggagatcatgaaggccgtcgtacccggcagcctcctggcggcgacagcagcattttgctgggctagcgtgcatatgaatcttgccctatgccgccgccgcacgggtggttggtccgtcagtctgtggtcttgttttcgtggtcaggccatgtgtcccatctccggtccttcagatgatctggttcgcatctgtcttgtgtatggttttgatatgtgttggttgtgacatgccccatggaacaaccctatcgctatgctgttttgttgtgtacaatggatgacgtgtgctgccgttttgttgtgtgtacaatggatatgtctggttgttgaataagaagaaattggtatatggtaccaataaaaattaattatccaaaaaaagtgtcagaaaaata

SEQ ID NO: 209911 - DNA, 775 bp, Zea Mays
catttgtagtccccaatcatccgacgatgatcccctcgattcgcggcgccctcgcctccaccactccccaaccacccgacgccgacccccctcaattcacgcccccacctgctgcatcggctccctctggcgccccgcctcctggcccagatccgtgcaccccttgccctctccggactcgatgattcacagatctgcccagctgcccaggcacagactaccggcatccggatctcctgctccactgctcgccgccttggggctctccggcgttggctcagcgcgacgagccccccaatagcctagttccggatcccccaaccgcccacgccccacagttcaagcaccggccaccgatgtctgacgaacgagcgaactccccgcggatgcaggaggaggaggtgcaggagcgaccgccgaccgtccgcgtttcaccatccccttctccgatctcaaggaatcataaaagcatatggaggaactatgtataggctacaaagaagcataagaagcatttttatagcagaagccaagtgttctgatgattttgttttttcaattgtgttttctgttattagttcagcatgcacatatattgacatgatttatggcatggcatctgccatctttgttatatttatgacatcgttcttgattgatgtgtgcgacatgaatgatggatttttttaacatcctgaccatcattgtgtcgctcattatcgtattttgtatatcatttatgggttcacggatatgaaatgacaggtttcttatt

SEQ ID NO: 209912 - DNA, 2455 bp, Zea Mays
agttccgcgagctcgggatctctgctccccatcccgcgcgtccatcttggtcaagaaaccctaaccagcacatccatcccacaggcctgccgacggcgcgtcgcccctaaaccctagaccccctgcggaaatctctagagcctgggccagctctgtgcgccagctcttgctccatctctccgcggcggcagcgcaacaaccgcacccatgaaagtcgccatcctcaccccccgcgagcctgccccatcctgcttagtgtcgtcccccgccaccgcgcagccgcaacccatctggataaggatgcatccgcttctcccatagccgccactacccctgcctgccctcggctacgaacacgaagatcccctggatggaggtggagctctcagaggcttatgatctagaactctatctcatactacggattccacagggtgaggagagatacgagcagggtcccaccggcgatgcgggtcccatcttcggcattgggagcaatccgcctactcggacacgaaggttctctgaggcggtgtagctatagatcatgcgggcaacggggaaggacgatagctacgcagcccacatcacgaaggcatataagtgggagttcgccgaaagggaaggtttgcagctggttgtgctgaatccagggactactctgggtccatttttcatgtcatcagtcaataccagcctgaataatctgttgcaacacctaagaggttgaaaattaaccaggccaacggcttgagtcggaccctgtcaacacagggtggtcgatgttagagacatggcacaatctcgatcgtgacgtatgagaacccatctacacagggttgtgcttggcgtccatggaatgtttgtttgacttcaccgatagaattgctgatatgtaccatgatttcccagttcatagaatcaactatcaaagaggacaaacaggttggttgatgagagcaaaggagccctccaagaagttgatcgatctgggcgtttgtttccttccgtttgatgtgaccatcagggagaccgtcgattgcttcagaagcaaagggctcatctagccatgtgaacatttccagatgtaccagggttactattgcttactagaatgaggcgagagctgcttagctcctttgacattccttctacttagtggcaattggtttggttacttaaacctatgctccatatgatccacgctgattgaattttggtttgttaatatgttttgggcaagcagtgctatgagatggagatgatggttaggcatgatctttctataggttaaaagaacagattatccaacagctgatggaacctgcattagagatattatgttgatgtcacagatttagttgatgctcatgtgaaagcgctcaacaaggcagacactagaaaagtcagtatttacaacgttggaacaggaagagatagagaggcccgcaaatagttaatctgggacaacatatctctgtactggccatagaggacaacaaaaaaaatcaaaagttgaagaatcaccaacggtgcctcctttgcaccctccagctcaagaacctgggcccgagccagttcaacaagtcatgcccacagctgaagtgctgaaccaacagatttactgtagggaatcaatgaatcagcccgaggcacatctgaaatagatcaaaacaaggtagtcgccttggtcgtggttccacatgataatccgccaaaagcacttgcttctaccagtcctggaagcgtggcgactagctggagcaaatcagattctgtgcgatgaaaagcaagtgaaagaggctattgttcaggtactaatttgccatagtgttggtctatgactgaatggtacaaaatacatgcaatgaatggatgatactttccagttaaatcatgtaattggaatacagtggtgccgtcagcggtgcggattgggggcttctagagaaagggtctagcgtcgtgccctgcttgacgaacagtgtgttgatatgtgccatcatcgcactgggaacgaacgtgatggctagcacggggagcatcttgagcatctgctttgtctccaccactcaccatgctctgagcctgtgttggtatgcagacttttccctttgtttcagaagaagatgcagttgcattgcacattgttggaacccacgatcaccacaaaattgagggaatatgtcattactcatttgcataactcattagtcattaccttgtcaaggtttatgctttccatcacgaacggttggagttgcaacataacgatactttggtataccaaataaagttactctgttcaccaaatgtagggttagtttttttgttgtgctaaagactgaacataatttgggtgtgttaatattttatttattgtctgcacatggtttgcgttcttatgatgatggctcatggatcctgtaaaatacgtgttaggattgggagatcc

SEQ ID NO: 209913 - DNA, 2368 bp, Zea Mays
agttccgcgagctcgggatctctgctccccatcccgcgcgtccatcttggtcaagaaaccctaaccagcacatccatcccacaggcctgccgacggcgcgtcgcccctaaaccctagaccccctgcggaaatctctagagcctgggccagctctgtgcgccagctcttgctccatctctccgcggcggcagcgcaacaaccgcacccatgaaagtcgccatcctcaccccccgcgagcctgccccatcctgcttagtgtcgtcccccgccaccgcgcagccgcaacccatctggataaggatgcatccgcttctcccatagccgccactacccctgcctgccctcggctacgaacacgaagatcccctggatggaggtggagctctcagaggcttatgatctagaactctatctcatactacggattccacagggtgaggagagatacgagcagggtcccaccggcgatgcgggtcccatcttcggcattgggagcaatccgcctactcggacacgaaggttctctgaggcggtgtagctatagatcatgcgggcaacggggaaggacgatagctacgcagcccacatcacgaaggcatataagtgggagttcgccgaaagggaaggtttgcagctggttgtgctgaatccagggactactctgggtccatttttcatgtcatcagtcaataccagcctgaataatctgttgcaacacctaagaggttgaaaattaaccaggccaacggcttgagtcggaccctgtcaacacagggtggtcgatgttagagacatggcacaatctcgatcgtgacgtatgagaacccatctacacagggttgtgcttggcgtccatggaatgtttgtttgacttcaccgatagaattgctgatatgtaccatgatttcccagttcatagaatcaactatcaaagaggacaaacaggttggttgatgagagcaaaggagccctccaagaagttgatcgatctgggcgtttgtttccttccgtttgatgtgaccatcagggagaccgtcgattgcttcagaagcaaagggctcatctagccatgtgaacatttccagatgtaccagggttactattgcttactagaatgaggcgagagctgcttagctcctttgacattccttctacttagtggcaattggtttggttacttaaacctatgctccatatgatccacgctgattgaattttggtttgttaatatgttttgggcaagcagtgctatgagatggagatgatggttaggcatgatctttctataggttaaaagaacagattatccaacagctgatggaacctgcattagagatattatgttgatgtcacagatttagttgatgctcatgtgaaagcgctcaacaaggcagacactagaaaagtcagtatttacaacgttggaacaggaagagatagagaggcccgcaaatagttaatctgggacaacatatctctgtactggccatagaggacaacaaaaaaaatcaaaagttgaagaatcaccaacggtgcctcctttgcaccctccagctcaagaacctgggcccgagccagttcaacaagtcatgcccacagctgaagtgctgaaccaacagatttactgtagggaatcaatgaatcagcccgaggcacatctgaaatagatcaaaacaaggtagtcgccttggtcgtggttccacatgataatccgccaaaagcacttgcttctaccagtcctggaagcgtggcgactagctggagcaaatcagattctgtgcgatgaaaagcaagtgaaagagttaaatcatgtaattggaatacagtggtgccgtcagcggtgcggattgggggcttctagagaaagggtctagcgtcgtgccctgcttgacgaacagtgtgttgatatgtgccatcatcgcactgggaacgaacgtgatggctagcacggggagcatcttgagcatctgctttgtctccaccactcaccatgctctgagcctgtgttggtatgcagacttttccctttgtttcagaagaagatgcagttgcattgcacattgttggaacccacgatcaccacaaaattgagggaatatgtcattactcatttgcataactcattagtcattaccttgtcaaggtttatgctttccatcacgaacggttggagttgcaacataacgatactttggtataccaaataaagttactctgttcaccaaatgtagggttagtttttttgttgtgctaaagactgaacataatttgggtgtgttaatattttatttattgtctgcacatggtttgcgttcttatgatgatggctcatggatcctgtaaaatacgtgttaggattgggagatcc

SEQ ID NO: 209914 - DNA, 2337 bp, Zea Mays
agttccgcgagctcgggatctctgctccccatcccgcgcgtccatcttggtcaagaaaccctaaccagcacatccatcccacaggcctgccgacggcgcgtcgcccctaaaccctagaccccctgcggaaatctctagagcctgggccagctctgtgcgccagctcttgctccatctctccgcggcggcagcgcaacaaccgcacccatgaaagtcgccatcctcaccccccgcgagcctgccccatcctgcttagtgtcgtcccccgccaccgcgcagccgcaacccatctggataaggatgcatccgcttctcccatagccgccactacccctgcctgccctcggctacgaacacgaagatcccctggatggaggtggagctctcagaggcttatgatctagaactctatctcatactacggattccacagggtgaggagagatacgagcagggtcccaccggcgatgcgggtcccatcttcggcattgggagcaatccgcctactcggacacgaaggttctctgaggcggtgtagctatagatcatgcgggcaacggggaaggacgatagctacgcagcccacatcacgaaggcatataagtgggagttcgccgaaagggaaggtttgcagctggttgtgctgaatccagggactactctgggtccatttttcatgtcatcagtcaataccagcctgaataatctgttgcaacacctaagaggttgaaaattaaccaggccaacggcttgagtcggaccctgtcaacacagggtggtcgatgttagagacatggcacaatctcgatcgtgacgtatgagaacccatctacacagggttgtgcttggcgtccatggaatgtttgtttgacttcaccgatagaattgctgatatgtaccatgatttcccagttcatagaatcaactatcaaagaggacaaacaggttggttgatgagagcaaaggagccctccaagaagttgatcgatctgggcgtttgtttccttccgtttgatgtgaccatcagggagaccgtcgattgcttcagaagcaaagggctcatctagccatgtgaacatttccagatgtaccagggttactattgcttactagaatgaggcgagagctgcttagctcctttgacattccttctacttagtggcaattggtttggttacttaaacctatgctccatatgatccacgctgattgaattttggtttgttaatatgttttgggcaagcagtgctatgagatggagatgatggttaggcatgatctttctataggttaaaagaacagattatccaacagctgatggaacctgcattagagatattatgttgatgtcacagatttagttgatgctcatgtgaaagcgctcaacaaggcagacactagaaaagtcagtatttacaacgttggaacaggaagagagaggcccgcaaatagttaatctgggacaacatatctctgtactggccatagaggacaacaaaaaaaatcaaaagttgaagaatcaccaacggtgcctcctttgcaccctccagctcaagaacctgggcccgagccagttcaacaagtcatgcccacagctgaagtgctgaaccaacagatttactgggaatcaatgaatcagcccgaggcacatctgaaatagatcaaaacaaggtagtcgccttggtcgtggttccacatgataatccgccaaaagcacttgcttctaccagtcctggaagcgtggcgactagctggagcaaatcagattctgtgcgatgaaaagcaagtgaaagagtggtgccgtcagcggtgcggattgggggcttctagagaaagggtctagcgtcgtgccctgcttgacgaacagtgtgttgatatgtgccatcatcgcactgggaacgaacgtgatggctagcacggggagcatcttgagcatctgctttgtctccaccactcaccatgctctgagcctgtgttggtatgcagacttttccctttgtttcagaagaagatgcagttgcattgcacattgttggaacccacgatcaccacaaaattgagggaatatgtcattactcatttgcataactcattagtcattaccttgtcaaggtttatgctttccatcacgaacggttggagttgcaacataacgatactttggtataccaaataaagttactctgttcaccaaatgtagggttagtttttttgttgtgctaaagactgaacataatttgggtgtgttaatattttatttattgtctgcacatggtttgcgttcttatgatgatggctcatggatcctgtaaaatacgtgttaggattgggagatcc

SEQ ID NO: 209915 - DNA, 2643 bp, Zea Mays
agttccgcgagctcgggatctctgctccccatcccgcgcgtccatcttggtcaagaaaccctaaccagcacatccatcccacaggcctgccgacggcgcgtcgcccctaaaccctagaccccctgcggaaatctctagagcctgggccagctctgtgcgccagctcttgctccatctctccgcggcggcagcgcaacaaccgcacccatgaaagtcgccatcctcaccccccgcgagcctgccccatcctgcttagtgtcgtcccccgccaccgcgcagccgcaacccatctggataaggatgcatccgcttctcccatagccgccactacccctgcctgccctcggctacgaacacgaagatcccctggatggaggtggagctctcagaggcttatgatctagaactctatctcatactacggattccacagggtgaggagagatacgagcagggtcccaccggcgatgcgggtcccatcttcggcattgggagcaatccgcctactcggacacgaaggttctctgaggcggtgtagctatagatcatgcgggcaacggggaaggacgatagctacgcagcccacatcacgaaggcatataagtgggagttcgccgaaagggaaggtttgcagctggttgtgctgaatccagggactactctgggtccatttttcatgtcatcagtcaataccagcctgaataatctgttgcaacacctaagaggttggttatccattatcattcactgcatcacaactgaatcgcaaatgggttttcatgcaataaacaaacttatagcgcaagtcgttcttgaaggttgaaaattaaccaggccaacggcttgagtcggaccctgtcaacacagggtggtcgatgttagagacatggcacaatctcgatcgtgacgtatgagaacccatctacacagggttgtgcttggcgtccatggaatgtttgtttgacttcaccgatagaattgctgatatgtaccatgatttcccagttcataggtcatacattttctaagaacatgcatcaggtttgtgtaagcagggctagctgttcattttggtaatgacatttttacttttttcacatcagaatcaactatcaaagaggacaaacaggttggttgatgagagcaaaggagccctccaagaagttgatcgatctgggcgtttgtttccttccgtttgatgtgaccatcagggagaccgtcgattgcttcagaagcaaagggctcatctagccatgtgaacatttccagatgtacgttttattctatagaactgctacagtaatacttggctcatattaaaccgcctaaacgcactggaaaaaactaaactatatgataatgatataggtaccagggttactattgcttactagaatgaggcgagagctgcttagctcctttgacattccttctacttagtggcaattggtttggttacttaaacctatgctccatatgatccacgctgattgaattttggtttgttaatatgttttgggcaagcagtgctatgagatggagatgatggttaggcatgatctttctataggttaaaagaacagattatccaacagctgatggaacctgcattagagatattatgttgatgtcacagatttagttgatgctcatgtgaaagcgctcaacaaggcagacactagaaaagtcagtatttacaacgttggaacaggaagagagaggcccgcaaatagttaatctgggacaacatatctctgtactggccatagaggacaacaaaaaaaatcaaaagttgaagaatcaccaacggtgcctcctttgcaccctccagctcaagaacctgggcccgagccagttcaacaagtcatgcccacagctgaagtgctgaaccaacagatttactgggaatcaatgaatcagcccgaggcacatctgaaatagatcaaaacaaggtagtcgccttggtcgtggttccacatgataatccgccaaaagcacttgcttctaccagtcctggaagcgtggcgactagctggagcaaatcagattctgtgcgatgaaaagcaagtgaaagaggttaaatcatgtaattggaatacagtggtgccgtcagcggtgcggattgggggcttctagagaaagggtctagcgtcgtgccctgcttgacgaacagtgtgttgatatgtgccatcatcgcactgggaacgaacgtgatggctagcacggggagcatcttgagcatctgctttgtctccaccactcaccatgctctgagcctgtgttggtatgcagacttttccctttgtttcagaagaagatgcagttgcattgcacattgttggaacccacgatcaccacaaaattgagggaatatgtcattactcatttgcataactcattagtcattaccttgtcaaggtttatgctttccatcacgaacggttggagttgcaacataacgatactttggtataccaaataaagttactctgttcaccaaatgtagggttagtttttttgttgtgctaaagactgaacataatttgggtgtgttaatattttatttattgtctgcacatggtttgcgttcttatgatgatggctcatggatcctgtaaaatacgtgttaggattgggagatcc

SEQ ID NO: 209916 - DNA, 3099 bp, Zea Mays
cggacgcaccatagggaaataaaatccggtggaagggaaagagttctatgggagacacgacggcgcgcacgcgcgtggcgagccagagctcgagcgcaagttccatatcgcgctggagtgcaaagtgcgtcattgggaataactagtatatagcccgtgctaacagaagtctcgtcgtcgtcggcggcggagatgggcaaggcgaaggggaagcagcgtcaggacaagttctaccacctcgccaaggagcaagggtaccggagtcgcgcggcgttcaagctgctccagctcgacgcgcggttccacttcctcccgacggcgcgctcggtgcttgacctctgcgccgcgccgggagggtgggtccaggtggccgtcaaccatgctcccgtgggtgccttcgttgtcggcgtcgacctcgttcctatacgccccatccgcggggcccactcgctcaccgaggacatcaccgccaccaagtgccgcgccgcggtgcggaggctcatggactccaacggcgtctccgcttttgacgtcgtgctccacgacgggtcgcccaacgtcggtggtgcctgggcgcaggaggctacgtcgcaatcggcgctcgtcatagacgcactgcgcctcgctaccatgttcctcgctcccaagggcgccttcatcacgaaggtttttaggtctcaagattacaacgctattatgtactgtcttaaacagttgtttgagaaggtcgaggcgactaaacctacggcaagtcggtctacatctgctgaaatttatatcatttgcctgaaatacaaggctcctgcaaagattcaaccagaacttctcgatataaagcacttattcagtgtggttccagaacagaccaaatctagggatgttttggatggtaggaaaaaaagacaccgtgatgggtatgaagaagggaatacaacattacggaaagttggtttggcatcagactttatatggtctgacacccaggcgccactagagtttttgggctcttacaatgcaatttcattcgataatccagaatccctgcccataaagaatcatgagcttacaacagatgatataaaaaatttctgtgaggacttgcttctgttggataaacatagtttcaagcatattttaaaatggcgaattcgtttacgaaaatcactgtcagcatcatcacaagtcaccccaaaggtcaatgatgctgtggagagcacaaaggtcatggatgatgatgtacttctacaggaaatggaagaattgactagtgtcattgatagaaagaaaaaaagagaaaaaaagcgactatcaaagcgtcgagcaaaggataaagcacgcaaagccacaggaatgcaggttgatgctacaggagatgattatggcgatcctgacctgttttctattagtgttattaagggtggaaaagaacttgaagctgttgaatcagcagagattgatgtggaagatgaaattggagacggtgataatgaggatactcaagctcttgaagactctgatgaggaaatggattctgatgacgaacagcagaggtatgatgcccagcttgaagagatgcttgatgaagcttatgagcgctttgtaactaaaaagggtggtgaaataaagcaagaacgcaagcgtgcaaaacgaataaatcctgatgctgatgcagaactgttagagggaggtgaagatgatggtgatgttgaaatggatcaagattttgatgaagatcaagatcaagaggccaacccccttctgtttgctctagatgagcagaagccaactaaagagcagattgtaaagcaatggtatagtcaggatgtgttcacggaagcagcgaccggtgttactgagcggagcgacactgaagatgaaagggagattttgcagaggaataagaagatggatactggcaaaagggaaaaggtggctaaagcacaggatttgcaacatgatggttttgagattgtaccagcagaacctgtccaaaacgaagaggattcatcttcatcttctgatgaatcagaggatgatatcgatgattacagaaaggctgaagtactagcctatgctaagaagatgctgaggaagaaacagagagagcagatacttgatgatgcttacaacaagcatatgtttgatgacgaagggttacccaactggtttgttgaggatgaaaagaggcataggcagcccatgaagcctgtttcacgtgaggaagtagctgcaatgagggctcagtttaaggagattgatgcccgcccatccaagaaggtcgcagaggccaaggctcggaagaagcgtgtcgccatgaagaaacttgacaaggcacgccaaaaggcagatgctatagcggaccagaatgacataaacgagctatcaaagaggaagatgattgaccggatttacaggaaggcgatgccgaagaagcctcagaaggagtatgttgttgcaaagaagggtgttcaggtgagggctggcaaagggaaggtgttggtggatccacggatgaagaaggacaagcgggccagtgggactgggaagaagggtggcaaaggcgcaaaggggaagggtggccagaaaggcatgagagggaaagctgggaagaaggcagggaaagccccacggtgacagtggctttggttgctttggaccaaattggcgactttggctctggaatcggcttgcatttccttatcagatgaaaagaatgcagcactttgaatctcaagcaatgagatgcagagaccgcctggatgcgcaccgctcaacttgttgatcagagtagaatctgatccaagctcttttgcgttcaagatttggaatcaggctgatgcataggcggccactgactccgagctacttggtgatagcatcaagcagctggccagataccaacttgatgatggctcagctctaagagaatataataagcagtgaggcgatggctcacagtcactgcaaaagccgttactgttgtagtgcttaaacaattgtttcaagtggcttgaagaacgtcagtagaatcgcaggaaccaatcgagacatctctgtacacggaaaggtacagaataatatattcttttaaaacccacc

SEQ ID NO: 209917 - DNA, 1119 bp, Zea Mays
gcaaacttcccattttctatgactccaagcaatggcagttgccgttcagtttggactatagaattcaattatgagttcagtttgttgatattaaaggaaagatacagtggttctattgtttctcaacctggttcattttgggaagacaatagtggaaatatcgatcgatgtcttacccttggtttccaggctttggattgctgtcagctaggggacgaagtcaggaagcaggagctgaagctcgactcaccagttcaagatgcatacgcaacacagacatgcagcagcgcaaggatgaaacgaggcctatttgcatatttagttgagtccggcccggtgctgctccttgaattagtcgccttggttgtcgatgtcccaaatgtctcttggaaggatattggtgggctggagaatgtcaagagggagctccaggagactgttcaatatcctgtggagcatccggagaagttcgagaagtttggtatgtctccatccaaaggagttttgttctatggtcatcctggttgcggtaagaccttgttggcaaaggcaattgccaacgagtgcgaggctaatttcatcagtgtcaagggtcctgagttgcttaccatgtggtttggtgagagtgaagccaacgtccgtgaaatttttgacaaggctcgtcaatctgctccttgtgtcctcttctttgatgagcttgactcaattgcttctcagagaggaagcaatttgggtgatgctagaggtgtagctgatagagtgcttaatcaactactgacaaaaatggatggcatgaatgccaagaaaactgtgtttattattggagctataaacaggcctgatatcattgaccctgctctgctgaggccagggcgtcttgaccagctgatctacattccactgcctgatgagcaatataggctctagatcttcaaggcctgccttaggaagtcccctgtggcgaaggatgtggacttgaatgctcttgctgagtacacgcaacggttcagttgagcagatatcacaaaaatttgccagcgtgcgtgcaaatatgcaatcagagagaacattgagaaggtaacttcctccaaacgtcagttggtactctacaaattaata

SEQ ID NO: 209918 - DNA, 3037 bp, Zea Mays
cggcgctctcccgatcccgagtgcatgctacctcacctgcgtgtgcgccgcgtttcaactcgagaaagaagacacaccgtcgcggcgcacgcggcctctggtttctgatttcctggttaccctttccctccctgcatttgcctttcagatcaggcggcagcaccttcctctcctccccttcccttccgtctcatcttcgttcccttccggggtcatcccttccgtcctcctcctaccaagtcccaaggccgcgagacagacagacagacagacagaaagagagagcagagcagacaatggcgacgctcgaggacctgggcgtctccgccttcatcaacatcctgggcgccttcgtcttcctgctcctcttcgccgtcctccgcatccagcccgtcaacgaccgcgtctacttccccaagctctacctcgcgcacaagcgccaccagcacgaccacgccgcccgctccgccttccgccgcttcgtcaacctcaacctctgcacctacgtcaccttcctcagctgggtgcccggcgcgctccgcatgtccgagccggacctcgtcgcccacgccgggctcgactccgccgtctaccttagaatctacacgctcggcctcaagatatttctgcccattacgactctcgcccttctggttcttatcccagtcaacgtatctggcggcacattacttgatctaagaaaggaagttgttttcagtgatatcgataagctttccatatcaaatgttagccctggatccaacagattctttatccatctcttgatggcatatgtgttcacattctgggtgtgctttatgctgtacaaagaatacagcaatgtagcatttatgaggttgcatttcctggcttcccagaagcgctgtgccgatcatttcacagtgattgttagaaacattcctcgtgtctcaagtcattcaacttctgaaacagtggatgagttcttccgaagaaatcacccagaccactatcttggtcatcagcctgtttacaatgcaaatcggtatgctaaacttgtgaagcaaaaggagaggctccaaaactggttggattactacgaactgaagttcgaaaggcatcctgagagaagaccaacaagacgggatgccttggtttctgtggcagggaagtggatcaaatagactactaccgggctagaatcagcgagcttgagaggaggatgacatcagaacgacagaaaattctcaatgacccaaaagctgttatgccagtttcttttgtgacatttgactcgagatggggtgcggctgtgtgtgcacagacacaacagtcaaagaacccaacccaatggttgactgattgggctcctgaaccgcgggatgtttattggcaaaatcttgccatcccatttttctctctcagtatccgcaggtttctgatgtctgtcgctgtctttgctctagtgtttttctacatgatccccatcgcgtttgttcaatcgcttgccaatctcgagggtcttgaaaaagttgctccttttctgaagccagtaatagaagcacatgtggtaaaatctttccttcagggatttcttcctggtctggctctgaagatttttctctatattctccctactgtcctgctaatcatgtcaaaggttgaaggctatgtctctttatcctcgctggaaaggaggactgcttcgaaatattactacttcatgctggtgaacgtatttcttggaagcataatcgctggcacagcatttgaacagctatattcgtttctccaccagcctcctacacaaataccaaggaccattggggtagctataccaatgaaagccacatttttcatgacatacgtaatggtagatggctgggctggtattgctaacgagatccttcgagtgaaggctctggtgatataccatctgaagaacatgttcatcgtgaagacggagagggacagggatcgggcgatggatcccggcagcataggactcggagaaaacctcccgtcccttcagctgtatttcctcctcggcctcgtgtacgccgtcgttaccccgcttctcctgccgtttataatcgtcttcttcgcctttgctttcctcgtctacagacaccagatcatcaacgtgtacaatcaggagtacgagagtgctgctgcgttctggcctcaggtgcactcccggataatagctagcctactcatctctcatgtaactctgtttgggttgatgagcacaaaggaagctgcgtactccacccctctgctcatcttcctgcctctgctgacgatctggttccacaaatactgcaagagccggttcgaaccagctttcagaaagtatcctcttgaggaagcaatggcgaaggacaccatggagcacgcatcggagcctaacctgaacctggaatccttcctggctaacgcttacctgcaccccatcttccgccttttcgaggaagccgggaaagaggaggagacggtggaggtgaggatcgacaaagccgagaagcagcagcatcgccatgaggaggacgaggctcacgcgaggagctcgtcgcagtaccgggaggaggagactcacttcaggagcacgcacgagacgcattaccaccacgaggagagccacgtcagcaggagcacccagtatcatgagggcatccacgtgaggagcgacacggactcgccgtcgccgccacacttcgtctaccactacgacatccagcagtgatgatgtcgtctctaactttgttttcctgggtgtcttgtgaatgcttctcttggctaacctgtccagccccccccccccccccccccaagaggtttgctaaagtcgctgatgattgatgaattgttgcgtgtacatgcagggtagggtctagtgttgtagtgactgtaaaagttctggtgtgccatgggacctgaacattgattccatgcaggaaaaaaaagaagtggatgaatcaagttgagtattgcgtggtatacatgagaatgtcttcataattcatttgaaaacatggagattaaaaaaaataacagg

SEQ ID NO: 209919 - DNA, 3015 bp, Zea Mays
cggcgctctcccgatcccgagtgcatgctacctcacctgcgtgtgcgccgcgtttcaactcgagaaagaagacacaccgtcgcggcgcacgcggcctctggtttctgatttcctggttaccctttccctccctgcatttgcctttcagatcaggcggcagcaccttcctctcctccccttcccttccgtctcatcttcgttcccttccggggtcatcccttccgtcctcctcctaccaagtcccaaggccgcgagacagacagacagacagacagaaagagagagcagagcagacaatggcgacgctcgaggacctgggcgtctccgccttcatcaacatcctgggcgccttcgtcttcctgctcctcttcgccgtcctccgcatccagcccgtcaacgaccgcgtctacttccccaagctctacctcgcgcacaagcgccaccagcacgaccacgccgcccgctccgccttccgccgcttcgtcaacctcaacctctgcacctacgtcaccttcctcagctgggtgcccggcgcgctccgcatgtccgagccggacctcgtcgcccacgccgggctcgactccgccgtctaccttagaatctacacgctcggcctcaagatatttctgcccattacgactctcgcccttctggttcttatcccagtcaacgtatctggcggcacattacttgatctaagaaaggaagttgttttcagtgatatcgataagctttccatatcaaatgttagccctggatccaacagattctttatccatctcttgatggcatatgtgttcacattctgggtgtgctttatgctgtacaaagaatacagcaatgtagcatttatgaggttgcatttcctggcttcccagaagcgctgtgccgatcatttcacagtgattgttagaaacattcctcgtgtctcaagtcattcaacttctgaaacagtggatgagttcttccgaagaaatcacccagaccactatcttggtcatcagcctgtttacaatgcaaatcggtatgctaaacttgtgaagcaaaaggagaggctccaaaactggttggattactacgaactgaagttcgaaaggcatcctgagagaagaccaacaagacggggaagtggatcaaatagactactaccgggctagaatcagcgagcttgagaggaggatgacatcagaacgacagaaaattctcaatgacccaaaagctgttatgccagtttcttttgtgacatttgactcgagatggggtgcggctgtgtgtgcacagacacaacagtcaaagaacccaacccaatggttgactgattgggctcctgaaccgcgggatgtttattggcaaaatcttgccatcccatttttctctctcagtatccgcaggtttctgatgtctgtcgctgtctttgctctagtgtttttctacatgatccccatcgcgtttgttcaatcgcttgccaatctcgagggtcttgaaaaagttgctccttttctgaagccagtaatagaagcacatgtggtaaaatctttccttcagggatttcttcctggtctggctctgaagatttttctctatattctccctactgtcctgctaatcatgtcaaaggttgaaggctatgtctctttatcctcgctggaaaggaggactgcttcgaaatattactacttcatgctggtgaacgtatttcttggaagcataatcgctggcacagcatttgaacagctatattcgtttctccaccagcctcctacacaaataccaaggaccattggggtagctataccaatgaaagccacatttttcatgacatacgtaatggtagatggctgggctggtattgctaacgagatccttcgagtgaaggctctggtgatataccatctgaagaacatgttcatcgtgaagacggagagggacagggatcgggcgatggatcccggcagcataggactcggagaaaacctcccgtcccttcagctgtatttcctcctcggcctcgtgtacgccgtcgttaccccgcttctcctgccgtttataatcgtcttcttcgcctttgctttcctcgtctacagacaccagatcatcaacgtgtacaatcaggagtacgagagtgctgctgcgttctggcctcaggtgcactcccggataatagctagcctactcatctctcatgtaactctgtttgggttgatgagcacaaaggaagctgcgtactccacccctctgctcatcttcctgcctctgctgacgatctggttccacaaatactgcaagagccggttcgaaccagctttcagaaagtatcctcttgaggaagcaatggcgaaggacaccatggagcacgcatcggagcctaacctgaacctggaatccttcctggctaacgcttacctgcaccccatcttccgccttttcgaggaagccgggaaagaggaggagacggtggaggtgaggatcgacaaagccgagaagcagcagcatcgccatgaggaggacgaggctcacgcgaggagctcgtcgcagtaccgggaggaggagactcacttcaggagcacgcacgagacgcattaccaccacgaggagagccacgtcagcaggagcacccagtatcatgagggcatccacgtgaggagcgacacggactcgccgtcgccgccacacttcgtctaccactacgacatccagcagtgatgatgtcgtctctaactttgttttcctgggtgtcttgtgaatgcttctcttggctaacctgtccagccccccccccccccccccccaagaggtttgctaaagtcgctgatgattgatgaattgttgcgtgtacatgcagggtagggtctagtgttgtagtgactgtaaaagttctggtgtgccatgggacctgaacattgattccatgcaggaaaaaaaagaagtggatgaatcaagttgagtattgcgtggtatacatgagaatgtcttcataattcatttgaaaacatggagattaaaaaaaataacagg

SEQ ID NO: 209920 - DNA, 1923 bp, Zea Mays
caactagtcattaaaggcctttttagaagtggagtattttctctgttttttagataatactgtagtatttgagaagggtaaaattgagaaaaaaacacgactaactgtaaaagtgaggacaccagtaaaacctagaacaccagcttaaaaaacctttttttctaatacagtttttggtagactcttcaaaagatatgttttcgaaactgcagttttgactatattgcactactttcacagttttaaaaacttaactccaaaaattttcaatacttgggcctagctgatgctcttagggaggtaggatagagtctgttctttattgtgctgtaatctgtagtttttgttttagttgttagtgtgtgcagtgtgtgtgtgcgtgcaggtgtccctaacctatacctctcttgtaagaccctttcttctatcttatctataaagacgtgcaagtctcatgtttctttcaaaaaaaagttttaatactatggtaaaaaatattgtgagtatgtcttgacatttcaaaactgaagtatttcaaaactatagctttcaaatactttgtttccaaataggacctaattgtaaattagtccggtcgattggagtcttcaactatccaccagttgcaaattcaatctataagttaattgtaattttcctttccaatgtattatcaattggaatacccgaatgcttttgaactgccactgtgatttggcggcagctctctcaatatcaccacaggaacaaaggatcagaaatggctatgcaggccgcaaggaggctagcatctttgaaactccaacgacgcctactccttccctctcaggccgagtccccaagcataagcatcccaaccgcagcggcggcggcagccttcctccactcccatgccaccagcttcgggtacaagcaggttcgcgaagaggataagagcaaattggttggcaacgtgttcagcagcgtggcttctagctacgacctcatgaacgatctcatgagtgtcggcctgcataggctgtggaaggacaggcttatttccaagctgaaccccttttcggggatgaagcatctcgatgtggctggtggaacaggttatagcgaagaacattgtcttagctggatacaaggagatgcagaagctctgagttttgaggatggatctatggatggttacactatcgcatttgggatcagaaatgtgacgcacattgagaaagctctgtcagaagcttacagggttctaaagcaaggggggaggttcctatgcttggagttgagtcatgtggatgtccctatttttaaagagatgtaagtttcgtcaatcatgtttactcgtcaatctttaactgctctttcagattttctgcccttcttttttcagttatgatgtttactcgttttctatggttccggctattggagagctggttgctggtgatcggcagtcgtaccaatacttggttgagagcatccgtcggtttccgaatcaggaaaagtttgctcagatgattcaggaagccggattccagagggtggaatatgagaacctcgtgggtggtgtagttgccattcattctggactgaaactgtagagctgaatacggatggatattttttcatacgtgcaccgcttctacaattagtagtatttgttttttaaattaattctataataggttcggtggcttgtaaaagcagctggtgctggctgtcagcatcagcacaataagtagtatttgctaataagtagtatttgcgagaagtatatgctggagcagtagcgtcagtggctattttggcttttaagctagctgacctcttccatttgtaaagttttttcttgaaaacgtgaaaccatccagaacatcaaattagtcttatcacatacctcctgcaatatatttttttgttctaaaaaac

SEQ ID NO: 209921 - DNA, 1965 bp, Zea Mays
agagtcttcaactagtcattaaaggcctttttagaagtggagtattttctctgttttttagataatactgtagtatttgagaagggtaaaattgagaaaaaaacacgactaactgtaaaagtgaggacaccagtaaaacctagaacaccagcttaaaaaacctttttttctaatacagtttttggtagactcttcaaaagatatgttttcgaaactgcagttttgactatattgcactactttcacagttttaaaaacttaactccaaaaattttcaatacttgggcctagctgatgctcttagggaggtaggatagagtctgttctttattgtgctgtaatctgtagtttttgttttagttgttagtgtgtgcagtgtgtgtgtgcgtgcaggtgtccctaacctatacctctcttgtaagaccctttcttctatcttatctataaagacgtgcaagtctcatgtttctttcaaaaaaaagttttaatactatggtaaaaaatattgtgagtatgtcttgacatttcaaaactgaagtatttcaaaactatagctttcaaatactttgtttccaaataggacctaattgtaaattagtccggtcgattggagtcttcaactatccaccagttgcaaattcaatctataagttaattgtaattttcctttccaatgtattatcaattggaatacccgaatgcttttgaactgccactgtgatttggcggcagctctctcaatatcaccacaggaacaaaggatcagaaatggctatgcaggccgcaaggaggctagcatctttgaaactccaacgacgcctactccttccctctcaggccgagtccccaagcataagcatcccaaccgcagcggcggcggcagccttcctccactcccatgccaccagcttcgggtacaagcaggttcgcgaagaggataagagcaaattggttggcaacgtgttcagcagcgtggcttctagctacgacctcatgaacgatctcatgagtgtcggcctgcataggctgtggaaggacaggcttatttccaagctgaaccccttttcggggatgaagcatctcgatgtggctggtggaacagagctatgcagggtactcttactgaaaccgaagaaggcacccacatttatgtctgtgacattaatccaaatatgctaaatgttgggaaaaagcgtgctgcagaaagaggttatagcgaagaacattgtcttagctggatacaaggagatgcagaagctctgagttttgaggatggatctatggatggttacactatcgcatttgggatcagaaatgtgacgcacattgagaaagctctgtcagaagcttacagggttctaaagcaaggggggaggttcctatgcttggagttgagtcatgtggatgtccctatttttaaagagatttatgatgtttactcgttttctatggttccggctattggagagctggttgctggtgatcggcagtcgtaccaatacttggttgagagcatccgtcggtttccgaatcaggaaaagtttgctcagatgattcaggaagccggattccagagggtggaatatgagaacctcgtgggtggtgtagttgccattcattctggactgaaactgtagagctgaatacggatggatattttttcatacgtgcaccgcttctacaattagtagtatttgttttttaaattaattctataataggttcggtggcttgtaaaagcagctggtgctggctgtcagcatcagcacaataagtagtatttgctaataagtagtatttgcgagaagtatatgctggagcagtagcgtcagtggctattttggcttttaagctagctgacctcttccatttgtaaagttttttcttgaaaacgtgaaaccatccagaacatcaaattagtcttatcacatacctcctgcaatatatttttttgttctaaaaaac

SEQ ID NO: 209922 - DNA, 1378 bp, Zea Mays
atgcagattcccaagtggagttgcggcggctggttatcatttatcatcaccttcgcctcacaccttccggccgcccattccgatccgatccccggccggccacctaccaccggtcagccccatcaatctctgaggcagcgtcagccatcacgcctccctcatcgatctccccgccgccgccgctgctaataccagataatggaggccggcgccgccgctgctgccactgccatctaccctctgcaccgatgcaaaaccatacacctggtgaggcatgcccaaggtgtccacaacgtggaaggcgacacggatcacagcgcctacatgaaacccgacttcttcgacgcgagcatcactcccttgggctggaaccaggttgacctcctgcgagagcatgtgaaggaatctgggcttgcagaaaagattgagctggttatttgttctcctttgtcgaggaccatgcagactgcagtgggagtttttggtggcgaaagctgcagtaatggtgtgagtgtgcctccactgatggtggagaatgctggacgtccggcagtttcaagtttgaactgcccaccatttcttgctgttgaggcctgcagggagcgcttgggtgtccatccttgtgacaagaggaggagcatcacagagtaccgtgctctcttccctgccattgatttttcgctgatagagagtgacgaagatgttctctgggtaccagatgtcagagaaacctttgagtcactcgcagaaaggggtatgaagttcattgactggctatggacaagagaagagagagagatagccatcgtcacccatagcggtttattaagccataccttgcgcatgtacagcaaagagtgccatccaacagtagcacaagaactttgcaaactgcgagctccggtccttggtactggttgacaggagtatgcttggttcagatggccccagttacaacaactaccctggcaaaatgaaaatcccagccggacttgatctgcccagcgatgacaagaagcaacctcttcagaaccagagcggctgagcaggcctgtcttggggcttgtttggtgttcaccaccactgattccttttcttttgtcatcctattttgaaacttccctagctgcagtcagtccattttttgtgaactattctgagagtactattctgaactttcccatttgtggttgttgagcaccatttgtggtactgaacacggccggacggtccaacctgcggacggttcgtctatagacgtggacggtccgtgattagattagatcaggcgtaattaacctcttttccgtacatatttatctatctaaactcgcggattctgttggagaacccttagcaacgagtccagacctctctc

SEQ ID NO: 209923 - DNA, 1508 bp, Zea Mays
  misc_feature (85)..(85): n is a, c, g, or t
atctggagatctcgtatatgtgggtactgtacagagggggagtgctggaagcacagcaattagcttggctactgttgctcctgcntatggttgtaggtgtcatgtgtaaatacccgatgatgctgccatgaaaaggtctcaaataattgaggcgcttggagctactgttgaacgagtgcgccctgtttcaataactcacagagaccattttgtcaacattgccagaagaagggctttagaagcaaacaagttagcagctgcacagagagaatcaagcgagaaacaaactaatggtttaacacatgtcgattctgagatgctggatgacaaattagcggttatgcagagggaatcaaacaagatgcaaaatggtggtccagcacatgtcaatactgaattttcacactgtgggaaatgcgatgtgaattctgattcaaagggaggtttttttgctgaccagtttgagaatttggcaaactatcgagcacattatgaatgtactggtcctgagatttggaaacagactaaaggtaacctgcatgccttcgttgcagcagctggtactggcggtacaattgccggagtctcacgatatcttaaggaaaagaacaggagcatcaaatgttttttaatggaccctcctggatctggtctgttcaataaggttaccagaggggtgatgtacacaaaagaggaggccgaggggaagcggcttaagaacccttttgatactattactgaaggaataggaatcaatagggtcactaaaaatttcatgatggcggaactggatggagcctatcgaggatcagatagggaagctgttgagatgtcaagttcttcagccatgaattgcgttggcgctgtaagagttgctcaagatttgggtccagggcatacaatcgtgacaattctttgtgacagtgggatgagacatttaagcaagttcttcaatgagcagtatttggctgatcatggattgacaccaacagctactggtctggaatttcttgataaatgagcatttcacagggacttttcaatttcaggaagttggcatcctccctgtgactgcgatgataccttgacacaagggtgaacgctgaataggtcaaagcatgaatatatgccatacaaatggtgaacctgatgtgttttaagtactaattgtagtctagtataggcattgccattggataggattgggatagccagtgttttgatccttgttttgatatatatctattgaggctcaggctgttaccagttagaatgctgcactgagcatctttgctgtaaacaactgcaacatatgcattttttttgttaaaaaatgtttcaagaacaattcacccgtattgatcttttgtgttgtacataggccatggcatcactctgcttagtttaagttggtctgtttttttccccattttttctcacttcgtgttgctggatgacattaaattcagctgatcaaagatccagcccagcatatccggtatccctcc

SEQ ID NO: 209924 - DNA, 775 bp, Zea Mays
caatcatcagatgtcgttagtgcacgcaacgattggcattgactttctgtcaaaaacaatgtatctagaagaccgaactgtacgtttacaactctgggatactgcaggacaggagaggtttaggagtcttattccaagctacatcagggactcttctgttgcggtggttgtttatgatgtatccaatagacagtccttcctgaacacctcaaagtggatcgatgaagtgcgcaccgagagaggtggcgatgtgataatcgtgctcgttggcaacaaaactgatcttgtcgacaagagacaagtgtccacagaagaaggagagagcaaggcaaaagaattgaatgtcatgttcatcgagaccagcgcgaaagccggcttcaacatcaagccgttgttccgcaagatcgctgcagccctgccaggaatggagacattgtcagcaaagcaggaggacatggtggatgtcaacctgaagtcgacttctagccagtccaactcgcaacaacaggagggaagtggatgcgcctgctagaagtgtgttagcttcacgcatactttcacttgaagagcgtgtgtcggtaactgttgtataagcagttacatatttcactagtgttactacttactatccttaattctctgatgcttctgtagtgaggctcacatcgttttctcattttccatcttgattttgtatgttgcggcaaaagaccagaaataacaacattttgaatcacaccgggtcttttgtttcgaaataacaattagttatcgg

SEQ ID NO: 209925 - DNA, 1850 bp, Zea Mays
cctccatccctcccgactccgtctccctacccttcccccctccgccgaggcgaccagccccgtcaatccgagactcccacgcaaaccctagccagctagctagccacaccggctgggtccaatggcggaggacggctgcgacagggaccagcagcagcagcagccggcggccgccgcggcgtcaggtggcgccggggtcgaggggcgcagcagggagagcgtcaagctcttcgtggggcaggtgcccaaacagatgtcggaggccgagctggtcgccatgttccgcggcgtcgccctcgtcgacgaggtcacggtcatccgcgacagggccaccagggtctcgcgaggctgctgcttcctgatatgtccatcaagggaggaggctgacaaggctgtgactgcataccacaacaagcgcacactacctggggcctcaagtcccttgcaagtaaaatatgctgatggggagttggaaagattagagcacaagctctttgttggaatgctaccaaaaaatgtaacagatgctgaaatgatagatttattttcaaaatatgggaatatcaaggatttgcagattttgagaggttctcaacaaacgagcaaagctggctgtgcctttctaaaatatgaaacaaaagagcaagctgtggctgctatagaagctctaaatggaacacacaaaatagagggttcaagtgttcccttggttgtcaaatgggctgacactgaaaaggaaaggcaagctcgaaaagcgcaaaaatctccattccagtcttctaacatgttgaatgcaaatgctatgcggcagaattcagtgtttggagctctacagatgggatatgtgccgcagtacaatggatttggctaccagccacaaggaacctacgggcttatgcaatacccacctctatctcctgtgcaaaatcaagctgccttccagaatatggtccagcctattaatcaagcaagctcgacccgtggagctaattctgaacttccccctgatttagttcctagatcatttaattccacacagttgggaagcccctattcgcctctgcctggcttgcagtatcctggagtgtatcctggtggccctattaatcatcgccccttttcaaattctcacagttcaaccaaagttcaaaatttaaatgctaatttaccgtcttcaagtcccagcagcaatcctgccccccagatagagggccctcctggagccaatttgttcatatatcacattccacaagaatttggtgaccatgatcttgcaaatgcatttcatagttttggtagagtactgagtgctaaagtttttgtagacaaggcaactggtgttagtaaatgctttggtttcgtaagctacgattctccagcttctgcacaagcagccattagtgtgatgaatggataccaattaggtggtaaaaagttgaaagttcaactcaagagagacaacagcaagcacagtaaacctttctgacacagcgaattcattgtatgctcacatgatcaggaaaatcggtacatactatgtttcacaattgattattacattgtttcctctggctcttgtatctttgttcaattcacatccttgaaaactgtcacatcgtgtatttttatcgcagcatagttgtagcatttgtaccattagatcttgtacatcagacattaattcattcaattctttatttttaattttcatcatgaatcattttattgtaaataatcttctaggatttacgatatggcatgtttcagtgtttgttgtccttaaccaaatcttacgggtacccagagagtaagaaaagaacaacgctgtttgaggaataataatgttctat

SEQ ID NO: 209926 - DNA, 2520 bp, Zea Mays
cggaggcgtgctgcctccggccgtccgtctctcgggaggggttccttgcttttgagggctcaactttgtgggtgctaagctagttcggggcaatgccgctgaagttgctgttttcctgttcgtgggtgttcatgcggagccgaaaagctagcggatctcgtcattcgctaggaattggctgttttaccagcgatccctgtgcaatgggtgatatgatgcgttcacttggtgttacctcttgttctctctgtgtgttacagaaatgcatgctgtgatgcgacctccctttggtggaggatagctttgaacatcttatagtttgatatgttttatgttggaagttgttttgtttgctcggaggactgctgggacttgaaccctttgactcttttggtacccaaagctggcgtacgatgttgcaaatttgcaatgttttgtttgcttatcttcagtttccatccttctcttttgatgaatttgcaggattagatccacagtttgctgttttgatggactttaggcttttagctcctgccaatactttggatcttgcttcttatcatctgtttttgatcccgtgatgcaaaattttgtgttgattgcttgagatttagttggacctgggctttgatttgagctggttagtttcagttggcccccgaatataggctgcctgtgttttagtacataccaactgataactgaagatgctcttgtatgatttggctaaaatttagggacaacagaatctcacacatgtttgctgtttttgtctatttaagaacatcattggttcaagaattttattagtatacgaccattcaaaactccattgaccgtgttttagtaagagtttggttctttgcaacactacaggggagtggagcttctttattgtgactggtttgaatttttgtggaggctgctgcttcctgatatgtccatcaagggaggaggctgacaaggctgtgactgcataccacaacaagcgcacactacctggggcctcaagtcccttgcaagtaaaatatgctgatggggagttggaaagattagagcacaagctctttgttggaatgctaccaaaaaatgtaacagatgctgaaatgatagatttattttcaaaatatgggaatatcaaggatttgcagattttgagaggttctcaacaaacgagcaaagctggctgtgcctttctaaaatatgaaacaaaagagcaagctgtggctgctatagaagctctaaatggaacacacaaaatagagtttcgaatgaaagatgcttaccgtgattgcaatttgcaaacatcacctatcagccacacattggatggtacttccagtttacatatcattgtgctgggttcaagtgttcccttggttgtcaaatgggctgacactgaaaaggaaaggcaagctcgaaaagcgcaaaaatctccattccagtcttctaacatgttgaatgcaaatgctatgcggcagaattcagtgtttggagctctacagatgggatatgtgccgcagtacaatggatttggctaccagccacaaggaacctacgggcttatgcaatacccacctctatctcctgtgcaaaatcaagctgccttccagaatatggtccagcctattaatcaagcaagctcgacccgtggagctaattctgaacttccccctgatttagttcctagatcatttaattccacacagttgggaagcccctattcgcctctgcctggcttgcagtatcctggagtgtatcctggtggccctattaatcatcgccccttttcaaattctcacagttcaaccaaagttcaaaatttaaatgctaatttaccgtcttcaagtcccagcagcaatcctgccccccagatagagggccctcctggagccaatttgttcatatatcacattccacaagaatttggtgaccatgatcttgcaaatgcatttcatagttttggtagagtactgagtgctaaagtttttgtagacaaggcaactggtgttagtaaatgctttggtttcgtaagctacgattctccagcttctgcacaagcagccattagtgtgatgaatggataccaattaggtggtaaaaagttgaaagttcaactcaagagagacaacagcaagcacagtaaacctttctgacacagcgaattcattgtatgctcacatgatcaggaaaatcggtacatactatgtttcacaattgattattacattgtttcctctggctcttgtatctttgttcaattcacatccttgaaaactgtcacatcgtgtatttttatcgcagcatagttgtagcatttgtaccattagatcttgtacatcagacattaattcattcaattctttatttttaattttcatcatgaatcattttattgtaaataatcttctaggatttacgatatggcatgtttcagtgtttgttgtccttaaccaaatcttacgggtacccagagagtaagaaaagaacaacgctgtttgaggaataataatgttctat

SEQ ID NO: 209927 - DNA, 3613 bp, Zea Mays
cgtgagtcggggactcgggaaccggagcacacaccaaaacccccagtgccgccggcggacgccctccagtttccggtcttcactaactccccgttttccgtactgctgcggcgcctcggcagtcggcaccacagccggcaagatgccccccttccgaatgccttcccacttcctcgcgcttccgctcctactcttgctgctcctccaggcgccgtccccggaggcggccgagtctacgccggggacccggacgcgcaagatcggcagctcgggggcgtcctcggtgttctcgctctttaacctcaaggacaagagcaagttctggactgagtcgatcatccgtaaagagttcgatgacttggaaggttctgcgtcgcgggactctagcaaaaacggcctgctcaacttcacaagagctggtaatattgcaaactatttgagcctggcagaggttgattccatatatcttccgatccctgtgaacttcatctttattggatttgatggaaatggacggcatgagtttaagttggggcctgaagaactggagcgctggtttacaaaaatagatcacatatttgagcacacaagaatccctccagttggtgaagttcttaccccgttctataagactactgttaagaaacttcagcattatgatcttcctttagtcagccatgtgaaccacaatttctctgtgcatgccatacacatgggagaagatgtcttatctgtttttgagcatgctataaaagttctatcctgtaaagatgatctcgtggattccagagaaaatgaagagatttttttgcaagtggatagtgctcaaatggaacatatattttcaactcttgttgatcaccttcagatacaagaggcttacaatatctttgttctgaaccccaagcctattggcaagaggattaattatggttatcggaaaggcttctctgagtctgagatcaatttgctcagggagaacaagaccctgcaagctcggatactccagtctaaaagtgacaacaaactcttccttgatatcgagaagggagtcaatagaaggccgttatatgaaagtcatcctctatcatcattttcatggacccgaactgacagtatggatatgggggattggtcaaagaaatgcaaggaagcattaagcaagtttgagctgctgaaggaagggaagagtaaagaggacattgtttatgaaaaggctgttcagatattacacggtacaaaggatgaggtgcatgacattgttcaaagtgctcttaagtccagtgatttgaagggtctccatgcccaatgtcttacagatatatggataggcagagagagggccatttgcctgggggccttctgttggtggtgatggtgtccgtacagaacttagtctgccaaatgttgcaaagactgtcggggctgttgcagaagttacagaagaagaagctgaagaaaaattgcaagacacaataagggagaggttttcgtcctttggtgaggattaccatgctgttgatattctattagcagagattgatgtgtatgaactttttgctttcaagcattgtgtgggaagaaggatacagcttgccctttgtaaagaacttgatgagaggatgcatgacctgaaaaaggaactggagggttacaatactggagattttgatgaaactaacaagaagaaagctcttgatgcactgaagagaatggaaagctggaacttattcagagatacttcagtggaacatcatagttacacagtggctcatgattcatttcttgcacaacttggatctatgttatggggctctatgaggcatgtaattgctccttctgcctctcatagagtgtaccattactatgagaagttatcgtttcagttgtattttgtgacacgagagaaagtcaggagtataaagcagttacctgttaatgtaaaatccatcagggagagcctgaattctgtgctattacatcatcaaaactccatgtttagccaaaacatgctgtcattgtcagaggatccatcattgatgatggcattttcaatggcacgtcgtgcagctgcggtgccgcttctattagtcaatggcacctataagtcaactgttagcacataccttgattctgctattctccaacatcagctacagaagctaaatgagcacaattcactgaaaggaaggcattcaaatcacaggtcaacattagaggtcccaatattctggttcatacataatgaacccatattattggacaaacattatcaagccaaggctctctcaaatatggtcgtagtagttcagtcagatgatgattcctgggaaagccatttgcagtgcaatggaagacccatcttatgggatttgaggaaaccggttaaagctgctattgctgcaactgctgagtatgtatctggtctacttcctccacatctggtttatagccatgctcatgaaactgcaattgaggactggacctggtctgtgggttgtaatccctcagctgtgacttctgaaggttcacaactttcagagttccagcaagatgtgattgctcgtaactatattattacttcagtggaggaatccattcaagtaatcaattcagcaattcagcaattggtaatagagcggactactgaaaaaggcttcaaaattttcaaggctcacgaaagtaagatggttgagaagtacaatgccgttgttagcttgtggagaagagtatcggctatgtccaagggattgcgatatggtgatgcagtaaaacttatgtcaatgcttgaggatgcttcaaatgggttttctagtgctgtgaactccaccatttcaagtctgcaccctgtccaatgcacccgcgaaaggaaggtcgacgtgcagctagacttgacaacacttcctgcttttctagctgtatttttgttgctttggtttcttctacgtccaaggagaccgaagcctaagatcaactgaacaccgagccaatgagcagcataggccatagagtttttgtgaatacgcgcatggattacagatggcgctggagcatggcccgggaattccaaaggtccaaaacaccgggtggcagggaacaaggtttcagaagattgcaatcctgacacatccccaagttgtagcagagttggaatgtcatgaaaactttaattcattcagtcctgtcctcgttccgggtttagccaattcttcctcgttccgggtaaggccttgttcgtttgtgtcggattggtgggtcggaacaattcccggccggattgcttctctaatttatataaactttgattagccggaacgattccgggtgcaatccgacgcaaacgaacaagccctaactgagattaatttgtccttgctgtaatgtttagccagtcctgccccgatccggggaactgagagattgtctttatcgcaacattaacggctagcggttagtatcatcttccagtcacctggaatgttactagtacaatccaattgtctgtttcctgccgcttacatgtaaaagtccatactcaagttttacagaaagaaacatgttctgtcatttattacaaaataaagccaaatagtaaaatgttatgtgtacgtag

SEQ ID NO: 209928 - DNA, 2624 bp, Zea Mays
cagctacgaaataaagaaatagatatcgagaagggagtcaatagaaggccgttatatgaaagtcatcctctatcatcattttcatggacccgaactgacagtatggatatgggggattggtcaaagaaatgcaaggaagcattaagcaagtttgagctgctgaaggaagggaagagtaaagaggacattgtttatgaaaaggctgttcagatattacacggtacaaaggatgaggtgcatgacattgttcaaagtgctcttaagtccagtgatttgaagggtctccatgcccaatgtcttacagatatatggataggcagagagaggtttgcttttgttgatctgagtgcagggccatttgcctgggggccttctgttggtggtgatggtgtccgtacagaacttagtctgccaaatgttgcaaagactgtcggggctgttgcagaagttacagaagaagaagctgaagaaaaattgcaagacacaataagggagaggttttcgtcctttggtgaggattaccatgctgttgatattctattagcagagattgatgtgtatgaactttttgctttcaagcattgtgtgggaagaaggatacagcttgccctttgtaaagaacttgatgagaggatgcatgacctgaaaaaggaactggagggttacaatactggagattttgatgaaactaacaagaagaaagctcttgatgcactgaagagaatggaaagctggaacttattcagagatacttcagtggaacatcatagttacacagtggctcatgattcatttcttgcacaacttggatctatgttatggggctctatgaggcatgtaattgctccttctgcctctcatagagtgtaccattactatgagaagttatcgtttcagttgtattttgtgacacgagagaaagtcaggagtataaagcagttacctgttaatgtaaaatccatcagggagagcctgaattctgtgctattacatcatcaaaactccatgtttagccaaaacatgctgtcattgtcagaggatccatcattgatgatggcattttcaatggcacgtcgtgcagctgcggtgccgcttctattagtcaatggcacctataagtcaactgttagcacataccttgattctgctattctccaacatcagctacagaagctaaatgagcacaattcactgaaaggaaggcattcaaatcacaggtcaacattagaggtcccaatattctggttcatacataatgaacccatattattggacaaacattatcaagccaaggctctctcaaatatggtcgtagtagttcagtcagatgatgattcctgggaaagccatttgcagtgcaatggaagacccatcttatgggatttgaggaaaccggttaaagctgctattgctgcaactgctgagtatgtatctggtctacttcctccacatctggtttatagccatgctcatgaaactgcaattgaggactggacctggtctgtgggttgtaatccctcagctgtgacttctgaaggttcacaactttcagagttccagcaagatgtgattgctcgtaactatattattacttcagtggaggaatccattcaagtaatcaattcagcaattcagcaattggtaatagagcggactactgaaaaaggcttcaaaattttcaaggctcacgaaagtaagatggttgagaagtacaatgccgttgttagcttgtggagaagagtatcggctatgtccaagggattgcgatatggtgatgcagtaaaacttatgtcaatgcttgaggatgcttcaaatgggttttctagtgctgtgaactccaccatttcaagtctgcaccctgtccaatgcacccgcgaaaggaaggtcgacgtgcagctagacttgacaacacttcctgcttttctagctgtatttttgttgctttggtttcttctacgtccaaggagaccgaagcctaagatcaactgaacaccgagccaatgagcagcataggccatagagtttttgtgaatacgcgcatggattacagatggcgctggagcatggcccgggaattccaaaggtccaaaacaccgggtggcagggaacaaggtttcagaagattgcaatcctgacacatccccaagttgtagcagagttggaatgtcatgaaaactttaattcattcagtcctgtcctcgttccgggtttagccaattcttcctcgttccgggtaaggccttgttcgtttgtgtcggattggtgggtcggaacaattcccggccggattgcttctctaatttatataaactttgattagccggaacgattccgggtgcaatccgacgcaaacgaacaagccctaactgagattaatttgtccttgctgtaatgtttagccagtcctgccccgatccggggaactgagagattgtctttatcgcaacattaacggctagcggttagtatcatcttccagtcacctggaatgttactagtacaatccaattgtctgtttcctgccgcttacatgtaaaagtccatactcaagttttacagaaagaaacatgttctgtcatttattacaaaataaagccaaatagtaaaatgttatgtgtacgtag

SEQ ID NO: 209929 - DNA, 2301 bp, Zea Mays
cctcctgccgattactgcggccgaaacagaagcacacaaagacattcgacgcggggacgacagagcgcacgcgcgaaccgccgccggaccacggcgacgagctcggatcccggcgatctagtcgccggaggtggtcccgatggctcggcggtcgtcttcctcgtcgtcgggggcctggcggtacctgaacccggcgtactacctcaagcggcccaagcgcctcgcgctcctcttcttcatcttcgtcgcggccaccttcgccttctgggaccgccagtcgctcgtcagcgagtacgagtctgagatttctcgattagaagatgatataaatcggttgcatgaccagctaagaagggctggagttcatctggatgaaaatccagtaataagcaacaagaattccagaaaaaatcctgtagaaattgatcatgtcaataatgaaaggcgggaaaaagttaaagaggcaatgctccatgcttggaattcttatgtgaagtacgcctggggaatggatgagcttcagccacaatcgaaggatggcatcaatagttttggtggtcttggagcaacccttgttgactcacttgatacactgtatataatgggcctgaaagatgaatttcagaaagctagagactgggtggcagagtcattagactttgacaaggattatgatgcgagtgtttttgaaacgaccataaggttgcattataagggttgttggaggtttgcttagtgcatatgatctatctggtgataaagtatttcttgataaggctaaagatattacagatcgtctattacctgcttgggatacaacatctggcatcccctataatagaataaacctagctcatggacgagcccataatcctggatggaccaacggtgacagtatccttgcagattctggtacggagcaacttgaattcatagctctgtcacagaggactggggatcccaaataccagcagaaggcagagaacgtcatcacacagcttcagaagatatatcccagtgatggtttgcttcctatttacataaatcctcattctgggacagcatcgtactccactatcacgtttggtgctatgggagatagcttctatgaatatttgctcaaggtctggatccaggggaataaaactgagcatgtaaaacactacagacaaatgtgggagacatcaatggaaggtctattaagtttaacaaagaaaactacaccatctaattactactacatttgtgaaaagaatggtggctcattgtctgacaagatggatgaacttgcttgctttgcccctggtatgctggcattaggagcctctggttatgggccagaaaaatcagagcaaattatgaatatggcaaaagagcttgctaggacctgctataatttctaccaaaccactcccacgaagttggctggcgaaaattattttttccatgctggacaggacatgagtgtgggcacatcgtggaacatcttgagaccggagactgttgaatcacttatgtacctatggcgcttgacggggaatacaacataccaagattgggggtgggacatattccaggcatttgagaagaactcccgtgtagaatctggatatgtgggactgagagatgtgaacactggtgaaaaggataacatgatgcagagcttcttcctggcagagacgctcaagtacctctacctacttttctcccctccatcagtcatatcctttgacgagtgggttttcaatactgaagctcacccattgagaattgctccagtaaattataacaaaagcattggaacaccggtccgtccattcgggagaaaacagggaaagcctgagtaaccttggatatagagcagtggattttttttttaatccgacgtctgactctggcctccctgatgaagatgtgttctgacacgagggaactttctgcctgaagcagcaagggttagaaatcacggcaatagattgtttagagagaaaaatcataggtagatcatgatgctatatgcgaggcagtgacctccatgggtggtatggtcggagctcaagagcccccatagaagcttttatctttggacttgcttacgccccctgatgtgcgttgttgatgtgtagcatacatctaactcactgttcatatgttgttgctttcctgggacctctgcggagctgtattgtcattatttggcccatagttattactttttttcagatatgatttatatatatataagttgtttatggctttcgttaagtacttcgttctcctctggagtcatttactgcttcc

SEQ ID NO: 209930 - DNA, 3672 bp, Zea Mays
accacccccactccaccctctctctccattgtctccattattttctctctcctccgtctccaccccctttattctctctctcccagctcctcctccctgtctgctcccctccacatccactgctgtggcgctctccctctcccgtctccccttaccttctccacctcccccattccgccaccgcacaagccgacctccctcaccaagaggagaaaagaaagggagagcgaaggaggcaaaccaggtgggacagcaacgcgacgtgcttgctattctctctaggagctcatgcaaggtgtaagtcttactgcaagaagggcagctgtgcatgttaagacccatacatagcttctcttgattacacagcacggggggtgaaaacttgagatacagttgatctcctggttcagagtatgggttcaaggtttgcatcgcatcagctgagcaatggcctgtatgtttctggtcgacctgaacaacctaaggagaaggccccaaccatttgttccactgcgatgccatatactgggggtgacatcaagaaatcaggagagctggggaagatgtttgatctccatgttgagaagtcaagaaaatctggtcctctaggaaatgctccttcaaggaatacttcatttggaggtgctgcttccaactctggacccgtatccaatgctggcggtcggtccaattactctggttctctttcatcttcagttcctggtgctggcggatcagccagagcaaaatcaaactctggaccgctcaataagcatggagagccaacaaagaggtcatctggtccccagtctggaggagtgaccccaatggcacgccagaattctggcccccttcctcctgtgcttccgacaactgggcttatcacatctgggcctatctcttcagggccacttaattcgtctggtgttccaaggaaagtatctgggccacttgattctgctgcgtcgatgaaaatgcgggctacttcctttgctcacaatcaagctgttactaatctcaacactgaagatggttactcaattcagggaagctttccgaagccaatactctgggctgtgattctgctctttgtgatgggtttcatagcaggtggtttcattctgggtgctgttcacaatgcaattttgctgatagttgttgtggtgatatttggttttgttgctgcacttcttatctggaatgcttgctggggtagtagaggtgcagttgggtttgttaatcgctatcctgatgctgatctcagaactgctaaagatggacaatatgtaaaggttacaggggttgttacctgtggaaatttcccccttgaatcctcgttccaaagggtcccgagatgtgtatacacttctactagcttgtatgagtacagaggttgggattccaaagctgccaatacagagcatcggcgttttacctggggcttacgctcaatggagcgccatgcggttgatttctatatctcagattttcagtccgggcttcgagcattggtgaaaacaggatatggtgcacgtgtgaccccgtatgtcgatgaatctgttataattgacatcaatccagacaacaaggatatgtcccctgattttttgagatggctacgggagagaaacctttcaagcgatgatcgtacaatgcgcctaaaagaaggtctgagatttctcgattagaagatgatataaatcggttgcatgaccagctaagaagggctggagttcatctggatgaaaatccagtaataagcaacaagaattccagaaaaaatcctgtagaaattgatcatgtcaataatgaaaggcgggaaaaagttaaagaggcaatgctccatgcttggaattcttatgtgaagtacgcctggggaatggatgagcttcagccacaatcgaaggatggcatcaatagttttggtggtcttggagcaacccttgttgactcacttgatacactgtatataatgggcctgaaagatgaatttcagaaagctagagactgggtggcagagtcattagactttgacaaggattatgatgcgagtgtttttgaaacgaccataaggttgcattataagggttgttggaggtttgcttagtgcatatgatctatctggtgataaagtatttcttgataaggctaaagatattacagatcgtctattacctgcttgggatacaacatctggcatcccctataatagaataaacctagctcatggacgagcccataatcctggatggaccaacggtgacagtatccttgcagattctggtacggagcaacttgaattcatagctctgtcacagaggactggggatcccaaataccagcagaaggcagagaacgtcatcacacagcttcagaagatatatcccagtgatggtttgcttcctatttacataaatcctcattctgggacagcatcgtactccactatcacgtttggtgctatgggagatagcttctatgaatatttgctcaaggtctggatccaggggaataaaactgagcatgtaaaacactacagacaaatgtgggagacatcaatggaaggtctattaagtttaacaaagaaaactacaccatctaattactactacatttgtgaaaagaatggtggctcattgtctgacaagatggatgaacttgcttgctttgcccctggtatgctggcattaggagcctctggttatgggccagaaaaatcagagcaaattatgaatatggcaaaagagcttgctaggacctgctataatttctaccaaaccactcccacgaagttggctggcgaaaattattttttccatgctggacaggacatgagtgtgggcacatcgtggaacatcttgagaccggagactgttgaatcacttatgtacctatggcgcttgacggggaatacaacataccaagattgggggtgggacatattccaggcatttgagaagaactcccgtgtagaatctggatatgtgggactgagagatgtgaacactggtgaaaaggataacatgatgcagagcttcttcctggcagagacgctcaagtacctctacctacttttctcccctccatcagtcatatcctttgacgagtgggttttcaatactgaagctcacccattgagaattgctccagtaaattataacaaaagcattggaacaccggtccgtccattcgggagaaaacagggaaagcctgagtaaccttggatatagagcagtggattttttttttaatccgacgtctgactctggcctccctgatgaagatgtgttctgacacgagggaactttctgcctgaagcagcaagggttagaaatcacggcaatagattgtttagagagaaaaatcataggtagatcatgatgctatatgcgaggcagtgacctccatgggtggtatggtcggagctcaagagcccccatagaagcttttatctttggacttgcttacgccccctgatgtgcgttgttgatgtgtagcatacatctaactcactgttcatatgttgttgctttcctgggacctctgcggagctgtattgtcattatttggcccatagttattactttttttcagatatgatttatatatatataagttgtttatggctttcgttaagtacttcgttctcctctggagtcatttactgcttcc

SEQ ID NO: 209931 - DNA, 1340 bp, Zea Mays
tccggttctccggtccgagtccaccgcaccgcgtgcggcggcgtgccgatctccggctcgcctgttacggtggcctcgcgcgcccggtataaaagtacttggattctctcagcctgccctgacaagccaggccactctaccaccgcacgctcaactcaaacccccgtcccgaacgcagaagaccggcggcagcggcgggggtgtgtgtgtgtggactggactgtaaccaattgccatcaatccaggcatccatccatccacccgccccgctgacggcggcaatggcccggctcgtgctctccgagtgctgcggcctcgcgccgctccgccgcctgcgcgccggccggggcgccattgcggcgccgtcaccccccgcgctctccgcggcgccgcgccgtcgtcccgcgtccgcgtccatccaccgcgactgggcgctccgcgtctccgcgcccacccgcctcgcctccgccgccgtcgaggaggacaagccgagcgccgcgccggggcaggaggagggcgcggcggccggcggggagttcgacccgggggcgccgccgccgttcgggctggcggagatccgcgccgccatccccaagcactgctgggtcaaggacccctggcgctccatgagctacgtgctgcgcgacgtcgccgtcgtcctgggcctcgccgcagcggccgcgcgcctcgacagctggctcgtctggccgctctactgggccgcgcagggcaccatgttctgggcgctcttcgtcctcggccacgactgtggacacgggagcttctcgaacaaccccaagttaaacagcgtcgtcggccacatactccattcctccattcttgtgccataccacggatggaggattagccacaggacgcaccatcaaaaccacggtcacgttgagaaggacgagtcctggcacccgctaccagagaggctgtacaaaagcctggactttatgactaggaaactgcggttcaccatgccgttccccttgctcgcgttcccgttatacttgtttgcgaggagtccagggaagtcaggatcacacttcaacccaggcagtgatctgttccaacctactgaaaagaatgacatcataacatcgacggcgtcctggctggccatggttggtgttctggccggtctcacctttctgatgggtcctgttccgatgctaaagctctacggagtcccatacttggtatttgttgcttggctggatatggtcacatacttgcaccatcatggccacgaagacaagcttccctggtaccgtggaaagcgagttgtagaatcataatacatctagtcctagaaatggaagatgcctaaggac

SEQ ID NO: 209932 - DNA, 3193 bp, Zea Mays
ctagctgcagctggtgtggtgtatcttttttcttctctgtgctctagaagattagtattgtagggcttctgtgcagcacccaagcaggaattcagaaagaatgcctggaagcatccacatctcagccactcaaccaccagtcatcacccctctgtttctgcaagtcactgtgggcaacagagaatacagtggaaacatagaacaagatgctttatctttccccgttacatcacttcgggagagtatggtaataatgctgtacagtgcagacggggcattgatatcaaaatcagagctgaagacaaaagagattgtggagtcaggaactatggacacagtatttgctcttgatagcgggggagaaatagttcttcagattcagttcttgctcaacgatgatgaccgcaagcgaatccaagaaatgagaaattctgcgatgaagatgaagcagcaagggctgcttggggatggcaatgaactcaatttttcagacagcgcattgtctaaacggctgacggagaagatttccaacatccgaagcaaagcagctgaacgatctgagcttcagaagagcatgtcactggatgatttgcaagagcgggccgtgttccctggaatcgatgcggatccacgggtgaaggcctcaagggactcgttgctgcaagggggtgtaaggttggaagatcccggtggctccaagcagcggctgagccaggccgaagtcgaagccttggcatcgccggtggaaggggagaggcggcgcctaggcctggacgtagcatccggcggcgggcgaggggtcgtgggagaggcggagcaggaagtcagcgacggggcaggggcagtggatgcgatcagcacgtggccgccggacaggccgggccctggctccaagaaaggggacagcataccagagagcagcaaatcaagtagtgcagtgaagacgatgataagtagctttgaaggcaccaccaccccacagggtatcgtttcagaaaccgactcaggcagccgcagcacgcaggcaggcaaaacagccatcatccctgttgatgatcaccacaaagcttcaaatcacaggtctcagcatatactagtagaaacgatcgcacctgcacaactacaaactattaggacgccaaaagcagccgaaagcagaagccgacgcagagcaagcaagcagcacaacgagctgcatccaagaactaggaggaggtcacaggcaaagcagatgcagatgcagatgcagccaagggactacgtggagcgtcccttgaactatctggttgcgacgtcgagcacctggatacacccgcacatctgcgtcacgggcgcgaccaagcaactgaaagacctccttgagcttgagcacctcaacttccaacgcaccgctactaagggacagcaaggtacccgagagagaaaaagcgacgaatccattgccgccgccgctgctcgggctcgcagcggtggtttcctgatgataaacgggtggctgatagttcagggggtgcgtgctgcagttgtgctcacggtttgctgcggggccatgttcttcagcagcagcagcagatgaagaaatctagcagtgcctacccctaatttttgcatacacaagccacagccacaataatacgacgacctctcctgctcctccgaatcctgaaaccaaccagatcacacgaaccaaaccaccgcctcctcccccgaccggagaggagcctcaccgccggcgcccatggcgacacgctacttgatcgtgtcgctgcccgtgcagtcgcccggcgccaccgccagctccctgtggtcgcgcctccaggactccatctcccgccactccttcgacaccccgctctaccgcttcaacgtcccggatctccgcgtcggcaccctcgactcgctcctcgcgctcagtgacgacctcgtcaagtccaatgtcttcgtggagggcgtgtcacacaagatccggaggcagatcgaggacctcgagcgcgccggaggggtcgagaccgggaccctcaccgtcgacggcgtccccgtcgacacctacctcactaggttcgtgtgggatgagggcaagtaccccacaatgtcccctctcaaggagatcgtcggcagcatacagtcacaggttgccaagatcgaggatgacatgaaggttcgagcatcggaatataataatgtaaggagccagcttagtgcgatcaacaggaagcaaagtgggagcttagcggttcgtgatctttccaatctggtaaaaccggaggatatgatcacctcggaacatctcgtgacacttcttgcaattgttcccaagtactcccaaaaagactggttgtcaagctatgagaaaattgacacattcgtggtacctaggtcatctaaaaagctctatgaagacaatgaatatgctctctacactgtaacactgtttgctaaggttgttgacaattttaaggtccgtgctcgcgagaagggttttcaggtccgtgattttgagtacagtcctgaagcacaggaaagtcggaagcaggagatggagaagctactgcaagaccaagaagccatgaggaccactcttcttcaatggtgctatgccagctacagcgaggtattcagttcctggatgcacttctgtgctgtgcgtgtctttgtagagagcatccttagatatggtctccctccatcattcctgtctgctgttcttgcaccatctacaaagagcgagaagaaagtaaggagcatcttagaggagctctgcggcaatgcccatagtatttattggaaatccgaagacgacgtaggcgtcgccggtctgggaggtgaaacagaggcgcacccttacgtctccttcaccataaattttgtctgagaccggcatgttcctggccgtctgcggcccaggcaatatttcgagcagaactgccataaattctttgttgatttgtcggttcatgtgctcctgtaattcacatcacagagagaccagccgatcaataatgtagtttctgaggacatgtttccctgcagtattgtaccttgggagcgcattgtaaatggcctggaacagttgtctactggatttgtttatttatttacaataaaagccatgtgaaaataagtaactaaaatttggattgtcagttgatgaaaaatggaatgtggagctagctaggctctgggtttgtggcgc

SEQ ID NO: 209933 - DNA, 3270 bp, Zea Mays
ctagctgcagctggtgtggtgtatcttttttcttctctgtgctctagaagattagtattgtagggcttctgtgcagcacccaagcaggaattcagaaagaatgcctggaagcatccacatctcagccactcaaccaccagtcatcacccctctgtttctgcaagtcactgtgggcaacagagaatacagtggaaacatagaacaagatgctttatctttccccgttacatcacttcgggagagtatggtaataatgctgtacagtgcagacggggcattgatatcaaaatcagagctgaagacaaaagagattgtggagtcaggaactatggacacagtatttgctcttgatagcgggggagaaatagttcttcagattcagttcttgctcaacgatgatgaccgcaagcgaatccaagaaatgagaaattctgcgatgaagatgaagcagcaagggctgcttggggatggcaatgaactcaatttttcagacagcgcattgtctaaacggctgacggagaagatttccaacatccgaagcaaagcagctgaacgatctgagcttcagaagagcatgtcactggatgatttgcaagagcgggccgtgttccctggaatcgatgcggatccacgggtgaaggcctcaagggactcgttgctgcaagggggtgtaaggttggaagatcccggtggctccaagcagcggctgagccaggccgaagtcgaagccttggcatcgccggtggaaggggagaggcggcgcctaggcctggacgtagcatccggcggcgggcgaggggtcgtgggagaggcggagcaggaagtcagcgacggggcaggggcagtggatgcgatcagcacgtggccgccggacaggccgggccctggctccaagaaaggggacagcataccagagagcagcaaatcaagtagtgcagtgaagacgatgataagtagctttgaaggcaccaccaccccacagggtatcgtttcagaaaccgactcaggcagccgcagcacgcaggcaggcaaaacagccatcatccctgttgatgatcaccacaaagcttcaaatcacaggtctcagcatatactagtagaaacgatcgcacctgcacaactacaaactattaggacgccaaaagcagccgaaagcagaagccgacgcagagcaagcaagcagcacaacgagctgcatccaagaactaggaggaggtcacaggcaaagcagatgcagatgcagatgcagccaagggactacgtggagcgtcccttgaactatctggttgcgacgtcgagcacctggatacacccgcacatctgcgtcacgggcgcgaccaagcaactgaaagacctccttgagcttgagcacctcaacttccaacgcaccgctactaagggacagcaaggtacccgagagagaaaaagcgacgaatccattgccgccgccgctgctcgggctcgcagcggtggtttcctgatgataaacgggtggctgatagttcagggggtgcgtgctgcagttgtgctcacggtttgctgcggggccatgttcttcagcagcagcagcagatgaagaaatctagcagtgcctacccctaatttttgcatacacaagccacagccacaatgtaattgtcaagttttactgatggatctggctagcactgtaacttacttcaccgaccgacatattatgggtcccacatgcagaatacgacgacctctcctgctcctccgaatcctgaaaccaaccagatcacacgaaccaaaccaccgcctcctcccccgaccggagaggagcctcaccgccggcgcccatggcgacacgctacttgatcgtgtcgctgcccgtgcagtcgcccggcgccaccgccagctccctgtggtcgcgcctccaggactccatctcccgccactccttcgacaccccgctctaccgcttcaacgtcccggatctccgcgtcggcaccctcgactcgctcctcgcgctcagtgacgacctcgtcaagtccaatgtcttcgtggagggcgtgtcacacaagatccggaggcagatcgaggacctcgagcgcgccggaggggtcgagaccgggaccctcaccgtcgacggcgtccccgtcgacacctacctcactaggttcgtgtgggatgagggcaagtaccccacaatgtcccctctcaaggagatcgtcggcagcatacagtcacaggttgccaagatcgaggatgacatgaaggttcgagcatcggaatataataatgtaaggagccagcttagtgcgatcaacaggaagcaaagtgggagcggttcgtgatctttccaatctggtaaaaccggaggatatgatcacctcggaacatctcgtgacacttcttgcaattgttcccaagtactcccaaaaagactggttgtcaagctatgagaaaattgacacattcgtggtacctaggtcatctaaaaagctctatgaagacaatgaatatgctctctacactgtaacactgtttgctaaggttgttgacaattttaaggtccgtgctcgcgagaagggttttcaggtccgtgattttgagtacagtcctgaagcacaggaaagtcggaagcaggagatggagaagctactgcaagaccaagaagccatgaggaccactcttcttcaatggtgctatgccagctacagcgaggtattcagttcctggatgcacttctgtgctgtgcgtgtctttgtagagagcatccttagatatggtctccctccatcattcctgtctgctgttcttgcaccatctacaaagagcgagaagaaagtaaggagcatcttagaggagctctgcggcaatgcccatagtatttattggaaatccgaagacgacgtaggcgtcgccggtctgggaggtgaaacagaggcgcacccttacgtctccttcaccataaattttgtctgagaccggcatgttcctggccgtctgcggcccaggcaatatttcgagcagaactgccataaattctttgttgatttgtcggttcatgtgctcctgtaattcacatcacagagagaccagccgatcaataatgtagtttctgaggacatgtttccctgcagtattgtaccttgggagcgcattgtaaatggcctggaacagttgtctactggatttgtttatttatttacaataaaagccatgtgaaaataagtaactaaaatttggattgtcagttgatgaaaaatggaatgtggagctagctaggctctgggtttgtggcgc

SEQ ID NO: 209934 - DNA, 1427 bp, Zea Mays
gggtcccacatgcagaatacgacgacctctcctgctcctccgaatcctgaaaccaaccagatcacacgaaccaaaccaccgcctcctcccccgaccggagaggagcctcaccgccggcgcccatggcgacacgctacttgatcgtgtcgctgcccgtgcagtcgcccggcgccaccgccagctccctgtggtcgcgcctccaggactccatctcccgccactccttcgacaccccgctctaccgcttcaacgtcccggatctccgcgtcggcaccctcgactcgctcctcgcgctcagtgacgacctcgtcaagtccaatgtcttcgtggagggcgtgtcacacaagatccggaggcagatcgaggacctcgagcgcgccggaggggtcgagaccgggaccctcaccgtcgacggcgtccccgtcgacacctacctcactaggttcgtgtgggatgagggcaagtaccccacaatgtcccctctcaaggagatcgtcggcagcatacagtcacaggttgccaagatcgaggatgacatgaaggttcgagcatcggaatataataatgtaaggagccagcttagtgcgatcaacaggaagcaaagtgggaggtcatctaaaaagctctatgaagacaatgaatatgctctctacactgtaacactgtttgctaaggttgttgacaattttaaggtccgtgctcgcgagaagggttttcaggtccgtgattttgagtacagtcctgaagcacaggaaagtcggaagcaggagatggagaagctactgcaagaccaagaagccatgaggaccactcttcttcaatggtgctatgccagctacagcgaggtattcagttcctggatgcacttctgtgctgtgcgtgtctttgtagagagcatccttagatatggtctccctccatcattcctgtctgctgttcttgcaccatctacaaagagcgagaagaaagtaaggagcatcttagaggagctctgcggcaatgcccatagtatttattggaaatccgaagacgacgtaggcgtcgccggtctgggaggtgaaacagaggcgcacccttacgtctccttcaccataaattttgtctgagaccggcatgttcctggccgtctgcggcccaggcaatatttcgagcagaactgccataaattctttgttgatttgtcggttcatgtgctcctgtaattcacatcacagagagaccagccgatcaataatgtagtttctgaggacatgtttccctgcagtattgtaccttgggagcgcattgtaaatggcctggaacagttgtctactggatttgtttatttatttacaataaaagccatgtgaaaataagtaactaaaatttggattgtcagttgatgaaaaatggaatgtggagctagctaggctctgggtttgtggcgc

SEQ ID NO: 209935 - DNA, 670 bp, Zea Mays
ggcaacaccaacgcaaccacgttacgcaccatagaacatacccgtgagaagctaagacccggccgttgctcaccacagcatcatcgccgcgccgtgctagctcaaggatggagaacaacaggcagcagcagcaggcgccgccgccgccaggctacccgacggcggctgcaggcttggagcaggagcagggaggcaggaagggacgacgccgggagaagacgacctcgcgcggggataaaggcttcatcgaaggatgcatcgcggcgctctgctgctgctggatctgcgagatgtgctgcgactaggcacgcagctagcggtcagctagctctccgtctccggcggctatacatacgaaatacgatgagagagctagcctgccacagcttctgcttctgcttctgcaagagagatctgcttaaattattctatcgtccagagctgcagcaacacctgatatgtttgtttggggtgttattagtagggagagctagctcagctttattattgttaataataattctgtgctgtacgtagctatagcaagcatacgtatgtatacacgtatatgtatgtgttttaccgtgacttgaatgtttggaaatggtgatttcattgccttctttttttggaaacacagtttgccaatgttttcacagcaatctgacat

SEQ ID NO: 209936 - DNA, 1241 bp, Zea Mays
cgcaactcgcaatcgcaacgcaccgcgcggcgctgccgcatcgagagtttttttttttgccgttctgcttttagggttagcggcccgccccggtgatcgcgggagaagggagcatctgtcgccggagtttggggttgctattttgaggctggaggtgtgcttaaactgggaacatccattaatgctgctttcaaaatggcattggaaacttgggcttcatgggtgaaagagagaattgatttaaggcgaacacatgtattcttccgtacatatgaaccgtctcattggagtggcttaaatcaaaaggtgtgtgaagtaacacaacaacctaccgctgaggccaatggaaatgacaggagagaatttggggatatacttgctggtgttgtggcaaatatgagtgtccctgtgacagtactaaatgtgactttgatgggggcctttagaagtgatgctcatattggactttggagtcatcctaataccatactagattgcagccactggtgccttccaggagttcctgatgcttggaatgagcttgtattttcgcaccttttgactaatggttggcgagtgccggctagctgactattgacatggactgcacatctccttggacataaagttttgtactccctccgtcccaaattaaaattcgttttactattttagtagattcatacaataataaatgtatgtgttctatatatatgtatagattcattatcatctatatgaatatagacataaaaatctagagatagagctaaaaatgactatggttttggatcggaggagaatctttttctcttttgtctgtttcggcatagaaacacatcacaactgggaacctgtatgtaacaagagttcatttgcaaaaactttggaaattcacaggacgcatttctgcattcaggtgtgcacggttgtgcaatttcgcagtgtcctgcggtgccgtcgaggttggcttgagctgtggccgccgcctgttgaggctcctccgtttccggttacagctgctccgtgttttagttatataaatatacttttaaaagtaaattataagtcgattagctcattgtttttagctttatcgactttagctcctccgtgtatgatagcaggggccaaaaccacttaaaattataccaaattaaacttaagttaagaagtaataagccatgttcctctgagtttatggattgttttaccttattgggtaggctgaaaaaaggaac

SEQ ID NO: 209937 - DNA, 921 bp, Zea Mays
aactcgcaatcgcaacgcaccgcgcggcgctgccgcatcgagagtttttttttttgccgttctgcttttagggttagcggcccgccccggtgatcgcgggagaagggagcatctgtcgccggagtttggggttgctattttgaggctggaggtgtgcttaaactgggaacatccattaatgctgctttcaaaatggcattggaaacttgggcttcatgggtgaaagagagaattgatttaaggcgaacacatgtattcttccgtacatatgaaccgtctcattggagtggcttaaatcaaaaggtgtgtgaagtaacacaacaacctaccgctgaggccaatggaaatgacaggagagaatttggggatatacttgctggtgttgtggcaaatatgagtgtccctgtgacagtactaaatgtgactttgatgggggcctttagaagtgatgctcatattggactttggagtcatcctaataccatactagattgcagccactggtgccttccaggagttcctgatgcttggaatgagcttgtattttcgcaccttttgactaatggttggcgagtgccggctagctgactattgacatggtgtgcacggttgtgcaatttcgcagtgtcctgcggtgccgtcgaggttggcttgagctgtggccgccgcctgttgaggctcctccgtttccggttacagctgctccgtgttttagttatataaatatacttttaaaagtaaattataagtcgattagctcattgtttttagctttatcgactttagctcctccgtgtatgatagcaggggccaaaaccacttaaaattataccaaattaaacttaagttaagaagtaataagccatgttcctctgagtttatggattgttttaccttattgggtaggctgaaaaaaggaac

SEQ ID NO: 209938 - DNA, 2251 bp, Zea Mays
tttttttttgccgttctgcttttagggttagcggcccgccccggtgatcgcgggagaagggagcatctgtcgccggagtttggtgagtgcctggtctgccctggtgccctggcaccctgcatcggctgtcgttgtatttgtcttcccacgaccgactcagagctccctgatctcaagatctcgagagctgcgcgcggactttgggttggagccgtgcgtatcgatccaactccatccgccgggcaaatttgagtcaggaggaaggatattcatcggcgcttctgaattgggaggacgcagcgcatacgagattcgatgagattttgttgggacacagtttcgccgtgaattggttaggagccgatttggcaacagggaagctctcgaatgggagatccagcggcggcagtggcggcggaggggagatggtgagcggaagctttagccggagcacatccgcgcggctcacgtcgaggggtggagtcgggagcccgcgtgtctcgactcctggagccgtgcaccggaactggtggccgccggcgccgtcggggccgtcgttcgatcgcgtcgtcttggcctttttcctggcctccgtcgcgctcgtgctctcctgcgctctctacctctacgtattccggtacttgggccggagccgtgtggtcgcggagttcgccggcgagaatctcgagtcctgcgacgtgttcgacggcgtctgggtgccggatcagaggcaccccttgtacaacagttcgcagtgcccatttgcagagagggggttcaattgcctggccaatgggcggaaggacaccgagtacctcaagtggcggtggaagcctcggggatgcgatttgccgcggttcagtgcccgggctctgttgcagtggctgagagggaagagggtcgtgtttgtgggggactccatgagtcgaacgcagtgggagtccttcatttgcatgctcatgacaggggtggatgatccagagacggtttatgagatccctgcgcttcgccatgggcgcagaagggtccgtgccatcctgaagcttgataagttggatggtttaagtcaggaatgggtgaactcagatgttcttattttcaactcagggcattggtggactgccagcaaattatttgacatgggttgctattttgaggctggaggtgtgcttaaactgggaacatccattaatgctgctttcaaaatggcattggaaacttgggcttcatgggtgaaagagagaattgatttaaggcgaacacatgtattcttccgtacatatgaaccgtctcattggagtggcttaaatcaaaaggtgtgtgaagtaacacaacaacctaccgctgaggccaatggaaatgacaggagagaatttggggatatacttgctggtgttgtggcaaatatgagtgtccctgtgacagtactaaatgtgactttgatgggggcctttagaagtgatgctcatattggactttggagtcatcctaataccatactagattgcagccactggtgccttccaggagttcctgatgcttggaatgagcttgtattttcgcaccttttgactaatggttggcgagtgccggctagctgactattgacatggactgcacatctccttggacataaagttttgtactccctccgtcccaaattaaaattcgttttactattttagtagattcatacaataataaatgtatgtgttctatatatatgtatagattcattatcatctatatgaatatagacataaaaatctagagatagagctaaaaatgactatggttttggatcggaggagaatctttttctcttttgtctgtttcggcatagaaacacatcacaactgggaacctgtatgtaacaagagttcatttgcaaaaactttggaaattcacaggacgcatttctgcattcaggtgtgcacggttgtgcaatttcgcagtgtcctgcggtgccgtcgaggttggcttgagctgtggccgccgcctgttgaggctcctccgtttccggttacagctgctccgtgttttagttatataaatatacttttaaaagtaaattataagtcgattagctcattgtttttagctttatcgactttagctcctccgtgtatgatagcaggggccaaaaccacttaaaattataccaaattaaacttaagttaagaagtaataagccatgttcctctgagtttatggattgttttaccttattgggtaggctgaaaaaaggaac

SEQ ID NO: 209939 - DNA, 926 bp, Zea Mays
cacgcgttgggcgtatcataatcgcaaaaagctctccacgctctgaagaagcaacggcgacgcctccgacgacgagcacagctgcccagcccagcaaactagcagcgccctcgtcagttccgtctcgttcccaacctctcccggattcgattcgattgacccgtccgctccaaatcgaatctaatcagcagttttggagttgcggaagggagaaagagagaggagaggggcatggatcaggtgctcaacaaggtggggagctactggttcagcaaaagggccagcaaggaaatcgactccatcggcgacgacatcagcacacgagccaaagtggtcatcaataaaggactccacaatggctaccaagaagctagatcctcacaacggtaatgaagatgatggacatgacacccctagaccaccaggaaggaaagccgagaaagataaattgcgagcacgaaagcgagaggacaatgacaatgatgcattgatggaagaactaaaaaaattagagagtcaagattggagatagaaaatgatcgtaatgcacgagaagacaagttattagagccggagagtagtaaacttgatcttgagcgtgaacaacgtgacgacaaggtgatgagaaccgacacaagtacaatggatgatgagtcgaaacaatattttaagttagtgaaagaggaaattttggcgcgatgttttgggagaaagcaagattgaggggtcatgttattagagttgcttttagtcatactgaacagacttgtattttttctgtctcttcaatatagtatttttcctgaaacgactacaagatctgtttcctatatagtatttttttcgctgccattgtttccaattcttatccattcactgatatcttcaacatagtgcacacatgcgtacaatatagagaaaatgtt

SEQ ID NO: 209940 - DNA, 1066 bp, Zea Mays
cgtatcataatcgcaaaaagctctccacgctctgaagaagcaacggcgacgcctccgacgacgagcacagctgcccagcccagcaaactagcagcgccctcgtcagttccgtctcgttcccaacctctcccggattcgattcgattgacccgtccgctccaaatcgaatctaatcagcagttttggagttgcggaagggagaaagagagaggagaggggcatggatcaggtgctcaacaaggtggggagctactggttcagcaaaagggccagcaaggaaatcgactccatcggcgacgacatcagcaaagtaagtctttccaaagttactatgaagccatacaaaggaagaatgaaagtggaaagacaatgaatgacaagattgctgatgctaaagctatgttccaaaccttaagaaaaaaggcttttactttgtttcatgcttggaatattcttagacacgagccaaagtggtcatcaataaaggactccacaatggctaccaagaagctagatcctcacaacggtaatgaagatgatggacatgacacccctagaccaccaggaaggaaagccgagaaagataaattgcgagcacgaaagcgagaggacaatgacaatgatgcattgatggaagaactaaaaaaattagagagtcaagattggagatagaaaatgatcgtaatgcacgagaagacaagttattagagccggagagtagtaaacttgatcttgagcgtgaacaacgtgacgacaaggtgatgagaaccgacacaagtacaatggatgatgagtcgaaacaatattttaagttagtgaaagaggaaattttggcgcgatgttttgggagaaagcaagattgaggggtcatgttattagagttgcttttagtcatactgaacagacttgtattttttctgtctcttcaatatagtatttttcctgaaacgactacaagatctgtttcctatatagtatttttttcgctgccattgtttccaattcttatccattcactgatatcttcaacatagtgcacacatgcgtacaatatagagaaaatgtt

SEQ ID NO: 209941 - DNA, 2000 bp, Zea Mays
cggccttatgcgagaacaactggataagcccatcacccatcgcccatcggcagcagaaggccactgcccggacggagcttccgaaagggaaccgggcagcggcaatggagggacagccgctccatctcctcatcgcccagttccaccacccttgcctacgcggtctcatccccaactaccctacccactacctgcccacctcccgcctccgactccgcgtacagcgtcgcaagccgaagcagctcgccgcagtgccttcgaggcgtccatcgggcagccaagccgacgcgcctggcctggtgccggtgcctaacacggtggcggcgctggtgctccagctgaccgtgtgctcgctcctttttctcttccccaaccgtgcccgagccctcgcgctcccgccccctccgggggccgctgcggtggttgaggcgacgcaggaggaggaggaggaggaccaggagtgggaggctgcgctgcagaagtggaagaccaagacctacgcgctctcggtgcccctccgggtcgtggcgctccgcggctccttccctccatcttggattaaggatttcgtcgaagctcaggggaagagactcaaattcagtcctgagctccgtgctaatcttgatgggatcttctctgagatgtcacaatgtatggacaagggtcaagttcagccgaagtctgcaatggcagctgatgttgtttcccttggggactcttggctcggctatgccatccgcaagggattgctagagcctatcaagaatgctgaagaacaggattggtttcatagcctgagtgacagatggaaggaaccagaacggagaagcagatcctaatggtacaatatggggagttccatacagatggggcaccatggtcattgcttacaagaaagacaagttcaaaagacataatttgaagccaatacagcatattgatcttttatctgtaggattgggaggatttgtggaggcccgagcttgccgggaggatttcaatggtcgattctcctagagaggtgattggtgctgttctgaagcatctgggctcatcatataacacagttgatatggaaatggacgtcaatggtggtagagcagcagtcctaaacagctttacgcaactacagaagcaggtccaactattcgacagcatgaactatctgaagtcgtttagtgttggagatgtatgggtcgcagtgggttggagcagcgacgtgatccctgctgcaaagcgaatgtctaatgtcgcggtggttgttcccaagtcaggcagcagcctatgggctgatctatgggcaataccatgcgcgacgagatttcagactgaccaaatcgggagccgagccagaggcccgtctccactggttcaccagtggttcgacttctgcctgcagagcgcaaggagcctacccttccgccaagacgtcatccccggagcatctccgctccacctcgagagccctgtgccagaggtccctcaagacaagaacaagaggaagccgaagctggacacgaaccttgtcaggggagtgcctccgcccgagatcctggagaggtgcgagtttctggaacccctgtcaggtaaggcgctggaggactaccagtggctgatgtctcgggtgcagagacctcgtcttggtttgtttgggaacatgttgcagaagatgtcagctgtacttgacttcaaaagaagatcttagagccactgtactgtgattgaccaagttttttttttctttttacttcgtggtgcaactcttaacaacgtcctctatattcatcctctatatatgtcctttacagtttcctctaaaagatttcatcctctatatctcatttctctccaacaacgtcctctaaatcacgtcctctatactcaaataatcatattaaagacattttttaattttattttttgtacatacgtatttatcatacttgagcaaatgtattgtacatattttagttttgctaaaccggttatttaaagtagtc

SEQ ID NO: 209942 - DNA, 968 bp, Zea Mays
aaattgagtgaccatggtgcacctatgagcaggcgcgctctcgctcttccgaccttgtcttgagaggaaaaaggtacaatttaggacttagtccagtatgattcctgaccttattgatcggcatagaaaaattctcaatttggcagcaatcaatttctaaagcgtgacaattgggtctgcaggtgctgaattcgtggtattcagaccctcagagattgctgccagtgttgctcttgcggcgatcggggaatgcagcagttctgtaattgagagagctgctactatctgcaactatttggacaaggagagggttttaagatgtcatgaaatgattcaagagaagattgctgtgggaagcattgtcctaaagtctgctggatcatcaatttcctctgtgccacgaagccccataggcgtcctggatgccgctgcctgtctgagtcaacaaagcgatgatgctactgttggatctcctgcagtatgctaccatagttcttccacgagcaagagaagaaggatcactagacgtctactctagttgtggtatgcttcagttgcctgaatggaacaacaaaacatgcacactactcagtgttccatataaagagagagagaaaaataacaagcagcgtcctgcgagccagtgttgcgattccagttcatgcaattggcatccgtaaggggaatgcaagcgcaagacactagagtccagggatgctggtgtaggtagagagggggaacaaggaatttacatacggcatagagatgagagctctctcgtaccattttgtaccttcaattcgcaatgaactttaggcaaggattgccttgggcaattgaacatttgtcgggtgagaagaatccaaagatggatcggcagaggaatagaacaatttgatatatttccataaactacagatatgttttattttttcttaatggtgagctgtcacttgttgatagtaata

SEQ ID NO: 209943 - DNA, 2615 bp, Zea Mays
gtcatagagagccacaggccacaggcaggcaggaggatcggacgagtcagcgaggaagctgcctgctttcagatagagagagttattaagatggcgttgcttcggctgcttgccatctccctgctcttcgcagtggccactcctgtcagggacatcgcccacgatgcctgctcgtcagaagtgaaggatttccagcacctgaacaacagctcggggctccacctgacgctgcaccacccgcagagcccctgctccccggcgccgctgcccgccgacctccccttctccgcggtgctcgcccacgacggcgcgcgcgtcgcgtcgctcgccgcacgcctcgccaagacgccgtcctctcggcccaccttgcttgacgagagccgcgcggggtcgtcgtcgtcgtcgtcccccgatgacgagtcgtccctcgcgtccgtgccgctcggcccgggcacgtccgtcggcgtgggcaactacgtcacccgcatgggcctcggcgttctccatcctggacacgtgcttccagggccaggcggcgcggctgcgcgtgcccgaggtcaccatggccttcgcgggcggcgcggcgctcaagctggccgccaggaacctgctggtggacgtggacagcgccaccacgtgcctggccttcgcgcccgcccggagcgccgccatcatcgggaacacgcagcagcagacgttcagcgtcgtctacgacgtcaagaacagcaagatcgggttcgccgccggcggctgcagctgagaagcgacacctacatacacgcgcatgcacagaccgactcggtaactaaaactaaaacgaacagcgcatgcatgcatctaccgtccggtttcgtctgaaaccatcattaatttcgatcgtccactccacgcacagcaagttctttacggagcttgccgcatatgatatgtacatggtgacaagataaggtacaggagaattgatgaaagaagcgttgccggccagtcgtcgttgcacgagaacaaacacataaattaaaacattattacaggagtagggtatttattgtattgttcaggccagaaaaatatgtggaaagtgggtctttaacttaattcggaagaagcatatagcactccaaaaaaaaaaaaagattcatattcatcacatagccaacagatagcatgtagtagctgttcatgcatgttattcttttggcaagtcctggtcaggaagtactatttactgtgtgtaggacgaataaactgaagtgatgtgtatgtttctgatttctttcgtacttgcaaccccgggcccacgtggtttttttactcccttctatatatactgtggaaaatattgtaacccacgcacaagacacacactcctatgctatatatgttctatgcacaagacacactttgttaacgaacaaagagatcgatgatgcaaatatttatcactatatatatatggctattgttagtttcgtgccttttgcacgatgaatataatggttgaacatgcatgggacgaacaggtggttagcaaatctgtacaagaattcattcacatatcacagtcttcaacgggacaggcctttggattttgatgaggcaaaccaatatctagagaaatgtgaaagagataaatcgcgtgttcttgttcattgcatgactggaaaaaacaggtccgctgctattgttgcagccttcttgatgaagtctagagggtggagacttgcacagtcttttcaatgggtgaaagaccgaagaccacaggttcaactgacagatgcttctcagaaggagcttttggagtatgagctgaagcttttcggacccagtactcaaaccttggttcccactgaatcatttgcttctcttggatttggttatacaaaaccagcaggtgacatgcaaacgcctgtgttcaaccaaacgaccatgccatccatattcgagcgattcaacccaaatgatcgccccgccaatttcacttttggagttgagaggaaagcagaagctaaccctcaagataacaatagtgatggcagggtaaacccaacttcaacggagaacctgatggacagctcttaagatgatttcacgatgtcgctgttcaatctccttgttccagaagtaaacccgctgtaatctgcatgtcgcggaagtaaacctactgctcggtgcctcggcgcaccgaatacttatccggtgtctaggtttcagggaggttttgcccttgtcggatgagaaatggttctctggaaaccgatctttgctttagaatgactgtatgaaatagatgtttgtggctcatctatctgttcctttctcgtatagtttctgattgctattatatggataaggcatagtgcttactgcttaccagtcgggtcgtttatttggtcatgtatatatgtagtcgtccgtaaaaggagaggagagatttttcaggtcggcagctggtggtgacgtgatgagttttagatctttagtccaatgcaacaggagattaagaatctagattatcgcctttttagttcgaaggtttgagaattaatgacagattgataaggtaaacagttatttatttatttattttagtttgtgaacccaactgagtcaatttt

SEQ ID NO: 209944 - DNA, 3818 bp, Zea Mays
gtcatagagagccacaggccacaggcaggcaggaggatcggacgagtcagcgaggaagctgcctgctttcagatagagagagttattaagatggcgttgcttcggctgcttgccatctccctgctcttcgcagtggccactcctgtcagggacatcgcccacgatgcctgctcgtcagaagtgaaggatttccagcacctgaacaacagctcggggctccacctgacgctgcaccacccgcagagcccctgctccccggcgccgctgcccgccgacctccccttctccgcggtgctcgcccacgacggcgcgcgcgtcgcgtcgctcgccgcacgcctcgccaagacgccgtcctctcggcccaccttgcttgacgagagccgcgcggggtcgtcgtcgtcgtcgtcccccgatgacgagtcgtccctcgcgtccgtgccgctcggcccgggcacgtccgtcggcgtgggcaactacgtcacccgcatgggcctcggcacgccagccaagtcgtacgtcatggtcgtggacacggggtcctcgctcacctggctccagtgctccccctgcgtcgtgtcgtgccaccgccagtccgggccggtgttcaaccccaaggcgtccagctcctacacctccgtgtcctgctccgcgcagcagtgcagcgacctcaccaccgccacgctcaaccccgcctcctgctccacatccaacgtctgcatctaccaggccagctacggcgacagctccttctcggtcgggtatctgagcaaggacaccgtgtcgttcggctcgaccagcgttcccaacttctactacggctgcggacaagacaacgagggcctcttcgggcagtcggcggggctcatcggcctggcgcgtaacaagctgtcgctgctgtaccagctggcgccgagcatgggctactccttctcctactgcctcccgacgtcgtcgtcgtcgtcctcggggtacctgtccatcggctcctacaacccggggcagtactcgtacacgcccatggcgtcgagctcgctggacgactcgctctacttcatcaagatgaccgggatcaaggtcgcgggcaagccgctgtccgtgtcgtcgtcggcctactccagcctgccgacgatcatcgactccggcacggtgatcacgcgcctgcctacgggcgtgtactcggcgctcagcaaggcggtggcgggcgccatgaaggggacgccccgcgcgtcggcgttctccatcctggacacgtgcttccagggccaggcggcgcggctgcgcgtgcccgaggtcaccatggccttcgcgggcggcgcggcgctcaagctggccgccaggaacctgctggtggacgtggacagcgccaccacgtgcctggccttcgcgcccgcccggagcgccgccatcatcgggaacacgcagcagcagacgttcagcgtcgtctacgacgtcaagaacagcaagatcgggttcgccgccggcggctgcagctgagaagcgacacctacatacacgcgcatgcacagaccgactcggtaactaaaactaaaacgaacagcgcatgcatgcatctaccgtccggtttcgtctgaaaccatcattaatttcgatcgtccactccacgcacagcaagttctttacggagcttgccgcatatgatatgtacatggtgacaagataaggtacaggagaattgatgaaagaagcgttgccggccagtcgtcgttgcacgagaacaaacacataaattaaaacattattacaggagtagggtatttattgtattgttcaggccagaaaaatatgtggaaagtgggtctttaacttaattcggaagaagcatatagcactccaaaaaaaaaaaaagattcatattcatcacatagccaacagatagcatgtagtagctgttcatgcatgttattcttttggcaagtcctggtcaggaagtactatttactgtgtgtaggacgaataaactgaagtgatgtgtatgtttctgatttctttcgtacttgcaaccccgggcccacgtggtttttttactcccttctatatatactgtggaaaatattgtaacccacgcacaagacacacactcctatgctatatatgttctatgcacaagacacactttgttaacgaacaaagagatcgatgatgcaaatatttatcactatatatatatggctattgttagtttcgtgccttttgcacgatgaatataatggttgaacatgcatgggacgaacaggtggttagcaaatctgtacaagaattcattcacatatcacagtcttcaacgggacaggcctttggattttgatgaggcaaaccaatatctaggtattatctgtttgctctttcagcatttcggagtggaattgtgtacagttagtcgtgaactacatttttccttgtagagttgcccctgtaaaaagcgtgttgctacctgattgaattcgagtagatgtcctctgcatgtcatcctaacaaattccatttttctacctgcctgttgaagtaatgggtttatttgtacctgttttttgattgcttcttccgttcaacctggttgttgtctcttttaagctgggatggacatttgtatatgtacttttgtgttccaggttattttttgtttgtattttgtacataagccttcttcccacatgcttctttctgaagtttccacggataaaaattactttcatggaaaagggaaggggctgtaatatacttctcaagtactgagctattatacctctttattgtcactaatatggtattgtgatttccttctctgcaatttcagagaaatgtgaaagagataaatcgcgtgttcttgttcattgcatgactggaaaaaacaggtccgctgctattgttgcagccttcttgatgaagtctagagggtggagacttgcacagtcttttcaatgggtgaaagaccgaagaccacaggttcaactgacagatgcttctcagaaggagcttttggagtatgagctgaagcttttcggacccagtactcaaaccttggttcccactgaatcatttgcttctcttggatttggttatacaaaaccagcaggtgacatgcaaacgcctgtgttcaaccaaacgaccatgccatccatattcgagcgattcaacccaaatgatcgccccgccaatttcacttttggagttgagaggaaagcagaagctaaccctcaagataacaatagtgatggcagggtaaacccaacttcaacggagaacctgatggacagctcttaagatgatttcacgatgtcgctgttcaatctccttgttccagaagtaaacccgctgtaatctgcatgtcgcggaagtaaacctactgctcggtgcctcggcgcaccgaatacttatccggtgtctaggtttcagggaggttttgcccttgtcggatgagaaatggttctctggaaaccgatctttgctttagaatgactgtatgaaatagatgtttgtggctcatctatctgttcctttctcgtatagtttctgattgctattatatggataaggcatagtgcttactgcttaccagtcgggtcgtttatttggtcatgtatatatgtagtcgtccgtaaaaggagaggagagatttttcaggtcggcagctggtggtgacgtgatgagttttagatctttagtccaatgcaacaggagattaagaatctagattatcgcctttttagttcgaaggtttgagaattaatgacagattgataaggtaaacagttatttatttatttattttagtttgtgaacccaactgagtcaatttt

SEQ ID NO: 209945 - DNA, 1540 bp, Zea Mays
ccaccgcgcagccctgcacggccgcggtcgcctataaggctagcccagccagtggtagcacgcacagcacagcagccgccctgctcggcgtaggagcagcccagagcgagcgagacagagggaaagagacacggccagccagggcgggggaggacgccgcgcagcagcacgcgatgagcggcaggtgggccgcgaggccggcgctcttcaccgcggcgcagtacgaggagctggagcaccaggcgctcatatacaagtacctcgtcgccggcgtgcccgtcccgccggacctcctcctccccctgcgccgaggcttcgtcttccaccagccacccgcccttgggtacgggccctacttcggcaagaaggtggacccggagcccgggcggtgccggcgtacggacggcaagaagtggcggtgctccaaggaggccgccccggactccaagtactgcgagcgccacatgcaccgcggccgcaaccgttcaagaaagcctgtggaagcgcagctcgcgcccccgccgcacgcccagccgcagcagcagcagcaggcccccgcgcccgctgctggcttccagaaccactcgctgtacccgtcgatcctcaccggcaacggcggcggcggggtaggtgctggtgctggtggtggcacgttcggcctggggcccacctctcagctgcacatggacagtgccgctgcctacgcgactgctgccggtggagggagcaaatatctcaggtactctgcatacggggtgaaatctctgtcggacgagcacagcacgctcttgtcgggcggcatggatccgtcgatgatggacaactcgtggcgcctgctgccatcccaaaccaacacattccaagccacaagctaccctgtgttcggcacgctgagtgggctagacgagagcaccatcgcgtcgctgccgaagacccagagggagcccctctctttcttcggcagcgacttcgtaaccgccgccaagcaggagaaccagacgctgcgccctttcttcgacgagtggcccaagtcgagggactcgtggccggagctgggcgaggacagcagcctcggcttctcggccacccagctctccatctccattcccatggcgacctccgacttctccaacaccagctccagatcgccgggtggaataccgtcgagatgaacgagtaccgtgcatgtggatcccagcgtcttagggttgacgactcttcggtgctggcctcgtcgtatcatgctcctaaattttcgaacgatatatgccttatgtaacgctatttctctcattgttacaacaccctttacccgtttggaattgtgttgaagtggatggtctgcgttgctcggttgttcattcgaccttttttcaatttggaaactccgtttctttgtactcagtgatctgtgcaagtgcaatgattcggtccatgcatgtctctggcttgcactgcatgtgaaagattaatcgctgcatgcatcagtaactcgatcgaaaatgttcactgtacctctcgttaccgacttaccgtggac

SEQ ID NO: 209946 - DNA, 2606 bp, Zea Mays
atagcggacgcccccccccccccaagttcccacgagatcccgactcggacgaagctctcctcgccggccaccgtcgcggcagcttgctacgcacagggagtctgcggcgcgcgaggaatacagcgagggatggggtggggcacagtggtttacgagggcgcggtcgtcggctcgtcgctggtggggctcggctgggcggggctgtggttcctgaaccggcggctgtacaaggagtacgaggagcggcgggtgctggtgcagatcctcttcggcctcgtctttgccttctcctgcaacctcttcgagctcgttctcttcgagatcctgcccgtcctctccaagcacgcgcgcttcctcaactggcacctcgacctcttctgcctcatcctcctcctcgtcttcgtactcccctactaccactgctatcttctgctccgtaactcagggatgaggagggaccgggcgtggctcgtcgcggcgctctttctgctggtcttcctatacgggttctggcgcatggggattcacttccccatgccttcaccggagaagggtttctttacgatgccgcagttggtcagtaggattggggtgattggagttagtgtcatggctgttctttctggttttggtgccgtcaatctgccatacagttatctgtcgctattcatcagggaaattgatgaaacagacatcaaaaccttggaacgccagttgatgcaatccatcgagacatgtactgctaagaagaagaaaattattttgtcccagatggagatggagaggattcaaggatcagaggagaagttaaaggccagatcgtttctgaagcgtatagtgggaacagttgttagatctgtgcaggaagatcaaactgagcaggatataaaaaacttagaagcagaagtccaggcactggaagagctttccaaacagctgtttcttgagatatatgaacttcgtcaagctaagatagctgctgcgtattctcgaacttggagaggtcatcttcagaatctacttggatatgctttatcagtctattgtgtttataagatgctcaaggtattactccaaattgcattagtaatttagtatacatcttgcatatattgtttatttgcacattatcaaatcatctcatttcatgtaccataagttatgagtcatgcaggaaacactgaacttgatgggcataaatatgtttaatcactccattttgcaacagttttatctagctttacatgttgctgcaaagattatttttatggaactttgttttcagtcttcgaatcacagtatcacacttcacatttgtgatttaaccttaaatgtattatatttttttttcagtccttgcagagtgtagtctttaaggagtcaggctctgttgatcctgtaacaatgtcaataacgattttcctgagacattttgacattggcattgatgttgcactgttatctcaggtaagtatacaatagctgaaacaaatgcaaaatgaatctggaaattgcccgtatgtagtgtactctacataaataaatgcaatattgggttggcttgttttttcatcgctgacttcttctagttgtatatttattgaggttctgacctttgtcctacttctgccttgtacttgaagtacatatctttgatgttcatcgggatgttggttgtcatatctgttcgaggtttcctggcaaatgttatgaagttcttcttcgctgtttctagagttgggagtgggtcgacaaccaatgttgtccttttcctatcagagatcatgggaatgtacttcatatcttccattcttcttataagaaaaagcctggcaaatgaatatagggtgatcattactgatgtcttgggtggtgatatccaatttgacttctaccatcgctggtttgatgctatatttgtggctagtgcgttcctctccttgcttcttatatctgcccaatacaccaccaggcaaacagacaagcatccgattgattgatgcatcttgcccacaatgtgtgcatgttgtctttttaaccagtattcatccaaggttgacccattctttgtaccacagttttccagagcactgtttctccatacacttccatacacagttacaaaacataataccggctatctgagtcacgtctggtgatgcagtgacgggacacgggattcattgtaatgcagtctgcacgatactactttttgactaggacaattgtggaagcccatattaggaattgattatgactttgtaaaatagcttgaaactagtgtcgtagcaccgtagcacggtatgttggtgtatcttatatatttttttggctgtttcatgtataacacacttcgcgacaactctgaatggtagatagatctgtttcttcatgtgacttcaggatgacaactatatacctgaatccttataggtacgtactttgcaatccgtaagcatatgctcttatattgatgatgtttctttggtgacccatcccatgcatattactccctcggagttccaaaatatagttctttctagctcttttttttcgtccacattcattcgaatgataataaatatagacatacatataaactacaa

SEQ ID NO: 209947 - DNA, 3368 bp, Zea Mays
atagcggacgcccccccccccccaagttcccacgagatcccgactcggacgaagctctcctcgccggccaccgtcgcggcagcttgctacgcacagggagtctgcggcgcgcgaggaatacagcgagggatggggtggggcacagtggtttacgagggcgcggtcgtcggctcgtcgctggtggggctcggctgggcggggctgtggttcctgaaccggcggctgtacaaggagtacgaggagcggcgggtgctggtgcagatcctcttcggcctcgtctttgccttctcctgcaacctcttcgagctcgttctcttcgagatcctgcccgtcctctccaagcacgcgcgcttcctcaactggcacctcgacctcttctgcctcatcctcctcctcgtcttcgtactcccctactaccactgctatcttctgctccgtaactcagggatgaggagggaccgggcgtggctcgtcgcggcgctctttctgctggtcttcctatacgggttctggcgcatggggattcacttccccatgccttcaccggagaagggtttctttacgatgccgcagttggtcagtaggattggggtgattggagttagtgtcatggctgttctttctggttttggtgccgtcaatctgccatacagttatctgtcgctattcatcagggaaattgatgaaacagacatcaaaaccttggaacgccagttgatgcaatccatcgagacatgtactgctaagaagaagaaaattattttgtcccagatggagatggagaggattcaaggatcagaggagaagttaaaggccagatcgtttctgaagcgtatagtgggaacagttgttagatctgtgcaggaagatcaaactgagcaggatataaaaaacttagaagcagaagtccaggcactggaagagctttccaaacagctgtttcttgagatatatgaacttcgtcaagctaaggtatttttgtgtgtgcaatgcatgatatctaattatcaatagtacattttgtagttgtactaattagtggatactccccactactttctcaaccttgttgttcatcctagtatcgtacagatcatctagtagctgtaatcctcatatgggtagtggtgtcgacaccttcaataagtattcagtgatatcgatataactggttctccatagtccatactctatgccataaaatcttagaaaaataacataaatgttctaacaccccctgtttttgtcctatgtagtcttgtagatgagagtgtttttccatggctcatgatctcccacaaaattcacaggacttcacattttgagttaatttctagctatgcgcacataagtatcaaggaattacatcttcatgtatcagtttcacaaaactagaactaattggggcatttgtttcaagcaactacagcattttgcatgtggagacctctgtcagccacacaagttatgtgtggacctatgtcaacttgtgtggctgccatgtggtccaatgccaaatgttgtaggatggtggaattgatggtgcaagtaattgtagttctgtgaactgatcctagaagtcgtagttcctttgtagttagacacaaatagttgtgtttttatgatattaactattttttttgtctcccacacccacactccaaactacaatcctcatgtgttatggaatcttttactttagtgtgtagggacaacagcatcgcagtcctttgagattttgcatcttaaacgtcatttaacagtagtgactattgggcatgtttgatttcagtggatctttcttaggctaagtaatctagctgttgctgtgctctcctgcaattgccatgcagatagctgctgcgtattctcgaacttggagaggtcatcttcagaatctacttggatatgctttatcagtctattgtgtttataagatgctcaaggtattactccaaattgcattagtaatttagtatacatcttgcatatattgtttatttgcacattatcaaatcatctcatttcatgtaccataagttatgagtcatgcaggaaacactgaacttgatgggcataaatatgtttaatcactccattttgcaacagttttatctagctttacatgttgctgcaaagattatttttatggaactttgttttcagtcttcgaatcacagtatcacacttcacatttgtgatttaaccttaaatgtattatatttttttttcagtccttgcagagtgtagtctttaaggagtcaggctctgttgatcctgtaacaatgtcaataacgattttcctgagacattttgacattggcattgatgttgcactgttatctcagtacatatctttgatgttcatcgggatgttggttgtcatatctgttcgaggtttcctggcaaatgttatgaagttcttcttcgctgtttctagagttgggagtgggtcgacaaccaatgttgtccttttcctatcagagatcatgggaatgtacttcatatcttccattcttcttataagaaaaagcctggcaaatgaatatagggtgatcattactgatgtcttgggtggtgatatccaatttgacttctaccatcgctggtttgatgctatatttgtggctagtgcgttcctctccttgcttcttatatctgcccaatacaccaccaggcaaacagacaagcatccgattgattgatgcatcttgcccacaatgtgtgcatgttgtctttttaaccagtattcatccaagttttccagagcactgtttctccatacacttccatacacagttacaaaacataatacgtcagttaacttgaacaaagtctctattttgtaatatgtttcccgattgcattggtttatggtaaacagttcctccaacagcggctatctgagtcacgtctggtgatgcagtgacgggacacgggattcattgtaatgcagtctgcacgatactactttttgactaggacaattgtggaagcccatattaggaattgattatgactttgtaaaatagcttgaaactagtgtcgtagcaccgtagcacggtatgttggtgtatcttatatatttttttggctgtttcatgtataacacacttcgcgacaactctgaatggtagatagatctgtttcttcatgtgacttcaggatgacaactatatacctgaatccttataggtacgtactttgcaatccgtaagcatatgctcttatattgatgatgtttctttggtgacccatcccatgcatattactccctcggagttccaaaatatagttctttctagctcttttttttcgtccacattcattcgaatgataataaatatagacatacatataaactacaa

SEQ ID NO: 209948 - DNA, 2602 bp, Zea Mays
atagcggacgcccccccccccccaagttcccacgagatcccgactcggacgaagctctcctcgccggccaccgtcgcggcagcttgctacgcacagggagtctgcggcgcgcgaggaatacagcgagggatggggtggggcacagtggtttacgagggcgcggtcgtcggctcgtcgctggtggggctcggctgggcggggctgtggttcctgaaccggcggctgtacaaggagtacgaggagcggcgggtgctggtgcagatcctcttcggcctcgtctttgccttctcctgcaacctcttcgagctcgttctcttcgagatcctgcccgtcctctccaagcacgcgcgcttcctcaactggcacctcgacctcttctgcctcatcctcctcctcgtcttcgtactcccctactaccactgctatcttctgctccgtaactcagggatgaggagggaccgggcgtggctcgtcgcggcgctctttctgctggtcttcctatacgggttctggcgcatggggattcacttccccatgccttcaccggagaagggtttctttacgatgccgcagttggtcagtaggattggggtgattggagttagtgtcatggctgttctttctggttttggtgccgtcaatctgccatacagttatctgtcgctattcatcagggaaattgatgaaacagacatcaaaaccttggaacgccagttgatgcaatccatcgagacatgtactgctaagaagaagaaaattattttgtcccagatggagatggagaggattcaaggatcagaggaggcacttactttactagccctgctttatgtttcatagaaaataatcctatattcacattggtttaacatgggaatatactctaggtgaaaaatggtaaaacttaaaatattttaatacatgatattgccatgtttttttatgtggtcatgtattgcaatcaaaggggtgatggattattccatataacactcaatggaacaagtcacaagttcacaacacggttgcaacttgcaagtggcaaattcttttattgtttgttgcataccatgtacagcatgagcgaataaagaatacttacttgcagaagttaaaggccagatcgtttctgaagcgtatagtgggaacagttgttagatctgtgcaggaagatcaaactgagcaggatataaaaaacttagaagcagaagtccaggcactggaagagctttccaaacagctgtttcttgagatatatgaacttcgtcaagctaagatagctgctgcgtattctcgaacttggagaggtcatcttcagaatctacttggatatgctttatcagtctattgtgtttataagatgctcaagtccttgcagagtgtagtctttaaggagtcaggctctgttgatcctgtaacaatgtcaataacgattttcctgagacattttgacattggcattgatgttgcactgttatctcagtacatatctttgatgttcatcgggatgttggttgtcatatctgttcgaggtttcctggcaaatgttatgaagttcttcttcgctgtttctagagttgggagtgggtcgacaaccaatgttgtccttttcctatcagagatcatgggaatgtacttcatatcttccattcttcttataagaaaaagcctggcaaatgaatatagggtgatcattactgatgtcttgggtggtgatatccaatttgacttctaccatcgctggtttgatgctatatttgtggctagtgcgttcctctccttgcttcttatatctgcccaatacaccaccaggcaaacagacaagcatccgattgattgatgcatcttgcccacaatgtgtgcatgttgtctttttaaccagtattcatccaaggtatgtgcttgtcttataaactgcaccaattgactgctctaacttctcttgatattatcccacttgttttgtcaggttgacccattctttgtaccacagttttccagagcactgtttctccatacacttccatacacagttacaaaacataatacgtcagttaacttgaacaaagtctctattttgtaatatgtttcccgattgcattggtttatggtaaacagttcctccaacagcggctatctgagtcacgtctggtgatgcagtgacgggacacgggattcattgtaatgcagtctgcacgatactactttttgactaggacaattgtggaagcccatattaggaattgattatgactttgtaaaatagcttgaaactagtgtcgtagcaccgtagcacggtatgttggtgtatcttatatatttttttggctgtttcatgtataacacacttcgcgacaactctgaatggtagatagatctgtttcttcatgtgacttcaggatgacaactatatacctgaatccttataggtacgtactttgcaatccgtaagcatatgctcttatattgatgatgtttctttggtgacccatcccatgcatattactccctcggagttccaaaatatagttctttctagctcttttttttcgtccacattcattcgaatgataataaatatagacatacatataaactacaa

SEQ ID NO: 209949 - DNA, 2273 bp, Zea Mays
cccgctgctttaaatctcggcgttttcgtggcgcgtgcaggcggagaggaagaggacgccaatccaaatccttatccccacgtgtgttatccttccattttgtgggcgggggtgagctcctgcctcctgccgccctgcttcgcaatcctcctccacctcgacaacgacgccgtcgcacctcgctgctcgccgccacagcggtctcacctcatcagcttgtgtcggccacgggacgcgaccgaggcgagggcgggcagtctttgtccggtcggcgatgcagaccctccgtcccgcgcccgcctccttcctcgtgccgcccgctccccagctcctccgcacagcgccgccaccagccccgagagcaaacgctgctgctcttgccgcggcgtcgcacggctggttcccctcgccgcaccgtgcctgccggcgccgtcgacgcgtgacaaggtctgcgtcgtccggtgcagctagcgccaccgtggcctccgtggatgatgccaagaaggacgtgctcatagcgctctcccaaatcatcgatcctgatttcggcacggacatcgtgtcctgtgggtttatcaaggatttggaggtcagtgaggccttggaagaggtctcatttcgtctggagctgacgactcccgcttgcccaatcaaagacgagttcgaacagaaggcgaacgaggtcgtcgcagcacttccatgggtcaagaaggtagacgtcacaatgtctgcgcaacctgcacagccggtatatggaggggagcttccagaagggctacagaagatctccaacatcatagcagtttcaagctgcaagggaggggtagggaaatcaactgttgctgtaaatcttgcgtacacactagctgggatgggagctcgggttggaatctttgatgctgacgtctttggcccaagcttaccgactatggtttctcctgaaaaccggttgctagtgatgacttacctttagaacccagaaagcaaatatattcttccgaccgagtatttgggcgtcaaaatggtgtccttcgggtttgctggacaaggaagggcgatcatgcggggtccaatggtttcaggagtcatcaatcagctgctgaccactactgactggggtgaacttgactaccttgtcatcgatatgcctcctggaacaggcgacatacacttaacactctgtcaggtggctccattgactgcagcagtgattgttaccacccctcaaaagctggctttcattgatgttgccaagggagtaaggatgttctctaaactgaaggttccttgtgttgcggttgtagagaacatgtgctattttgatgctgatggaaaacgttattacccatttggacaaggttctggaactcaggttgtgcagcagtttggaatacctcacctctttgatttgccaatacggccaactattactgtaatccgattgggatctgaacaagcccctaaataagagagcaaaaatcacagtttggtaagttatgcagctttcggcttccggagatactggaattcctgaggttgtggctgatccgcaaggggatgtggctaatacatttcagaatcttggggcatgtgttgttcaacagtgtgctaaaatcaggcaacaagtttctacagcggtgtcctacgatagatccattaaagcaatcagagtgaaagtgccagattcagacgaagagttcttgctgcatccagcaacagttagacggaatgaccgatccgctcaaagcgtggatgaatggacaggggagcagaaggttcagtacagtgacataccagatgacatcgagccagaagagattaggccgatgggaaactatgcagtttctataacttggcctgatggatttagtcagatagcaccttatgaccaattggaaatgctggagcggttggtggaggctccgagtccagcagcagcgtctgcagtggcctcgtcatgatacagcagaaagaatgttcagttagcaaggggcaagaaggccgacttttagctcccagaaaatttatagctctgctacaaattttgaaagaattttacagtactgtagaaccatgctcattgaattttaaaaaaaggcagcagctttcgttcctcttaaaccattgtgcagacccccgttctcactaaaccacaggctagccttgacaataccaaaccataaaagaaaacggttactgttataaagatagttttttttcccagttatatagaaaattgatataaaactagtgacaaacagaaggtgcatggg

SEQ ID NO: 209950 - DNA, 2354 bp, Zea Mays
cccgctgctttaaatctcggcgttttcgtggcgcgtgcaggcggagaggaagaggacgccaatccaaatccttatccccacgtgtgttatccttccattttgtgggcgggggtgagctcctgcctcctgccgccctgcttcgcaatcctcctccacctcgacaacgacgccgtcgcacctcgctgctcgccgccacagcggtctcacctcatcagcttgtgtcggccacgggacgcgaccgaggcgagggcgggcagtctttgtccggtcggcgatgcagaccctccgtcccgcgcccgcctccttcctcgtgccgcccgctccccagctcctccgcacagcgccgccaccagccccgagagcaaacgctgctgctcttgccgcggcgtcgcacggctggttcccctcgccgcaccgtgcctgccggcgccgtcgacgcgtgacaaggtctgcgtcgtccggtgcagctagcgccaccgtggcctccgtggatgatgccaagaaggacgtgctcatagcgctctcccaaatcatcgatcctgatttcggcacggacatcgtgtcctgtgggtttatcaaggatttggaggtcagtgaggccttggaagaggtctcatttcgtctggagctgacgactcccgcttgcccaatcaaagacgagttcgaacagaaggcgaacgaggtcgtcgcagcacttccatgggtcaagaaggtagacgtcacaatgtctgcgcaacctgcacagccggtatatggaggggagcttccagaagggctacagaagatctccaacatcatagcagtttcaagctgcaagggaggggtagggaaatcaactgttgctgtaaatcttgcgtacacactagctgggatgggagctcgggttggaatctttgatgctgacgtctttggcccaagcttaccgactatggtttctcctgaaaaccggttgctagtgatgaacccagaaagcaaatatattcttccgaccgagtatttgggcgtcaaaatggtgtccttcgggtttgctggacaaggaagggcgatcatgcggggtccaatggtttcaggagtcatcaatcagctgctgaccactactgactggggtgaacttgactaccttgtcatcgatatgcctcctggaacaggcgacatacacttaacactctgtcaggtggctccattgactgcagcagtgattgttaccacccctcaaaagctggctttcattgatgttgccaagggagtaaggatgttctctaaactgaaggttccttgtgttgcggttgtagagaacatgtgctattttgatgctgatggaaaacgttattacccatttggacaaggttctggaactcaggttgtgcagcagtttggaatacctcacctctttgatttgccaatacggccaactggatccaatccaaatactccgattaacagtggtccacccctatagaataatctagggattcaaatggactaatgattaaaatctacaatccagattactgtaatccgattgggatctgaacaagcccctaaataagagagcaaaaatcacagtttggtaagttatgcagctttcggcttccggagatactggaattcctgaggttgtggctgatccgcaaggggatgtggctaatacatttcagaatcttggggcatgtgttgttcaacagtgtgctaaaatcaggcaacaagtttctacagcggtgtcctacgatagatccattaaagcaatcagagtgaaagtgccagattcagacgaagagttcttgctgcatccagcaacagttagacggaatgaccgatccgctcaaagcgtggatgaatggacaggggagcagaaggttcagtacagtgacataccagatgacatcgagccagaagagattaggccgatgggaaactatgcagtttctataacttggcctgatggatttagtcagatagcaccttatgaccaattggaaatgctggagcggttggtggaggctccgagtccagcagcagcgtctgcagtggcctcgtcatgatacagcagaaagaatgttcagttagcaaggggcaagaaggccgacttttagctcccagaaaatttatagctctgctacaaattttgaaagaattttacagtactgtagaaccatgctcattgaattttaaaaaaaggcagcagctttcgttcctcttaaaccattgtgcagacccccgttctcactaaaccacaggctagccttgacaataccaaaccataaaagaaaacggttactgttataaagatagttttttttcccagttatatagaaaattgatataaaactagtgacaaacagaaggtgcatggg

SEQ ID NO: 209951 - DNA, 2185 bp, Zea Mays
cccgctgctttaaatctcggcgttttcgtggcgcgtgcaggcggagaggaagaggacgccaatccaaatccttatccccacgtgtgttatccttccattttgtgggcgggggtgagctcctgcctcctgccgccctgcttcgcaatcctcctccacctcgacaacgacgccgtcgcacctcgctgctcgccgccacagcggtctcacctcatcagcttgtgtcggccacgggacgcgaccgaggcgagggcgggcagtctttgtccggtcggcgatgcagaccctccgtcccgcgcccgcctccttcctcgtgccgcccgctccccagctcctccgcacagcgccgccaccagccccgagagcaaacgctgctgctcttgccgcggcgtcgcacggctggttcccctcgccgcaccgtgcctgccggcgccgtcgacgcgtgacaaggtctgcgtcgtccggtgcagctagcgccaccgtggcctccgtggatgatgccaagaaggacgtgctcatagcgctctcccaaatcatcgatcctgatttcggcacggacatcgtgtcctgtgggtttatcaaggatttggaggtcagtgaggccttggaagaggtctcatttcgtctggagctgacgactcccgcttgcccaatcaaagacgagttcgaacagaaggcgaacgaggtcgtcgcagcacttccatgggtcaagaaggtagacgtcacaatgtctgcgcaacctgcacagccggtatatggaggggagcttccagaagggctacagaagatctccaacatcatagcagtttcaagctgcaagggaggggtagggaaatcaactgttgctgtaaatcttgcgtacacactagctgggatgggagctcgggttggaatctttgatgctgacgtctttggcccaagcttaccgactatggtttctcctgaaaaccggttgctagtgatgaacccagaaagcaaatatattcttccgaccgagtatttgggcgtcaaaatggtgtccttcgggtttgctggacaaggaagggcgatcatgcggggtccaatggtttcaggagtcatcaatcagctgctgaccactactgactggggtgaacttgactaccttgtcatcgatatgcctcctggaacaggcgacatacacttaacactctgtcaggtggctccattgactgcagcagtgattgttaccacccctcaaaagctggctttcattgatgttgccaagggagtaaggatgttctctaaactgaaggttccttgtgttgcggttgtagagaacatgtgctattttgatgctgatggaaaacgttattacccatttggacaaggttctggaactcaggttgtgcagcagtttggaatacctcacctctttgatttgccaatacggccaactctttcggcttccggagatactggaattcctgaggttgtggctgatccgcaaggggatgtggctaatacatttcagaatcttggggcatgtgttgttcaacagtgtgctaaaatcaggcaacaagtttctacagcggtgtcctacgatagatccattaaagcaatcagagtgaaagtgccagattcagacgaagagttcttgctgcatccagcaacagttagacggaatgaccgatccgctcaaagcgtggatgaatggacaggggagcagaaggttcagtacagtgacataccagatgacatcgagccagaagagattaggccgatgggaaactatgcagtttctataacttggcctgatggatttagtcagatagcaccttatgaccaattggaaatgctggagcggttggtggaggctccgagtccagcagcagcgtctgcagtggcctcgtcatgatacagcagaaagaatgttcagttagcaaggggcaagaaggccgacttttagctcccagaaaatttatagctctgctacaaattttgaaagaattttacagtactgtagaaccatgctcattgaattttaaaaaaaggcagcagctttcgttcctcttaaaccattgtgcagacccccgttctcactaaaccacaggctagccttgacaataccaaaccataaaagaaaacggttactgttataaagatagttttttttcccagttatatagaaaattgatataaaactagtgacaaacagaaggtgcatggg

SEQ ID NO: 209952 - DNA, 2194 bp, Zea Mays
cccgctgctttaaatctcggcgttttcgtggcgcgtgcaggcggagaggaagaggacgccaatccaaatccttatccccacgtgtgttatccttccattttgtgggcgggggtgagctcctgcctcctgccgccctgcttcgcaatcctcctccacctcgacaacgacgccgtcgcacctcgctgctcgccgccacagcggtctcacctcatcagcttgtgtcggccacgggacgcgaccgaggcgagggcgggcagtctttgtccggtcggcgatgcagaccctccgtcccgcgcccgcctccttcctcgtgccgcccgctccccagctcctccgcacagcgccgccaccagccccgagagcaaacgctgctgctcttgccgcggcgtcgcacggctggttcccctcgccgcaccgtgcctgccggcgccgtcgacgcgtgacaaggtctgcgtcgtccggtgctagcgccaccgtggcctccgtggatgatgccaagaaggacgtgctcatagcgctctcccaaatcatcgatcctgatttcggcacggacatcgtgtcctgtgggtttatcaaggatttggaggtcagtgaggccttggaagaggtctcatttcgtctggagctgacgactcccgcttgcccaatcaaagacgagttcgaacagaaggcgaacgaggtcgtcgcagcacttccatgggtcaagaaggtagacgtcacaatgtctgcgcaacctgcacagccggtatatggaggggagcttccagaagggctacagaagatctccaacatcatagcagtttcaagctgcaagggaggggtagggaaatcaactgttgctgtaaatcttgcgtacacactagctgggatgggagctcgggttggaatctttgatgctgacgtctttggcccaagcttaccgactatggtttctcctgaaaaccggttgctagtgatgacttacctttagaacccagaaagcaaatatattcttccgaccgagtatttgggcgtcaaaatggtgtccttcgggtttgctggacaaggaagggcgatcatgcggggtccaatggtttcaggagtcatcaatcagctgctgaccactactgactggggtgaacttgactaccttgtcatcgatatgcctcctggaacaggcgacatacacttaacactctgtcaggtggctccattgactgcagcagtgattgttaccacccctcaaaagctggctttcattgatgttgccaagggagtaaggatgttctctaaactgaaggttccttgtgttgcggttgtagagaacatgtgctattttgatgctgatggaaaacgttattacccatttggacaaggttctggaactcaggttgtgcagcagtttggaatacctcacctctttgatttgccaatacggccaactctttcggcttccggagatactggaattcctgaggttgtggctgatccgcaaggggatgtggctaatacatttcagaatcttggggcatgtgttgttcaacagtgtgctaaaatcaggcaacaagtttctacagcggtgtcctacgatagatccattaaagcaatcagagtgaaagtgccagattcagacgaagagttcttgctgcatccagcaacagttagacggaatgaccgatccgctcaaagcgtggatgaatggacaggggagcagaaggttcagtacagtgacataccagatgacatcgagccagaagagattaggccgatgggaaactatgcagtttctataacttggcctgatggatttagtcagatagcaccttatgaccaattggaaatgctggagcggttggtggaggctccgagtccagcagcagcgtctgcagtggcctcgtcatgatacagcagaaagaatgttcagttagcaaggggcaagaaggccgacttttagctcccagaaaatttatagctctgctacaaattttgaaagaattttacagtactgtagaaccatgctcattgaattttaaaaaaaggcagcagctttcgttcctcttaaaccattgtgcagacccccgttctcactaaaccacaggctagccttgacaataccaaaccataaaagaaaacggttactgttataaagatagttttttttcccagttatatagaaaattgatataaaactagtgacaaacagaaggtgcatggg

SEQ ID NO: 209953 - DNA, 2182 bp, Zea Mays
cccgctgctttaaatctcggcgttttcgtggcgcgtgcaggcggagaggaagaggacgccaatccaaatccttatccccacgtgtgttatccttccattttgtgggcgggggtgagctcctgcctcctgccgccctgcttcgcaatcctcctccacctcgacaacgacgccgtcgcacctcgctgctcgccgccacagcggtctcacctcatcagcttgtgtcggccacgggacgcgaccgaggcgagggcgggcagtctttgtccggtcggcgatgcagaccctccgtcccgcgcccgcctccttcctcgtgccgcccgctccccagctcctccgcacagcgccgccaccagccccgagagcaaacgctgctgctcttgccgcggcgtcgcacggctggttcccctcgccgcaccgtgcctgccggcgccgtcgacgcgtgacaaggtctgcgtcgtccggtgctagcgccaccgtggcctccgtggatgatgccaagaaggacgtgctcatagcgctctcccaaatcatcgatcctgatttcggcacggacatcgtgtcctgtgggtttatcaaggatttggaggtcagtgaggccttggaagaggtctcatttcgtctggagctgacgactcccgcttgcccaatcaaagacgagttcgaacagaaggcgaacgaggtcgtcgcagcacttccatgggtcaagaaggtagacgtcacaatgtctgcgcaacctgcacagccggtatatggaggggagcttccagaagggctacagaagatctccaacatcatagcagtttcaagctgcaagggaggggtagggaaatcaactgttgctgtaaatcttgcgtacacactagctgggatgggagctcgggttggaatctttgatgctgacgtctttggcccaagcttaccgactatggtttctcctgaaaaccggttgctagtgatgaacccagaaagcaaatatattcttccgaccgagtatttgggcgtcaaaatggtgtccttcgggtttgctggacaaggaagggcgatcatgcggggtccaatggtttcaggagtcatcaatcagctgctgaccactactgactggggtgaacttgactaccttgtcatcgatatgcctcctggaacaggcgacatacacttaacactctgtcaggtggctccattgactgcagcagtgattgttaccacccctcaaaagctggctttcattgatgttgccaagggagtaaggatgttctctaaactgaaggttccttgtgttgcggttgtagagaacatgtgctattttgatgctgatggaaaacgttattacccatttggacaaggttctggaactcaggttgtgcagcagtttggaatacctcacctctttgatttgccaatacggccaactctttcggcttccggagatactggaattcctgaggttgtggctgatccgcaaggggatgtggctaatacatttcagaatcttggggcatgtgttgttcaacagtgtgctaaaatcaggcaacaagtttctacagcggtgtcctacgatagatccattaaagcaatcagagtgaaagtgccagattcagacgaagagttcttgctgcatccagcaacagttagacggaatgaccgatccgctcaaagcgtggatgaatggacaggggagcagaaggttcagtacagtgacataccagatgacatcgagccagaagagattaggccgatgggaaactatgcagtttctataacttggcctgatggatttagtcagatagcaccttatgaccaattggaaatgctggagcggttggtggaggctccgagtccagcagcagcgtctgcagtggcctcgtcatgatacagcagaaagaatgttcagttagcaaggggcaagaaggccgacttttagctcccagaaaatttatagctctgctacaaattttgaaagaattttacagtactgtagaaccatgctcattgaattttaaaaaaaggcagcagctttcgttcctcttaaaccattgtgcagacccccgttctcactaaaccacaggctagccttgacaataccaaaccataaaagaaaacggttactgttataaagatagttttttttcccagttatatagaaaattgatataaaactagtgacaaacagaaggtgcatggg

SEQ ID NO: 209954 - DNA, 2197 bp, Zea Mays
cccgctgctttaaatctcggcgttttcgtggcgcgtgcaggcggagaggaagaggacgccaatccaaatccttatccccacgtgtgttatccttccattttgtgggcgggggtgagctcctgcctcctgccgccctgcttcgcaatcctcctccacctcgacaacgacgccgtcgcacctcgctgctcgccgccacagcggtctcacctcatcagcttgtgtcggccacgggacgcgaccgaggcgagggcgggcagtctttgtccggtcggcgatgcagaccctccgtcccgcgcccgcctccttcctcgtgccgcccgctccccagctcctccgcacagcgccgccaccagccccgagagcaaacgctgctgctcttgccgcggcgtcgcacggctggttcccctcgccgcaccgtgcctgccggcgccgtcgacgcgtgacaaggtctgcgtcgtccggtgcagctagcgccaccgtggcctccgtggatgatgccaagaaggacgtgctcatagcgctctcccaaatcatcgatcctgatttcggcacggacatcgtgtcctgtgggtttatcaaggatttggaggtcagtgaggccttggaagaggtctcatttcgtctggagctgacgactcccgcttgcccaatcaaagacgagttcgaacagaaggcgaacgaggtcgtcgcagcacttccatgggtcaagaaggtagacgtcacaatgtctgcgcaacctgcacagccggtatatggaggggagcttccagaagggctacagaagatctccaacatcatagcagtttcaagctgcaagggaggggtagggaaatcaactgttgctgtaaatcttgcgtacacactagctgggatgggagctcgggttggaatctttgatgctgacgtctttggcccaagcttaccgactatggtttctcctgaaaaccggttgctagtgatgacttacctttagaacccagaaagcaaatatattcttccgaccgagtatttgggcgtcaaaatggtgtccttcgggtttgctggacaaggaagggcgatcatgcggggtccaatggtttcaggagtcatcaatcagctgctgaccactactgactggggtgaacttgactaccttgtcatcgatatgcctcctggaacaggcgacatacacttaacactctgtcaggtggctccattgactgcagcagtgattgttaccacccctcaaaagctggctttcattgatgttgccaagggagtaaggatgttctctaaactgaaggttccttgtgttgcggttgtagagaacatgtgctattttgatgctgatggaaaacgttattacccatttggacaaggttctggaactcaggttgtgcagcagtttggaatacctcacctctttgatttgccaatacggccaactctttcggcttccggagatactggaattcctgaggttgtggctgatccgcaaggggatgtggctaatacatttcagaatcttggggcatgtgttgttcaacagtgtgctaaaatcaggcaacaagtttctacagcggtgtcctacgatagatccattaaagcaatcagagtgaaagtgccagattcagacgaagagttcttgctgcatccagcaacagttagacggaatgaccgatccgctcaaagcgtggatgaatggacaggggagcagaaggttcagtacagtgacataccagatgacatcgagccagaagagattaggccgatgggaaactatgcagtttctataacttggcctgatggatttagtcagatagcaccttatgaccaattggaaatgctggagcggttggtggaggctccgagtccagcagcagcgtctgcagtggcctcgtcatgatacagcagaaagaatgttcagttagcaaggggcaagaaggccgacttttagctcccagaaaatttatagctctgctacaaattttgaaagaattttacagtactgtagaaccatgctcattgaattttaaaaaaaggcagcagctttcgttcctcttaaaccattgtgcagacccccgttctcactaaaccacaggctagccttgacaataccaaaccataaaagaaaacggttactgttataaagatagttttttttcccagttatatagaaaattgatataaaactagtgacaaacagaaggtgcatggg

SEQ ID NO: 209955 - DNA, 1974 bp, Zea Mays
cgcatgtaaaaaattaaaaaaatatctctaatatagatatttgcttatagaggacatgatttataggacgttgttggagaaaaaggagatatagaggatagaatattttagaaaagactatagatgacagatatagaaacggatatagagtacattgctggtctaacgatgtggctaggccgataacagaaaacctgacctgaacggctgtaggcaaaccagttgggtgacactgacagcaggggcgggcggggccgatggattttttgaatcggattaggcagccacccatttcaagccgaagagaggaggagagccaagcggcgactggacctggagagccggcatggcacgcctgctcctctccgtctcagtccccatgtccgctagcagcagccgccgcattgtggttcctggtaccgcgcggcaccgaggccgcagcggcgtctgtgtcgctgtgcccgccacctccaccgccaccgccacccaacaagaatttgaccccgcggcggcgccaccgttcgggctgggcgacatccgcgccgccatccccaagcactgctgggtgaaggacccctggcgctccatgggctacgtggtgcgcgacgtggtcctggtgctgggtctcgccgccgccgcggcgcgcctcgacagctggctcgtctggccgctctactgggcggcacagggcaccatgttctgggcgctcttcgtgctgggacacgactgcggccacggcagcttctccaacaaccccagactcaacagcgtggtcggtcacattctgcactcctccatccaccagaaccacggccacgtggacaaggacgagtcatggcatcccctccccgagcgtctgttcaagagcctggacagcgtcgtcctgatgctgcgcttcaggctgcccttccctatgctcgtctacccattctacctggccaacaggagccccggcaagtccggctcccatttccacccggccagcgacctcttccagcccagcgagagcaaacaagtgctcacctccacggcgtgctggctcgccatggtcgcactcctagctggcctcgccttcctcatgggccctctgcagatgctcaagctctacctggtcccctactgggtttttgtcatgtggctcgacttcgtcacctacctgcatcatcacggacacaatgacaagcttccatggtaccgaggaaaggaatggacctatcttcggggtggcctgacaacgctcgaccgggactacgggtggatcaacaacatccaccatgacattgggactcatgtcatccaccatctcttcccgcagatcccacactaccatctcatagaggcaacagaggcagccaagccggtgctgggaaattactacagagagccgcaaaagtctggccctctccccttgcatctacttggtgatctggttcagagcttgaggcgtgaccactatgtcagcgacacaggggatgtcgtctactaccaaactgaccccaccattagctgttctggtccattcacttgactaattgagggaggctggaagttatgcgaaacacaaggatcagaggctaccggagagatctgatctatgagccacacacttgcatataacaataagtcaatcattctttgggcaaaacaagctacagtacaatttccagtgctttactatcaggactcattagcacatgcttagctggtactgttgcaagaaagcaatgtgcagtacctccgcttattgctgtcctcacatatgcagtacattatttgcaaaatgtaagtggactacctgcgccttagatctctctgcaaaagttggagacatggggcttttcctgacaaatcatgtattgctgcttgatgacaaaatgagaatattctgacaaaataaataatgcatggaaatagaaaacgaggtaccaagtcttctttctggtccatacagtgcaatgtattaagctgttataa

SEQ ID NO: 209956 - DNA, 1996 bp, Zea Mays
aaaaaattaaaaaaatatctctaatatagatatttgcttatagaggacatgatttataggacgttgttggagaaaaaggagatatagaggatagaatattttagaaaagactatagatgacagatatagaaacggatatagagtacattgctggtctaacgatgtggctaggccgataacagaaaacctgacctgaacggctgtaggcaaaccagttgggtgacactgacagcaggggcgggcggggccgatggattttttgaatcggattaggcagccacccatttcaagccgaagagaggaggagagccaagcggcgactggacctggagagccggcatggcacgcctgctcctctccgtctcagtccccatgtccgctagcagcagccgccgcattgtggttcctggtaccgcgcggcaccgaggccgcagcggcgtctgtgtcgctgtgcccgccacctccaccgccaccgccacccaacaagaatttgaccccgcggcggcgccaccgttcgggctgggcgacatccgcgccgccatccccaagcactgctgggtgaaggacccctggcgctccatgggctacgtggtgcgcgacgtggtcctggtgctgggtctcgccgccgccgcggcgcgcctcgacagctggctcgtctggccgctctactgggcggcacagggcaccatgttctgggcgctcttcgtgctgggacacgactgcggccacggcagcttctccaacaaccccagactcaacagcgtggtcggtcacattctgcactcctccatcctggtgccatacaacggctggcggattagccacaggacgcaccaccagaaccacggccacgtggacaaggacgagtcatggcatcccctccccgagcgtctgttcaagagcctggacagcgtcgtcctgatgctgcgcttcaggctgcccttccctatgctcgtctacccattctacctggccaacaggagccccggcaagtccggctcccatttccacccggccagcgacctcttccagcccagcgagagcaaacaagtgctcacctccacggcgtgctggctcgccatggtcgcactcctagctggcctcgccttcctcatgggccctctgcagatgctcaagctctacctggtcccctactgggtttttgtcatgtggctcgacttcgtcacctacctgcatcatcacggacacaatgacaagcttccatggaatggacctatcttcggggtggcctgacaacgctcgaccgggactacgggtggatcaacaacatccaccatgacattgggactcatgtcatccaccatctcttcccgcagatcccacactaccatctcatagaggcaacagaggcagccaagccggtgctgggaaattactacagagagccgcaaaagtctggccctctccccttgcatctacttggtgatctggttcagagcttgaggcgtgaccactatgtcagcgacacaggggatgtcgtctactaccaaactgaccccaccattagctgttctggtccattcacttgactaattgagggaggctggaagttatgcgaaacacaaggatcagaggctaccggagagatctgatctatgagccacacacttgcatataacaataagtcaatcattctttgggcaaaacaagctacagtacaatttccagtgctttactatcaggactcattagcacatgcttagctggtactgttgcaagaaagcaatgtgcagtacctccgcttattgctgtcctcacatatgcagtacattatttgcaaaatgtaagtggactacctgcgccttagatctctctgcaaaagttggagacatggggcttttcctgacaaatcatgtattgctgcttgatgacaaaatgagaatattctgacaaaataaataatgcatggaaatagaaaacgaggtaccaagtcttctttctggtccatacagtgcaatgtattaagctgttataa

SEQ ID NO: 209957 - DNA, 1594 bp, Zea Mays
accgcgcggcaccgaggccgcagcggcgtctgtgtcgctgtgcccgccacctccaccgccaccgccacccaacaagaatttgaccccgcggcggcgccaccgttcgggctgggcgacatccgcgccgccatccccaagcactgctgggtgaaggacccctggcgctccatgggctacgtggtgcgcgacgtggtcctggtgctgggtctcgccgccgccgcggcgcgcctcgacagctggctcgtctggccgctctactgggcggcacagggcaccatgttctgggcgctcttcgtgctgggacacgactgcggccacggcagcttctccaacaaccccagactcaacagcgtggtcggtcacattctgcactcctccatcctggtgccatacaacggctggcggattagccacaggacgcaccaccagaaccacggccacgtggacaaggacgagtcatggcatcccctccccgagcgtctgttcaagagcctggacagcgtcgtcctgatgctgcgcttcaggctgcccttccctatgctcgtctacccattctacctggccaacaggagccccggcaagtccggctcccatttccacccggccagcgacctcttccagcccagcgagagcaaacaagtgctcacctccacggcgtgctggctcgccatggtcgcactcctagctggcctcgccttcctcatgggccctctgcagatgctcaagctctacctggtcccctactgggtttttgtcatgtggctcgacttcgtcacctacctgcatcatcacggacacaatgacaagcttccatggtaccgaggaaaggaatggacctatcttcggggtggcctgacaacgctcgaccgggactacgggtggatcaacaacatccaccatgacattgggactcatgtcatccaccatctcttcccgcagatcccacactaccatctcatagaggcaaggcagccaagccggtgctgggaaattactacagagagccgcaaaagtctggccctctccccttgcatctacttggtgatctggttcagagcttgaggcgtgaccactatgtcagcgacacaggggatgtcgtctactaccaaactgaccccaccattagctgttctggtccattcacttgactaattgagggaggctggaagttatgcgaaacacaaggatcagaggctaccggagagatctgatctatgagccacacacttgcatataacaataagtcaatcattctttgggcaaaacaagctacagtacaatttccagtgctttactatcaggactcattagcacatgcttagctggtactgttgcaagaaagcaatgtgcagtacctccgcttattgctgtcctcacatatgcagtacattatttgcaaaatgtaagtggactacctgcgccttagatctctctgcaaaagttggagacatggggcttttcctgacaaatcatgtattgctgcttgatgacaaaatgagaatattctgacaaaataaataatgcatggaaatagaaaacgaggtaccaagtcttctttctggtccatacagtgcaatgtattaagctgttataa

SEQ ID NO: 209958 - DNA, 1255 bp, Zea Mays
catttttgtagtgttctgcctgaacactttccatgttttaaacatctgatacattcatacatccaagtgttactttttgtggactgctaagtttgtacgcttgcctgttaaagtaaaatgttaatatgccatagtctgacacttggttagagacatttaacgatcttaaatggttcatttcgtttcgcctgttatttataggttgtctgcacttctagtttttatttgatagaatcatatgatttttttcaggaggttttgtttttcgaggaaggagagcctaagattgatggtgaacctggcgatttgaagttcaggatccgaacagcaccacacgaccgcttcaggcgagatggcaatgacctgcatgcaacagttacaataaccctgctgcaagctctggttggtttcgagaagaccattaaccatcttgataaccatctggtagaaattggcaccaagggcattaccaaacccaaggagatcaggaagttcaaaggtgaaggcatgccactataccaaagcaacaagaaaggtgacctgtatgtgacattcgaggtgttattcccaaaaaccctaaccgatgagcagaagggcaagcttaaggatgttctcgtgtagaccattgtttctcacatctatgctgctgataatttgaggcgagagcgcctcgaggaaatttttctcagtagcttgcataggaagaagctactgctgcgtttcatgtatgtgattttgcattgcaaatactagcagcctgcctggtcttctttttctttcccttttggttttgtcatgcgcccttaacagctcagtgtagttttagaaagcacaacaaaattgtaccagaatatttgtacttacggaattctgaatacatagattgtagaacagctcggttgcttgcatgttctatgcccaatggccgctgctaccggtgtagggatggcaacagggaattccccgccggggaatagctccccgtccccgcgacgaaaaaacttccccgcggggatccccacgaacgcttgcggggagcatttttttcccatccccgttccccgcggggataaatccccaacggggatccccatccccatttaaattacaattaatacatacatactttgctattaatgttaaatattgtcacttatacacattatcagatataagaaatcattatgcatacatcaaaatgaacacatttgtacaattagtggtctcttgataaggtaattatttatttttgtcg

SEQ ID NO: 209959 - DNA, 932 bp, Zea Mays
caggcagctttaaacgcaggaaccaaaaggccacggcgggagacggagaacggcgacgccggcggcgaggaggaggagggatacaacggcgagggagaagctgtctctctccacgcgtgggagcgctaaccctagctgccaacctcgcggaaacaccgggttgtgagcgtcgaagagagaggtgcaacgaggcttctcgaggaggctgggacgggatgacggcgctggggaagggaggggtggcgcggtttgcggccgcgctctttgtcctactgaatctctccgcggcgatcgccgggaagagctactacgacgtgctgcaagtgcccaagggcgcgtccgaggatcagattaagaggtcgtaccgcaagctcgcgctgaagtaccaccccgacaagaaccccgacaacgaggaggccaacaagcgcttcgccgagatcaataacgcttatgaggtgctgacggaccaggagaagaggaagatctatgaccagtatggcgaggagggcttgaagcagttccaaggcgggggaggcggtggcggtggaatgaacattcaggacatctttaggaacttttttggtggtggtggtggtgggatggaagaggaggaagaacaaattttgaaaggtgatgaggtgattgttgaactcgatgcttcattagaggacttgtacatgggcggttcagtaaaggtttggagagagaaaaacgtcataaagccagcaccaggaaagaggcgctgcaactgtaggaacgaagtttaccatcgacaaataggtcctggaatgtatcaacagatgactgagcaggtctgtgaccaatgtccaaatgtgaaattcgtacgagaaggtgaattcttgactgttgatattgagaagggaatgaaagatgcacagacaaactagctggttttctgctttgctagtgtc

SEQ ID NO: 209960 - DNA, 3473 bp, Zea Mays
gtagcagtctctctctcgggccctcggcgtagcagtctgtctgtctctcttcaccctcctcccttcccttcccttcccttctcgcgcctccacaactgcccgcccgcccgcccgcaaacaccatgggcaccacgtacaagtgctgcttcatcttcaagcgccggttccacacccgcgacgcgccgccgcccgaggacgtccgcgcccttttctccgtccacgccggcgggggaccccacatgggcgccgacgatctgcgacgctacctggtggccacgggccaggaggaggccgaggtggagcggctgctggagcagatcgtccagggccgtgcccgcgtcccgcgcctcgcccgcccgctcctctcgctcgacgacttccaccgctacctcttctcgcacgacctcaacccgcccatccgtcacccgcagctcagcagcgactgcagcgatacccccatcatcatggcactggagagaggggtcagggtcatcgagctcgacatgtggccaaattcaaccattgacgacatcaacatcgtgcacggcaggacactgacaaccccagtttctctcatcaaatgcctgagatccatcaagaaacacgcctttgttgcatctccctatcctgtcatcataacacttgaagaccacctcccctctcaactccaggagaaagttgccaagatggttgttgaagtatttggcaacatactgtactacccgccagacgacacccatgagctcaaagaattaccatcacctgaacaactcaaaggacgtgtcctcctctcaacaaagccccccaaggagtacctcgaaaccaagcttagtgactccacgaaggagggtgatgctgacctccatcttggcaaaggaaccggtgatgacgcggtgtggggaaaagaagtaccagattttcggaccgagatccagtctgctgaaaaggacgacgagaacgacgacgttgatgatgaggaagaacaaaaactgcagccccatatagctccacagtataaacaccttattactatcagagcagggaagccaaaagactctctagctgatgccttgaagagtgatccagaaaaagttcggcgtctcagtttgagcgagcaacaacttgccaaagcggcaaaggatcatgccacagaaattgtgaggttcacacagagaaacatactgaggatataccccaagggcactcgagtcacttcatcgaactacaatccgttcgttggttgggtgcatggtgctcaaatggtggcattcaatatgcagggatacgggagagcgctgtggctaatgcacggattttacaaagcgaatggcgggtgcggttatgtgaagaaaccagatttcttgatgcagacagaaccacaagtcttcgacccaagagaaccccagcctgtgaagaaaacgttgaaggtgaaggtgtacatgggcgatgggtggcgaatggacttcaagcagacacacttcgatcagtactctcctccagatttctacacacgggttgggattgctggagtcccagcagactcggtgatgaagaagaccaacgcgatcgaggacaactggaccccggtgtgggagaaggagttcagcttcccgctgactgtcccggagctcgctctgctgcgggtggaggtgcacgagtacgacatgtcggagaaggacgacttcggtggccagacagtgctgccggtgtcggagctgcggcccgggatccgggcggtagcgctcttcgaccgcaaagggatgaagtacaaccatgtgaagcttctcatgcgtttcgagtttgcctagcctgaccctgaccatgcatgcccccccccccccccccccccctcctgttgtgtgaatggatattgcagtctcagtgtgcttcctttgtacatagattgcttggcttggatgatatgtgcaacagacaattccttcagttgttatgatcaaataataaagaggcagcgtccttatgaacaagcgcaaagatgaattgtcaatgcagtatcaacggtccttctgtagtttcagtaaactgacaccttcattgctgctggtgacctgacatatttcagattccacatgagacaactggaggccgaccagacctctcccgggtcccggcgctgaggactgccgcccaggagcagtgaagaaggcaactgtgaagctgcgtgcagcggctgttgggctctattgttagtgatagccctcaagattgggctgtagtttagagaggcgcagcggcctgtagccgcctctgacccgcagcagcgcctccatggctccattgccttctctatcccgactcccgagtcccggcgccatccaggtggagttcgtggcggaggatgagatcgtcgaaatcgtcctcaacatccgcatggacgcccttaacatgatctacgggggatttcgggcccttcttcccacagattcccaccaaggtgccgctctggctcgccgtggcgctcaagaagcgtagcaagtgcaccatccgcaccccggactggatgactgttggtattggaagcggaaggagagtcgcctcgggaattccagccattgccattccactatattgaaatttctaagtgctggtgatgacatctcagatgcatacctggtgaggtctctaattgaggacatcagagatgtcagattccacaaggttaagaatggattagagacgatatctggacgcacctatgccgtaaagctcaaaaatctctctgcaatggaagtgaacattgtccgcccttttcatggtgagaactttgcaggcattctataagcacgatagtccacagatgattcagcaagcagataatgtagggaccagagcaacactagttacagaccgtggcccccagaataagcttcccttgtagatattgtttcaacttgcttgtggattctcggagcttaatacattgcactgtatggaccagaaagaagacttggtacctcgttttctatttccatgcattatttattttgtcagaatattctcattttgtcatcaagcagcaatacatgatttgtcaggaaaagccccatgtctccaacttttgcagagagatctaaggcgcaggtagtccacttacattttgcaaataatgtactgcatatgtgaggacagcaataagcggaggtaggtgacgaagtcgagccacatgacaaaaacccagtaggggaccaggtagagcttgagcatctgcagagggcccatgaggaaggcgaggccagctaggagtgcgaccatggcgagccagcacgccgtggaggtggctagctagggcaggagaggaggcgtacgtacgggatgccatgactcgtccttgtccacgtggccgtggttctggtggatggaggagtgcagaatgtgaccgaccacgctgttgagtctggggttgttggagaagctgccgtggccgcagtcgtgtcccagcacgaagagcgccc

SEQ ID NO: 209961 - DNA, 3753 bp, Zea Mays
gtagcagtctctctctcgggccctcggcgtagcagtctgtctgtctctcttcaccctcctcccttcccttcccttcccttctcgcgcctccacaactgcccgcccgcccgcccgcaaacaccatgggcaccacgtacaagtgctgcttcatcttcaagcgccggttccacacccgcgacgcgccgccgcccgaggacgtccgcgcccttttctccgtccacgccggcgggggaccccacatgggcgccgacgatctgcgacgctacctggtggccacgggccaggaggaggccgaggtggagcggctgctggagcagatcgtccagggccgtgcccgcgtcccgcgcctcgcccgcccgctcctctcgctcgacgacttccaccgctacctcttctcgcacgacctcaacccgcccatccgtcacccgcaggtgcaccacgacatgacgcgcccgctctcccactacttcatctacaccggacacaactcctacctcaccggcaaccagctcagcagcgactgcagcgatacccccatcatcatggcactggagagaggggtcagggtcatcgagctcgacatgtggccaaattcaaccattgacgacatcaacatcgtgcacggcaggacactgacaaccccagtttctctcatcaaatgcctgagatccatcaagaaacacgcctttgttgcatctccctatcctgtcatcataacacttgaagaccacctcccctctcaactccaggagaaagttgccaagatggttgttgaagtatttggcaacatactgtactacccgccagacgacacccatgagctcaaagaattaccatcacctgaacaactcaaaggacgtgtcctcctctcaacaaagccccccaaggagtacctcgaaaccaagcttagtgactccacgaaggagggtgatgctgacctccatcttggcaaaggaaccggtgatgacgcggtgtggggaaaagaagtaccagattttcggaccgagatccagtctgctgaaaaggacgacgagaacgacgacgttgatgatgaggaagaacaaaaactgcagccccatatagctccacagtataaacaccttattactatcagagcagggaagccaaaagactctctagctgatgccttgaagagtgatccagaaaaagttcggcgtctcagtttgagcgagcaacaacttgccaaagcggcaaaggatcatgccacagaaattgtgaggttcacacagagaaacatactgaggatataccccaagggcactcgagtcacttcatcgaactacaatccgttcgttggttgggtgcatggtgctcaaatggtggcattcaatatgcagggatacgggagagcgctgtggctaatgcacggattttacaaagcgaatggcgggtgcggttatgtgaagaaaccagatttcttgatgcagacagaaccacaagtcttcgacccaagagaaccccagcctgtgaagaaaacgttgaaggtgaaggtgtacatgggcgatgggtggcgaatggacttcaagcagacacacttcgatcagtactctcctccagatttctacacacgggttgggattgctggagtcccagcagactcggtgatgaagaagaccaacgcgatcgaggacaactggaccccggtgtgggagaaggagttcagcttcccgctgactgtcccggagctcgctctgctgcgggtggaggtgcacgagtacgacatgtcggagaaggacgacttcggtggccagacagtgctgccggtgtcggagctgcggcccgggatccgggcggtagcgctcttcgaccgcaaagggatgaagtacaaccatgtgaagcttctcatgcgtttcgagtttgcctagcctgaccctgaccatgcatgcccccccccccccccccccccctcctgttgtgtgaatggatattgcagtctcagtgtgcttcctttgtacatagattgcttggcttggatgatatgtgcaacagacaattccttcagttgttatgatcaaataataaagaggcagcgtccttatgaacaagcgcaaagatgaattgtcaatgcagtatcaacggtccttctgtagtttcagtaaactgacaccttcattgctgctggtgacctgacatatttcagattccacatgagacaactggaggccgaccagacctctcccgggtcccggcgctgaggactgccgcccaggagcagtgaagaaggcaactgtgaagctgcgtgcagcggctgttgggctctattgttagtgatagccctcaagattgggctgtagtttagagaggcgcagcggcctgtagccgcctctgacccgcagcagcgcctccatggctccattgccttctctatcccgactcccgagtcccggcgccatccaggttcgtgtgggggcgggcattcatggcagggcaatctgacccgcacctctccatcttctcgccctccgaggtggagttcgtggcggaggatgagatcgtcgaaatcgtcctcaacatccgcatggacgcccttaacatgatctacgggggatttcgggcccttcttcccacagattcccaccaaggtgccgctctggctcgccgtggcgctcaagaagcgtagcaagtgcaccatccgcaccccggactggatgactgttggtattggaagcggaaggagagtcgcctcgggaattccagccattgccattccactatattgaaatttctaagtgctggtgatgacatctcagatgcatacctggtgaggtctctaattgaggacatcagagatgtcagattccacaaggttaagaatggattagagacgatatctggacgcacctatgccgtaaagctcaaaaatctctctgcaatggaagtgaacattgtccgcccttttcatggtgagaactttgcaggcattctataagcacgatagtccacagatgattcagcaagcagataatgtagggaccagagcaacactagttacagaccgtggcccccagaataagcttcccttgtagatattgtttcaacttgcttgtggattctcggaggtagttgtccccataaaaaatgtgccctaagaatcttaagatgttgcgcacaaaatagttccatatcagaaagctggtacatatatataattctattctgattggttggtgacccggtacaatttataacagcttaatacattgcactgtatggaccagaaagaagacttggtacctcgttttctatttccatgcattatttattttgtcagaatattctcattttgtcatcaagcagcaatacatgatttgtcaggaaaagccccatgtctccaacttttgcagagagatctaaggcgcaggtagtccacttacattttgcaaataatgtactgcatatgtgaggacagcaataagcggaggtaggtgacgaagtcgagccacatgacaaaaacccagtaggggaccaggtagagcttgagcatctgcagagggcccatgaggaaggcgaggccagctaggagtgcgaccatggcgagccagcacgccgtggaggtggctagctagggcaggagaggaggcgtacgtacgggatgccatgactcgtccttgtccacgtggccgtggttctggtggatggaggagtgcagaatgtgaccgaccacgctgttgagtctggggttgttggagaagctgccgtggccgcagtcgtgtcccagcacgaagagcgccc

SEQ ID NO: 209962 - DNA, 3160 bp, Zea Mays
gtagcagtctctctctcgggccctcggcgtagcagtctgtctgtctctcttcaccctcctcccttcccttcccttcccttctcgcgcctccacaactgcccgcccgcccgcccgcaaacaccatgggcaccacgtacaagtgctgcttcatcttcaagcgccggttccacacccgcgacgcgccgccgcccgaggacgtccgcgcccttttctccgtccacgccggcgggggaccccacatgggcgccgacgatctgcgacgctacctggtggccacgggccaggaggaggccgaggtggagcggctgctggagcagatcgtccagggccgtgcccgcgtcccgcgcctcgcccgcccgctcctctcgctcgacgacttccaccgctacctcttctcgcacgacctcaacccgcccatccgtcacccgcagctcagcagcgactgcagcgatacccccatcatcatggcactggagagaggggtcagggtcatcgagctcgacatgtggccaaattcaaccattgacgacatcaacatcgtgcacggcaggacactgacaaccccagtttctctcatcaaatgcctgagatccatcaagaaacacgcctttgttgcatctccctatcctgtcatcataacacttgaagaccacctcccctctcaactccaggagaaagttgccaagatggttgttgaagtatttggcaacatactgtactacccgccagacgacacccatgagctcaaagaattaccatcacctgaacaactcaaaggacgtgtcctcctctcaacaaagccccccaaggagtacctcgaaaccaagcttagtgactccacgaaggagggtgatgctgacctccatcttggcaaaggaaccggtgatgacgcggtgtggggaaaagaagtaccagattttcggaccgagatccagtctgctgaaaaggacgacgagaacgacgacgttgatgatgaggaagaacaaaaactgcagccccatatagctccacagtataaacaccttattactatcagagcagggaagccaaaagactctctagctgatgccttgaagagtgatccagaaaaagttcggcgtctcagtttgagcgagcaacaacttgccaaagcggcaaaggatcatgccacagaaattgtgaggttcacacagagaaacatactgaggatataccccaagggcactcgagtcacttcatcgaactacaatccgttcgttggttgggtgcatggtgctcaaatggtggcattcaatatgcagggatacgggagagcgctgtggctaatgcacggattttacaaagcgaatggcgggtgcggttatgtgaaggtgtacatgggcgatgggtggcgaatggacttcaagcagacacacttcgatcagtactctcctccagatttctacacacgggttgggattgctggagtcccagcagactcggtgatgaagaagaccaacgcgatcgaggacaactggaccccggtgtgggagaaggagttcagcttcccgctgactgtcccggagctcgctctgctgcgggtggaggtgcacgagtacgacatgtcggagaaggacgacttcggtggccagacagtgctgccggtgtcggagctgcggcccgggatccgggcggtagcgctcttcgaccgcaaagggatgaagtacaaccatgtgaagcttctcatgcgtttcgagtttgcctagcctgaccctgaccatgcatgcccccccccccccccccccccctcctgttgtgtgaatggatattgcagtctcagtgtgcttcctttgtacatagattgcttggcttggatgatatgtgcaacagacaattccttcagttgttatgatcaaataataaagaggcagcgtccttatgaacaagcgcaaagatgaattgtcaatgcagtatcaacggtccttctgtagtttcagtaaactgacaccttcattgctgctggtgacctgacatatttcagattccacatgagacaactggaggccgaccagacctctcccgggtcccggcgctgaggactgccgcccaggagcagtgaagaaggcaactgtgaagctgcgtgcagcggctgttgggctctattgttagtgatagccctcaagattgggctgtagtttagagaggcgcagcggcctgtagccgcctctgacccgcagcagcgcctccatggctccattgccttctctatcccgactcccgagtcccggcgccatccaggttcgtgtgggggcgggcattcatggcagggcaatctgacccgcacctctccatcttctcgccctccgaggtaaccaaccccttcccttccacactgcactggcagggactatcttcgtctgtgctgctgcaggtggagttcgtggcggaggatgagatcgtcgaaatcgtcctcaacatccgcatggacgcccttaacatgatctacgggggatttcgggcccttcttcccacagattcccaccaaggtgccgctctggctcgccgtggcgctcaagaagcgtagcaagtgcaccatccgcaccccggactggatgactgtattggaagcggaaggagagtcgcctcgggaattccagccattgccattccactatattgaaatttctaaggttctatttgatcatgctggtgatgacatctcagatgcatacctggtgaggtctctaattgaggacatcagagatgtcagattccacaaggttaagaatggattagagacgatatctggacgcacctatgccgtaaagctcaaaaatctctctgcaatggaagtgaacattgtccgcccttttcatggtgagaactttgcaggcattctataagcacgatagtccacagatgattcagcaagcagataatgtagggaccagagcaacactagttacagaccgtggcccccagaataagcttcccttgtagatattgtttcaacttgcttgtggattctcggaggtagttgtccccataaaaaatgtgccctaagaatcttaagatgttgcgcacaaaatagttccatatcagaaagctggtacatatatataattctattctgattggttggtgacccggtacaatttataacagcttaatacattgcactgtatggaccagaaagaagact

SEQ ID NO: 209963 - DNA, 2108 bp, Zea Mays
ccggcacggcagcggtgtagcagtctctctctcgggccctcggcgtagcagtctgtctgtctctcttcaccctcctcccttcccttcccttcccttctcgcgcctccacaactgcccgcccgcccgcccgcaaacaccatgggcaccacgtacaagtgctgcttcatcttcaagcgccggttccacacccgcgacgcgccgccgcccgaggacgtccgcgcccttttctccgtccacgccggcgggggaccccacatgggcgccgacgatctgcgacgctacctggtggccacgggccaggaggaggccgaggtggagcggctgctggagcagatcgtccagggccgtgcccgcgtcccgcgcctcgcccgcccgctcctctcgctcgacgacttccaccgctacctcttctcgcacgacctcaacccgcccatccgtcacccgcaggtgcaccacgacatgacgcgcccgctctcccactacttcatctacaccggacacaactcctacctcaccggcaaccagctcagcagcgactgcagcgatacccccatcatcatggcactggagagaggggtcagggtcatcgagctcgacatgtggccaaattcaaccattgacgacatcaacatcgtgcacggcaggacactgacaaccccagtttctctcatcaaatgcctgagatccatcaagaaacacgcctttgttgcatctccctatcctgtcatcataacacttgaagaccacctcccctctcaactccaggagaaagttgccaagatggttgttgaagtatttggcaacatactgtactacccgccagacgacacccatgagctcaaagaattaccatcacctgaacaactcaaaggacgtgtcctcctctcaacaaagccccccaaggagtacctcgaaaccaagcttagtgactccacgaaggagggtgatgctgacctccatcttggcaaaggaaccggtgatgacgcggtgtggggaaaagaagtaccagattttcggaccgagatccagtctgctgaaaaggacgacgagaacgacgacgttgatgatgaggaagaacaaaaactgcagccccatatagctccacagtataaacaccttattactatcagagcagggaagccaaaagactctctagctgatgccttgaagagtgatccagaaaaagttcggcgtctcagtttgagcgagcaacaacttgccaaagcggcaaaggatcatgccacagaaattgtgagcttcctctgttccaaatccaaataggttcacacagagaaacatactgaggatataccccaagggcactcgagtcacttcatcgaactacaatccgttcgttggttgggtgcatggtgctcaaatggtggcattcaatatgcagggatacgggagagcgctgtggctaatgcacggattttacaaagcgaatggcgggtgcggttatgtgaagaaaccagatttcttgatgcagacagaaccacaagtcttcgacccaagagaaccccagcctgtgaagaaaacgttgaaggtgaaggtgtacatgggcgatgggtggcgaatggacttcaagcagacacacttcgatcagtactctcctccagatttctacacacgggttgggattgctggagtcccagcagactcggtgatgaagaagaccaacgcgatcgaggacaactggaccccggtgtgggagaaggagttcagcttcccgctgactgtcccggagctcgctctgctgcgggtggaggtgcacgagtacgacatgtcggagaaggacgacttcggtggccagacagtgctgccggtgtcggagctgcggcccgggatccgggcggtagcgctcttcgaccgcaaagggatgaagtacaaccatgtgaagcttctcatgcgtttcgagtttgcctagcctgaccctgaccatgcatgcccccccccccccccccccccctcctgttgtgtgaatggatattgcagtctcagtgtgcttcctttgtacatagattgcttggcttggatgatatgtgcaacagacaattccttcagttgttatgatcaaataataaagaggcagcgtccttatgaacaag

SEQ ID NO: 209964 - DNA, 2278 bp, Zea Mays
attggttctcctgatggtcctgtttcactagacgatgtccgaagactagaaaaatctaatgctggaacaacttgaggctcatgttgtgacaattgaaactttgagggctgaaataaaaacgacccaagtgcagcatggaaaggaacttgaggagttgagagaaactacgtcgagttcttatcttgatcaaactaaatctctccagtccacacttgaggagaaacagaagcaaatagattcactcagtacatcaaatacagagttacagaactctataaaagatctggatgaaaggcttggtgcatctaaacaatcacgcgcggatgctgatgagataatttcaagccagaaagcaatcatccgtgagcttgaggaacagctaagtgaggagcgcaacttaagaagagaagagcgtgataaggctgcacatgacttgaaatttgcagtgcataaagtgcaagccgaggctcaagaagaaattaagaaacaagcagagtcttaccttagacaacaaagagaacagaaagaagttattaacaagcttcaggaatcagaaaaagaaacacgtttgtttgtggaaactttgaggtccaagttggaagatgctcgagataatcttgtaacatctgagaaaaaagtaagagagctggaagctcagtttcaggacgagcagctagtatcagccaacaatcgaaagaaatcagaaaatctggaaactgaattgagaaaactgaagaaggaacttgagaatgagaaggctgctcgagaagaagcatgggcaaaggtctcagctcttgagcttgaaatagctgcaacgattagagatctatcaattgagaaacagaggtatcaaggggctagagaacggattattctacgggagactcagctgcgtgctttctattcaactacagaagaaatctcttctctgtttgcgaagcagcaggaacagctgaaagctatgcagagaactttggaggatgaggagaactatgagagcaccttaatgagtgtggatctcaataaagagcatctagccattgataatgctggtatgaagccagtaaactgctcaaaaaatacactgggagcttcaattgcttcaccagaaaatactcaggtaagtgaacatagttccagtgacgaagatgccaacatgactgagcagcaagatgatgatgttactgccaatggtggcaacactcaagatctagaatgcaccagtccagaaaggtcagtggagaggaggccgggttttcatggcaatcctgttcctacagctcctgagagggaagtaacagatactgagcaagttcctgagacagaaagcgaagctggtaatgttggttgcgatgaccaaagatgtgacaatatcggaggagagactatgccgctagaggacgaagtgctgcttccagagaacgaggagcctactgcattgctcaaagatgcagggcagccacaatcaaatatggttcctattccaattctcgatgatggcggcggccactgttcagaagaaaaacacgagggtgcttgctctgagagcaaacgggatgacacacatgttggagctatcagaacgggtgatctgttggcctcagaagttgctggcagctgggcagtggaaacagctccatctgtcaatggggagaacgaatctccaaggagcttgggagatgctacagagcgagatgaagatggaggtagcgtggcagctgatgctttgctaactttggtgaactcagagggccaggcggctgggagccagaataatgttgagcaggccagttccaaaataaccgatgatcgccgtgttcttagtgccatgattgggattgttgatcctgaattcaggaagcaaatgtccaggagtggagctggaaacgaggagccgatgtctgacgctgagacggatgaaggcgtcgaggaaggtgattcagattcaggttcagatggcagcgacagcgacagcgaggaggctatggttgaggattctgttgggtagcttaaacggaattgactgctcactgtaaatatctcaattcgttcgtgcaccattcgctgtatgagcttgtattatgcgtagtgtagcagtatttgttttttattctttaaatgtttttagcagctcgtggtgttgtacgaaatggatgccgtttggtcttcaacacaaaataaagacattcaaactataaaaggatttggctttttatatacagttgattttctatatattcagacataatatagaaaagtcaaaaataactcaagaata

SEQ ID NO: 209965 - DNA, 1360 bp, Zea Mays
gacgacggagcaccgggacgagggatgcgcgaaacacacgtcgacgttcgtgttttattggcgcgttcgcttgtccgctttgccatctctgatctcgggcgaaccacacatcactggacagtttcgacggccgtcaagtacagaggacacgcagagagccgcaaaagcacagcccgcggcgcatgcgccgatccgaacccagaaatcttccattccaagctctcagaagtcgcagtcgcttcgcttctctctcgttcgctcggttcccctcgtctcgctctcgcccgtcgcccctcccgggacaagaaagcaacggaacatcgcggaaagcgagagccggcctgacctgtcctcactcgacctgcgctagccgactgtctgaagttttgcccccccttttctccttcccttttgggccgtgggccggccgcgcgccccggcgcatggcgtcgtcgcgggtgatggcgtcctcgtccccgccgcagcacgccggcgccggctcgtcctcggacctagcgcgattcaggagcagcggcggcatcggatccatgaacatggacaacattatgcgtgaaatctacggccccgaggccgtcaacgccaccgtcaacggccgggtggagccctccccggcggccccggaggctgctgcccggcggacgtcggaggaggtgtggaaggagatctccgccgccggggggctctccgctcccgtcctccctccccctcccgccgccagcaccggcgccggggccagaggcggcggcggcggcgcctcggagatgacgctggaggatttcctcgccagggattcctgcgccatggcggcggtgatggagggggacatggcgctagggttccctaactgtgaaggagacgcggcagggagcgtggcgggggaagcaggcggcgggaggggaagcaggaagcgggctcttctggatcccgcggaccgtgccgtcatgcagcggcagaagcgcatgatcaagaaccgagagtccgcagcgaggtctagggacaggaaacaggcctatatcgcggagctggaatcgcaggttatgcagctggaggagtatcaagcggaactgttaacggagcaggaggaccgacgccaaaagagacttaaggagctagttgaaagggtagttccagtcatcaggaaaaaatcaccacaagatcttagaagaaacaactccatggaatgattccaaaatctcaggttaaagtggcattccgtagagaaagcatggttagcgctaatgaagcagcaacatgctttggaggatgcttttttattagacaaacgactaggagtaggcaatgctgtgtaaaaaaagtgtggccggaaaaccaccgtacc

SEQ ID NO: 209966 - DNA, 2006 bp, Zea Mays
ctatgcacgaggcatgcaaattaacaagactcatacaagcacggaacagtgtgctgatggggcacaagagaaacacatgctcaggtcttaacatgtttggctttcgagcaaactttctccagaccccaaagaaatataatatccgatcagatgtgtcgatgctcatctcaacatactcccgtggcaacgcaccgacacacaactagtaaagaacacaagcctcgtgcgcttcggctttcttaccccctcggcttcctcgctcgctggttcgctccgggtctccgtctccctccacggtcagctcctcgtgtgatctcgtcgcgtggttagcagggaaacccagaggtggaaagaagctaacccggtgaagactctgaaggaatctgagccacctgcactccgatctgccatctgaaggacgcggaggaagccccgaatcggggaatttcgtccttccggcacgcccgccctgacgtgcaaatcggcgattgcttttttttgtgtgtgtgtaggcacactgttctatcagtgagaaatttgccattatagaagtcctcagacgcggcttcgacgatttggaggcgtagacgagggattcgctgttataaaaaactagggactacccacactccaaaatgaacatgaccacgccattacaaggcacgcaccctagcagccaccgtcgtcttgctccgtcctccgctcgccaggtctcgacgcgcgcgcagactctgcctcggcgtgccgctgccgtgccccgtctaagagctgccgctccggacgccacggacgcggcggcggccctcatggtcgcgcgcgccgaggccggggacttcgcggaggcctggtccctctgggcgcagctcctgcacagctccgccgcgccgtgcctgcccgccgtggcgccgcgccttctgccggcgtacgcgcgcctgggccgcttcgacgagatcctcctcgcagtgcgcgagctctcggcgcgggaccgcggcgcggcacgcacgctctacccgctcgccgtctcctgcctcggcgccgcgggcgagctggcgcgcatggaggacgccgtcctagaaatgggccgccttggcctccgcgtcgactccgcgaccggggacgccttcgtccgggcctacgcggccgccggaaccatcccgcagatggaggcggcctaccgccggcacaggaagtccgggctgctcatcacccgtggcgccatccgcgccgtcgcgtccgcgtacatctcccgacagaagtactacaggctcggcgcgttcgcggcggacgccggcctccgccggcgcgacgtcggcaacctgctctggaacctctacctcctctcctccgcggccaacttcaagatgaagtccctgcagcgcgcgttcctggagatggtggccgccgggtttcggccggacctcaccaccttcaacatccgcgccgcggccttctccaagatgtgcatgttctgggacctccacctcagcgccgaccacatgcaccgcgacggcgtcgcgccggacctcgtcactcacggctgcttcgtcgacgcctacctcgagcgccgcctcgcgcggaacctcacgttcgcgttcgaccgcctcgacggcgacgccaagcccgtcgtggctacggaccccatcgtgttcgaggcgttcggcaagggcggcttccacgccagctccgaggtgctgctggagaccgccggcgggaaggggcgctggacgtactacaagctgctcggcgtctacctcaggaagcagcataggagaaaccaagttttctggaactactgatgctaatcagttcagcgactagggtagtgcttacattgtaatttttagtgattaaaatgtgcttgccattgccagcaactccatatatctaggagcttgcaacagacataccaagactggaagatgatttatactcgcatcaatagttctgtgcactgattctgaaatggtggtggctaggcccatgaggccgaactcgttgtccatgtg

SEQ ID NO: 209967 - DNA, 497 bp, Zea Mays
ctatgcacgaggcatgcaaattaacaagactcatacaagcacggaacagtgtgctgatggggcacaagagaaacacatgctcaggtcttaacatgtttggctttcgagcaaactttctccagaccccaaagaaatataatatccgatcagatgtgtcgatgctcatctcaacatactcccgtggcaacgcaccgacacacaactagtaaagaacacaagcctcgtgcgcttcggctttcttaccccctcggcttcctcgctcgctggttcgctccgggtctccgtctccctccacggtcagctcctcgtgtgatctcgtcgcgtggttagcagggaaacccagaggtggaaagaagctaacccggtgaagactctgaaggaatctgagccacctgcactccgatctgccatctgaaggacgcggaggaagccccgaatcggggaatttcgtccttccggcacgcccgccctgacgtctccaacactttgtgcgcgga

SEQ ID NO: 209968 - DNA, 1086 bp, Zea Mays
ctatgcacgaggcatgcaaattaacaagactcatacaagcacggaacagtgtgctgatggggcacaagagaaacacatgctcaggtcttaacatgtttggctttcgagcaaactttctccagaccccaaagaaatataatatccgatcagatgtgtcgatgctcatctcaacatactcccgtggcaacgcaccgacacacaactagtaaagaacacaagcctcgtgcgcttcggctttcttaccccctcggcttcctcgctcgctggttcgctccgggtctccgtctccctccacggtcagctcctcgtgtgatctcgtcgcgtggttagcagggaaacccagaggtggaaagaagctaacccggtgaagactctgaaggaatctgagccacctgcactccgatctgccatctgaaggacgcggaggaagccccgaatcggggaatttcgtccttccggcacgcccgccctgaccctgggcctcgagacgggatgattcagtgtttcataaagcgcgataaatccaagtccacgtatcgtctctacttgtgcctgagtactgctgtgctcatggagaacggcaagttcctcttatcagctaaaaggagccgcagaacaacctgcacgcagtatatcatctcgatggacgccgacaacatatcgagatctagcagcacgtacatcggaaagctgaggtgcgccctgaattggcttcaacactagcagatcggccctgcagtggcctcatcactagctagatgcctaccactggtaccatacaggcttggtgctcgatatgatgacaccgtttctcctcggcgagggtatctgctgtggtatcggatcaccgcctctgggttttcagatctctcggggtttttttaaggccatgtctgtttgatcttaaaatcataaagattgagagggattgaagaggattttgacttgtcagggatataatctccctcaattcctatgaattagcaactgagtggggagtgaggacgcgtgcgtgcggtgcagccgtgcagctcggcgaccatcacttccccctcctgtagctcgccactgactgctgatttgttt

SEQ ID NO: 209969 - DNA, 808 bp, Zea Mays
ctatgcacgaggcatgcaaattaacaagactcatacaagcacggaacagtgtgctgatggggcacaagagaaacacatgctcaggtcttaacatgtttggctttcgagcaaactttctccagaccccaaagaaatataatatccgatcagatgtgtcgatgctcatctcaacatactcccgtggcaacgcaccgacacacaactagtaaagaacacaagcctcgtgcgcttcggctttcttaccccctcggcttcctcgctcgctggttcgctccgggtctccgtctccctccacggtcagctcctcgtgtgatctcgtcgcgtggttagcagggaaacccagaggtggaaagaagctaacccggtgaagactctgaaggaatctgagccacctgcactccgatctgccatctgaaggacgcggaggaagccccgaatcggggaatttcgtccttccggcacgcccgccctgacgtgcgccctgaattggcttcaacactagcagatcggccctgcagtggcctcatcactagctagatgcctaccactggtaccatacaggcttggtgctcgatatgatgacaccgtttctcctcggcgaggacgattccctgcccgccggaaacatgctcgtgcatgctgtttgctgtgcctgtggcgcgacgcggtggtcgctggtcggtggaatcccactccactatcactagccgccactggcaagtgcgatgcgacggaaccaaggattggattctcctccggcgttgcggcgaatgatggccgatgctgtgattgaaccacggaacgtggg

SEQ ID NO: 209970 - DNA, 3541 bp, Zea Mays
atggcggggtggctggcgctagacgtcgccgcggaggcagaggcgaacgagaatgaggccacgacggaggatgcgaatgcgcagaggatcggtctcgaactctcaattgtccctagagggcttgggttccgtgttgagggcgttcaaattactaccaaaaaattgggagttcaagacaccctgatgccatcagcacctggggagaaggatccacaagttataccgaggcctgcgacggggcctcctctggtgcagactctcacgcctgtcaatgcaacaggaagtcctgccatagacccgaggctggcgcagccgtcttggcctggccatgtagtactcctgcgcccttgtgcagcttggcctcctcatttgccagtcccgttgctgcttccgcaccaaaatgtggatgctctggaggatgtggctgcagcagatgttaaccctgcgatcgatagctgtgacgagaagatgttgcccaaggtgaatatgttgttcgatggtgaaagcgatgcgtatgagttctacaatgcatatgcggaaaaggtgggcttctttgtccgaaggtcaacgctctggacgacgtcaaagaacataatcactaggagaacttttgtgtgctcgagagaggggtttcgggagaagaagaagggagcaaaggaagcaaagtgcccacgtcccgaaacacgaattggatgccctgcaagcttgaccattagacttactgctaatggcaagtaccgtttgacagagtttgtgccgaatcataaccatcagctggcaacagcctctacagttcatatgctgaaaacaaagaaaatcaggcgcaaagcacgggctgcgagagaaaacctggcagatgataccgtgagtacaccagaatttgagaatgaagacgaggcatatgaattttacagcatgtatgcggggaaaattgggttcagcgtgcgcagggctagcatgacggtgaataatgagaatgttataaccagaagaatgtttgtttgttcaaaagaaggattccgtgagaagaaaagaggagcaaaaagagtaaagaaacctcgaccagaaacacgaactggctgtccggcatgtatggtcatcaggcttggaactaacgagaaatatcaagtcacagaatttgttacctgccacaatcaccagcttggagctgcagcagcttctgatcttgtcatggcatctgggagtacagaaaatgatcaagatgatggatttgatcaggcagatagatcacccgatgattctgttcacaagcaaaatctgatttatggaagtaccactctgagttccctagaaggtagaagttgcaaaagatacaagtatacaaagactccacgctcaggtgatgttggcgctacactagaatacctgcaaaaggtgcaacatgataacccttcattcttctatgctgtaaaatctgatgatgatgggaacttcacaaattttttctgggcagattcaaaatctattgtggactttttccattttggtgacgtagtctgttttgattcaggatatgcattgcaaggctatgataggccattggctttgtttacaggtgtgaatcatcataagcagacagttatctttggtgctgcaattatatatgatgaaagtaaagaagctttccaatggttattagatactttcaagatggcaatgaacggaacacatcccaagacattgttaactgatagatctgttgccttaagtgaagctgttgcagccacgttgcctgctacagcccatcgttattgtgtgtggcaaatttatcaaaatgctctgcagcagctgagtcaagctttccatggttcaaaaactctagaatgcaacttcaagagatgcctatttgattgtgaggatgaggatgagtttgtgacagcatggaaggaaatgttggaaaagtatgacctagaagataatcaatggctagcagatttgttctcaataaaggagaaatgggcactggcatatggccgcgatgcattttatgctgatatgaaaagcgtccagcaaaaggaaagtttgacaagtgagctgaagaaacatctatcattggaatgtgaccttttgaacttctttgagcagtttgaaagactgttatgtgatcgtcggtctgcagagatggaggctgatgtgaatgctaatcagagtacaaagaagccaccttctatgcgaatgttaaggcaagctgccaatgcatatacaccttctgcctttaaaatgtttgagagggaatttgaattgtacatggattgcatgctctacatctgtggtgagatgagcacaattttcgagtatagaataagtgttgaggacaagtcaagagatcacttcgttaaatttgattcactcaattccatgatgaattgtacttgtaagacgtttgaatttattggcatcccatgtcgccatatgctgaaggtacttgacatgaggaatatcaaggaccttcctgcccagtacatcatgaaaaggtggaggaaggatgccaaatcaggatcctcaaatggtggttgtgctttcttgtttgatggtgaccctgacttttctcacataaaacgttataattttttgtgtcgtatgttcagtgtagcagcggctagagctgcaacttctgatgaatcatttgcatatatggaaaaccagtcaaacatactgatggatcaaatagagcaagttattcaaaccaggccccctgacatagctgatcttattggtgctaattgtgatcgaacacaaaatccagttgacaatattgtcgctgaaggcattcaaagtcatactaattttcttagtggctccactgatggctctctaacatttccattcacattgggtgctggcacattggattaccgctgactggtacctactgttaggatggtactgcagtacagaacaaagcatgcaaaatgacataatggatgttctactaatgtgttggtagcttcacattggctgcagagctgcaaataacaatggtacacctactgcactggtagttggcaggcctgatattgtctgccttaacttctcacccaaagaaaggaaggattttttccccttcgccagcactcattgtatgtacttgatgggaaatgatgtttcatgaggtagcacccgaaatatcacctggttttccagcctggtgattgtgcacagggtgctcccggtaatgagggactccgcctgctgtgttgccagtttacaaggtgatgatgctgaacttaaccaacgcgagcccatctgatttttaaccagtgctgtacgcctgtagcgtaatgctgttgcgatagccttgtcatgacagttgtgcaatgtacagattttttaacccattacgtaaatatattgacatgtgatcactggtttcaaattgccagctgtgcaatgtattatgctagggagtacatattaacagctacgtagtatttatttagaaaaaaattagaacggcttacaatttggaattgaggaagaatgtgagaatggaacatgaataagaatgaggacgtgaggc

SEQ ID NO: 209971 - DNA, 3595 bp, Zea Mays
ctgactccgtcatcgccgtcctcttctttgcccgtcggccggcgccgccgcagaaaccagccacccgagtgagctcttccagtcgtacttgtattaatcggcccactgtccggctactggtattaggttcgtgttgactggagattcagaattcatttttgtttgttggtaaggaaccctaacttccttgttcccgaggagcaatcacatccgattttccgctcctccatcagtggcgtaggtgctagtccaatcgagcgtccgttttattttctgggttcagtgacagctggtgatccatctcgtgctcaaggatcggtctcgaactctcaattgtccctagagggcttgggttccgtgttgagggcgttcaaattactaccaaaaaattgggagttcaagacaccctgatgccatcagcacctggggagaaggatccacaagttataccgaggcctgcgacggggcctcctctggtgcagactctcacgcctgtcaatgcaacaggaagtcctgccatagacccgaggctggcgcagccgtcttggcctggccatgtagtactcctgcgcccttgtgcagcttggcctcctcatttgccagtcccgttgctgcttccgcaccaaaatgtggatgctctggaggatgtggctgcagcagatgttaaccctgcgatcgatagctgtgacgagaagatgttgcccaaggtgaatatgttgttcgatggtgaaagcgatgcgtatgagttctacaatgcatatgcggaaaaggtgggcttctttgtccgaaggtcaacgctctggacgacgtcaaagaacataatcactaggagaacttttgtgtgctcgagagaggggtttcgggagaagaagaagggagcaaaggaagcaaagtgcccacgtcccgaaacacgaattggatgccctgcaagcttgaccattagacttactgctaatggcaagtaccgtttgacagagtttgtgccgaatcataaccatcagctggcaacagcctctacagttcatatgctgaaaacaaagaaaatcaggcgcaaagcacgggctgcgagagaaaacctggcagatgataccgtgagtacaccagaatttgagaatgaagacgaggcatatgaattttacagcatgtatgcggggaaaattgggttcagcgtgcgcagggctagcatgacggtgaataatgagaatgttataaccagaagaatgtttgtttgttcaaaagaaggattccgtgagaagaaaagaggagcaaaaagagtaaagaaacctcgaccagaaacacgaactggctgtccggcatgtatggtcatcaggcttggaactaacgagaaatatcaagtcacagaatttgttacctgccacaatcaccagcttggagctgcagcagcttctgatcttgtcatggcatctgggagtacagaaaatgatcaagatgatggatttgatcaggcagatagatcacccgatgattctgttcacaagcaaaatctgatttatggaagtaccactctgagttccctagaaggtagaagttgcaaaagatacaagtatacaaagactccacgctcaggtgatgttggcgctacactagaatacctgcaaaagattcaaaatctattgtggactttttccattttggtgacgtagtctgttttgattcaggatatgcattgcaaggctatgataggccattggctttgtttacaggtgtgaatcatcataagcagacagttatctttggtgctgcaattatatatgatgaaagtaaagaagctttccaatggttattagatactttcaagatggcaatgaacggaacacatcccaagacattgttaactgatagatctgttgccttaagtgaagctgttgcagccacgttgcctgctacagcccatcgttattgtgtgtggcaaatttatcaaaatgctctgcagcagctgagtcaagctttccatggttcaaaaactctagaatgcaacttcaagagatgcctatttgattgtgaggatgaggatgagtttgtgacagcatggaaggaaatgttggaaaagtatgacctagaagataatcaatggctagcagatttgttctcaataaaggagaaatgggcactggcatatggccgcgatgcattttatgctgatatgaaaagcgtccagcaaaaggaaagtttgacaagtgagctgaagaaacatctatcattggaatgtgaccttttgaacttctttgagcagtttgaaagactgttatgtgatcgtcggtctgcagagatggaggctgatgtgaatgctaatcagagtacaaagaagccaccttctatgcgaatgttaaggcaagctgccaatgcatatacaccttctgcctttaaaatgtttgagagggaatttgaattgtacatggattgcatgctctacatctgtggtgagatgagcacaattttcgagtatagaataagtgttgaggacaagtcaagagatcacttcgttaaatttgattcactcaattccatgatgaattgtacttgtaagacgtttgaatttattggcatcccatgtcgccatatgctgaaggtacttgacatgaggaatatcaaggaccttcctgcccagtacatcatgaaaaggtggaggaaggatgccaaatcaggatcctcaaatggtggttgtgctttcttgtttgatggtgaccctgacttttctcacataaaacgttataattttttgtgtcgtatgttcagtgtagcagcggctagagctgcaacttctgatgaatcatttgcatatatggaaaaccagtcaaacatactgatggatcaaatagagcaagttattcaaaccaggccccctgacatagctgatcttattggtgctaattgtgatcgaacacaaaatccagttgacaatattgtcgctgaaggcattcaaagtcatactaattttcttagtggctccactgatggcatgcaaaatgacataatggatgttctactaatgtgttggtagcttcacattggctgcagagctgcaaataacaatggtacacctactgcactggtagttggcaggcctgatattgtctgccttaacttctcacccaaagaaaggaaggattttttccccttcgccagcactcattgtatgtacttgatgggaaatgatgtttcatgaggtagcacccgaaatatcacctggttttccagcctggtgattgtgcacagggtgctcccggtaatgagggactccgcctgctgtgttgccagtttacaaggtgatgatgctgaacttaaccaacgcgagcccatctgatttttaaccagtgctgtacgcctgtagcgtaatgctgttgcgatagccttgtcatgacagttgtgcaatgtacagattttttaacccattacgtaaatatattgacatgtgatcactggtttcaaattgccagctgtgcaatgtattatgctagggagtacatattaacagctacgtagtatttatttagaaaaaaattagaacggcttacaatttggaattgaggaagaatgtgagaatggaacatgaataagaatgaggacgtgaggc

SEQ ID NO: 209972 - DNA, 1976 bp, Zea Mays
aaattactctgctcataaacaatggaaaattgagagagcgagagagaggaagctagcgagaaggtcaagccgcgaagagaagagacgcacgtcacagatccctctccactgtctcaccctttctctctcctcgaccctcccgacgcggcaaagcaaaaacaaagggaggagaggagggagagaagggagaagacgaggccaaaaatcccctccccctccccaaatcctagcccaataatctctcaatcaggggattcttaggtctgatcaggtcggaggattcggcagggcgcagccatgaacgaaaaggcgtccgtctccaaggagctcaacgccaagcacaagaagatattggaaggtcttctacggcatcctgagaatagagaatgcgcagactgcaagtcaaagggtcctcgatgggcaagtgtgaatctaggtatctttatatgcatgacatgttctggcattcatagaagcctgggggtgcacatatctaaggtaagatctgccaccctggatacatggctgccagagcaagttgcatttattcaatcaatgggaaacgaaaaagcaaatagctattgggaagcagagctgcctcctaactacgatagggttggaatagagaatttcatccgtgcaaaatatgaggacaagagatgggtaccaaggaatggaacatcaaaatcttcgtccagtgttcgagatgagaagagccaagagtctccggctagtgctaataggagtggacatggtcatagatcttcatttgagcaaaaccgtgcttcaccagctcttccgagcaaagttgcacatgcagcttcaaggatatcctctcagagaaagagtcagcgtcatcttcaaacgacgataatggctgggatggcttccagtctgcacaaccagtacctagttcagagaaaaaagattctgccaaaccagcagaaagcaagacccagtctacatctggaatggaagacttatttaaagactcaccagctgtgccattatcctcagctccagctgtttcccaagtaaacgctaagaatgatatcatgagtttgtttgagaagtccaatatggtatcacctttcgctgcccatcaacagcagctggcgctcatgtctcagcagcaagctcttctaatggctgctctcaaagctggaaatgcaccacaaatgatgattccagggactgccaatcagctaaatgctaacggaaccttgcctttccaaaactggacaaatctttatcaaaatcctgggtcgactccagcagcagcacagaatggtgccaccaaggttgctaacaacaatcaggacttctcttctggtaccttcggttttggcacacctggggtgtacaacattagcccaactgtcccagcaaatggggccacgacagcaggtgctatcaacaacggcactgcatcaactgcctcttctactctcccctcacaatctggcaaagactatgatttttcgtccttaactcaaggatttttcaccaaacgatgagcgcctagtgagcttgaaaaccaaacagaccacaggatcatgttggacgaggcatattgatttagggagcacaaggggcttacacatgcttatttcgaggcagattttcttctggtggatatattgttgtttcatgaccttgtagctgtcggacaataagagtggaaatatgccgcaaaatagctttgttgtttctaaaagcgaagaatacattgccggttatgtcaacggcttttactcgaggaccaccttgtcagttatacaagtctaatgcagtcttttcactatgttggtcttgatttatctacgacgtcgatactgattacagattgttttgtattgtattttacgacaattggattttatttgtttctacatttgtatattgtttgtgagatgggagaaacctcttcaaggcgttgaaccaaacgtacttttccaacatttcatatatatctt

SEQ ID NO: 209973 - DNA, 2045 bp, Zea Mays
aaattactctgctcataaacaatggaaaattgagagagcgagagagaggaagctagcgagaaggtcaagccgcgaagagaagagacgcacgtcacagatccctctccactgtctcaccctttctctctcctcgaccctcccgacgcggcaaagcaaaaacaaagggaggagaggagggagagaagggagaagacgaggccaaaaatcccctccccctccccaaatcctagcccaataatctctcaatcaggggattcttaggtctgatcaggtcggaggattcggcagggcgcagccatgaacgaaaaggcgtccgtctccaaggagctcaacgccaagcacaagaagatattggaaggtcttctacggcatcctgagaatagagaatgcgcagactgcaagtcaaagggtcctcgatgggcaagtgtgaatctagcaatgggaaacgaaaaagcaaatagctattgggaagcagagctgcctcctaactacgatagggttggaatagagaatttcatccgtgcaaatatgaggacaagagatgggtaccaaggaatggaacatcaaaatcttcgtccagtgttcgagatgagaagagccaagagtctccggctagtgctaataggagtggacatggtcatagatcttcatttgagcaaaaccgtgcttcaccagctcttccgagcaaagttgcacatgcagcttcaaggatatcctctcaggcatcacctcagcccccgaaggtagaaacaccagttccaaaggtggttttacctcctcagtcacagaaatcccccgccaaagttgatgcaacaccgcctaaagttgagaagccatcggttacaccacctcctaaagttgattatgccactgatctctttaacatgttgtcaatggatggaacaacagagaaagagtcagcgtcatcttcaaacgacgataatggctgggatggcttccagtctgcacaaccagtacctagttcagagaaaaaagattctgccaaaccagcagaaagcaagacccagtctacatctggaatggaagacttatttaaagactcaccagctgtgccattatcctcagctccagctgtttcccaagtaaacgctaagaatgatatcatgagtttgtttgagaagtccaatatggtatcacctttcgctgcccatcaacagcagctggcgctcatgtctcagcagcaagctcttctaatggctgctctcaaagctggaaatgcaccacaaatgatgattccagggactgccaatcagctaaatgctaacggaaccttgcctttccaaaactggacaaatctttatcaaaatcctgggtcgactccagcagcagcacagaatggtgccaccaaggttgctaacaacaatcaggacttctcttctggtaccttcggttttggcacacctggggtgtacaacattagcccaactgtcccagcaaatggggccacgacagcaggtgctatcaacaacggcactgcatcaactgcctcttctactctcccctcacaatctggcaaagactatgatttttcgtccttaactcaaggatttttcaccaaacgatgagcgcctagtgagcttgaaaaccaaacagaccacaggatcatgttggacgaggcatattgatttagggagcacaaggggcttacacatgcttatttcgaggcagattttcttctggtggatatattgttgtttcatgaccttgtagctgtcggacaataagagtggaaatatgccgcaaaatagctttgttgtttctaaaagcgaagaatacattgccggttatgtcaacggcttttactcgaggaccaccttgtcagttatacaagtctaatgcagtcttttcactatgttggtcttgatttatctacgacgtcgatactgattacagattgttttgtattgtattttacgacaattggattttatttgtttctacatttgtatattgtttgtgagatgggagaaacctcttcaaggcgttgaaccaaacgtacttttccaacatttcatatatatctt

SEQ ID NO: 209974 - DNA, 2180 bp, Zea Mays
aaattactctgctcataaacaatggaaaattgagagagcgagagagaggaagctagcgagaaggtcaagccgcgaagagaagagacgcacgtcacagatccctctccactgtctcaccctttctctctcctcgaccctcccgacgcggcaaagcaaaaacaaagggaggagaggagggagagaagggagaagacgaggccaaaaatcccctccccctccccaaatcctagcccaataatctctcaatcaggggattcttaggtctgatcaggtcggaggattcggcagggcgcagccatgaacgaaaaggcgtccgtctccaaggagctcaacgccaagcacaagaagatattggaaggtcttctacggcatcctgagaatagagaatgcgcagactgcaagtcaaagggtcctcgatgggcaagtgtgaatctaggtatctttatatgcatgacatgttctggcattcatagaagcctgggggtgcacatatctaaggtaagatctgccaccctggatacatggctgccagagcaagttgcatttattcaatgtatggattactagctgcaatgggaaacgaaaaagcaaatagctattgggaagcagagctgcctcctaactacgatagggttggaatagagaatttcatccgtgcaaaatatgaggacaagagatgggtaccaaggaatggaacatcaaaatcttcgtccagtgttcgagatgagaagagccaagagtctccggctagtgctaataggagtggacatggtcatagatcttcatttgagcaaaaccgtgcttcaccagctcttccgagcaaagttgcacatgcagcttcaaggatatcctctcaggcatcacctcagcccccgaaggtagaaacaccagttccaaaggtggttttacctcctcagtcacagaaatcccccgccaaagttgatgcaacaccgcctaaagttgagaagccatcggttacaccacctcctaaagttgattatgccactgatctctttaacatgttgtcaatggatggaacaacagagaaagagtcagcgtcatcttcaaacgacgataatggctgggatggcttccagtctgcacaaccagtacctagttcagagaaaaaagattctgccaaaccagcagaaagcaagacccagtctacatctggaatggaagacttatttaaagactcaccagctgtgccattatcctcagctccagctgtttcccaagtaaacgctaagaatgatatcatgagtttgtttgagaagtccaatatggtatcacctttcgctgcccatcaacagcagctggcgctcatgtctcagcagcaagctcttctaatggctgctctcaaagctggaaatgcaccacaaatgatgattccagggactgccaatcagctaaatgctaacggaaccttgcctttccaaaactggacaaatctttatcaaaatcctgggtcgactccagcagcagcacagaatggtgccaccaaggttgctaacaacaatcaggacttctcttctggtaccttcggttttggcacacctggggtgtacaacattagcccaactgtcccagcaaatggggccacgacagcaggtgctatcaacaacggcactgcatcaactgcctcttctactctcccctcacaatctggcaaagactatgatttttcgtccttaactcaaggatttttcaccaaacgatgagcgcctagtgagcttgaaaaccaaacagaccacaggatcatgttggacgaggcatattgatttagggagcacaaggggcttacacatgcttatttcgaggcagattttcttctggtggatatattgttgtttcatgaccttgtagctgtcggacaataagagtggaaatatgccgcaaaatagctttgttgtttctaaaagcgaagaatacattgccggttatgtcaacggcttttactcgaggaccaccttgtcagttatacaagtctaatgcagtcttttcactatgttggtcttgatttatctacgacgtcgatactgattacagattgttttgtattgtattttacgacaattggattttatttgtttctacatttgtatattgtttgtgagatgggagaaacctcttcaaggcgttgaaccaaacgtacttttccaacatttcatatatatctt

SEQ ID NO: 209975 - DNA, 2083 bp, Zea Mays
cgcaccatgaccatcgtcattgtcaaaccacagaaataaattactctgctcataaacaatggaaaattgagagagcgagagagaggaagctagcgagaaggtcaagccgcgaagagaagagacgcacgtcacagatccctctccactgtctcaccctttctctctcctcgaccctcccgacgcggcaaagcaaaaacaaagggaggagaggagggagagaagggagaagacgaggccaaaaatcccctccccctccccaaatcctagcccaataatctctcaatcaggggattcttaggtctgatcaggtcggaggattcggcagggcgcagccatgaacgaaaaggcgtccgtctccaaggagctcaacgccaagcacaagaagatattggaaggtcttctacggcatcctgagaatagagaatgcgcagactgcaagtcaaagggtcctcgatgggcaagtgtgaatctagcaatgggaaacgaaaaagcaaatagctattgggaagcagagctgcctcctaactacgatagggttggaatagagaatttcatccgtgcaaaatatgaggacaagagatgggtaccaaggaatggaacatcaaaatcttcgtccagtgttcgagatgagaagagccaagagtctccggctagtgctaataggagtggacatggtcatagatcttcatttgagcaaaaccgtgcttcaccagctcttccgagcaaagttgcacatgcagcttcaaggatatcctctcaggcatcacctcagcccccgaaggtagaaacaccagttccaaaggtggttttacctcctcagtcacagaaatcccccgccaaagttgatgcaacaccgcctaaagttgagaagccatcggttacaccacctcctaaagttgattatgccactgatctctttaacatgttgtcaatggatggaacaacagagaaagagtcagcgtcatcttcaaacgacgataatggctgggatggcttccagtctgcacaaccagtacctagttcagagaaaaaagattctgccaaaccagcagaaagcaagacccagtctacatctggaatggaagacttatttaaagactcaccagctgtgccattatcctcagctccagctgtttcccaagtaaacgctaagaatgatatcatgagtttgtttgagaagtccaatatggtatcacctttcgctgcccatcaacagcagctggcgctcatgtctcagcagcaagctcttctaatggctgctctcaaagctggaaatgcaccacaaatgatgattccagggactgccaatcagctaaatgctaacggaaccttgcctttccaaaactggacaaatctttatcaaaatcctgggtcgactccagcagcagcacagaatggtgccaccaaggttgctaacaacaatcaggacttctcttctggtaccttcggttttggcacacctggggtgtacaacattagcccaactgtcccagcaaatggggccacgacagcaggtgctatcaacaacggcactgcatcaactgcctcttctactctcccctcacaatctggcaaagactatgatttttcgtccttaactcaaggatttttcaccaaacgatgagcgcctagtgagcttgaaaaccaaacagaccacaggatcatgttggacgaggcatattgatttagggagcacaaggggcttacacatgcttatttcgaggcagattttcttctggtggatatattgttgtttcatgaccttgtagctgtcggacaataagagtggaaatatgccgcaaaatagctttgttgtttctaaaagcgaagaatacattgccggttatgtcaacggcttttactcgaggaccaccttgtcagttatacaagtctaatgcagtcttttcactatgttggtcttgatttatctacgacgtcgatactgattacagattgttttgtattgtattttacgacaattggattttatttgtttctacatttgtatattgtttgtgagatgggagaaacctcttcaaggcgttgaaccaaacgtacttttccaacatttcatatatatctt

SEQ ID NO: 209976 - DNA, 2152 bp, Zea Mays
aaaccctcgcaccatgaccatcgtcattgtcaaaccacagaaataaattactctgctcataaacaatggaaaattgagagagcgagagagaggaagctagcgagaaggtcaagccgcgaagagaagagacgcacgtcacagatccctctccactgtctcaccctttctctctcctcgaccctcccgacgcggcaaagcaaaaacaaagggaggagaggagggagagaagggagaagacgaggccaaaaatcccctccccctccccaaatcctagcccaataatctctcaatcaggggattcttaggtctgatcaggtcggaggattcggcagggcgcagccatgaacgaaaaggcgtccgtctccaaggagctcaacgccaagcacaagaagatattggaaggtcttctacggcatcctgagaatagagaatgcgcagactgcaagtcaaagggtcctcgatgggcaagtgtgaatctaggtatctttatatgcatgacatgttctggcattcatagaagcctgggggtgcacatatctaagcaatgggaaacgaaaaagcaaatagctattgggaagcagagctgcctcctaactacgatagggttggaatagagaatttcatccgtgcaaaatatgaggacaagagatgggtaccaaggaatggaacatcaaaatcttcgtccagtgttcgagatgagaagagccaagagtctccggctagtgctaataggagtggacatggtcatagatcttcatttgagcaaaaccgtgcttcaccagctcttccgagcaaagttgcacatgcagcttcaaggatatcctctcaggcatcacctcagcccccgaaggtagaaacaccagttccaaaggtggttttacctcctcagtcacagaaatcccccgccaaagttgatgcaacaccgcctaaagttgagaagccatcggttacaccacctcctaaagttgattatgccactgatctctttaacatgttgtcaatggatggaacaacagagaaagagtcagcgtcatcttcaaacgacgataatggctgggatggcttccagtctgcacaaccagtacctagttcagagaaaaaagattctgccaaaccagcagaaagcaagacccagtctacatctggaatggaagacttatttaaagactcaccagctgtgccattatcctcagctccagctgtttcccaagtaaacgctaagaatgatatcatgagtttgtttgagaagtccaatatggtatcacctttcgctgcccatcaacagcagctggcgctcatgtctcagcagcaagctcttctaatggctgctctcaaagctggaaatgcaccacaaatgatgattccagggactgccaatcagctaaatgctaacggaaccttgcctttccaaaactggacaaatctttatcaaaatcctgggtcgactccagcagcagcacagaatggtgccaccaaggttgctaacaacaatcaggacttctcttctggtaccttcggttttggcacacctggggtgtacaacattagcccaactgtcccagcaaatggggccacgacagcaggtgctatcaacaacggcactgcatcaactgcctcttctactctcccctcacaatctggcaaagactatgatttttcgtccttaactcaaggatttttcaccaaacgatgagcgcctagtgagcttgaaaaccaaacagaccacaggatcatgttggacgaggcatattgatttagggagcacaaggggcttacacatgcttatttcgaggcagattttcttctggtggatatattgttgtttcatgaccttgtagctgtcggacaataagagtggaaatatgccgcaaaatagctttgttgtttctaaaagcgaagaatacattgccggttatgtcaacggcttttactcgaggaccaccttgtcagttatacaagtctaatgcagtcttttcactatgttggtcttgatttatctacgacgtcgatactgattacagattgttttgtattgtattttacgacaattggattttatttgtttctacatttgtatattgtttgtgagatgggagaaacctcttcaaggcgttgaaccaaacgtacttttccaacatttcatatatatctt

SEQ ID NO: 209977 - DNA, 2148 bp, Zea Mays
agcaaaccctcgcaccatgaccatcgtcattgtcaaaccacagaaataaattactctgctcataaacaatggaaaattgagagagcgagagagaggaagctagcgagaaggtcaagccgcgaagagaagagacgcacgtcacagatccctctccactgtctcaccctttctctctcctcgaccctcccgacgcggcaaagcaaaaacaaagggaggagaggagggagagaagggagaagacgaggccaaaaatcccctccccctccccaaatcctagcccaataatctctcaatcaggggattcttaggtctgatcaggtcggaggattcggcagggcgcagccatgaacgaaaaggcgtccgtctccaaggagctcaacgccaagcacaagaagatattggaaggtcttctacggcatcctgagaatagagaatgcgcagactgcaagtcaaagggtcctcgatgggcaagtgtgaatctaggtaagatctgccaccctggatacatggctgccagagcaagttgcatttattcaatcaatgggaaacgaaaaagcaaatagctattgggaagcagagctgcctcctaactacgatagggttggaatagagaatttcatccgtgcaaaatatgaggacaagagatgggtaccaaggaatggaacatcaaaatcttcgtccagtgttcgagatgagaagagccaagagtctccggctagtgctaataggagtggacatggtcatagatcttcatttgagcaaaaccgtgcttcaccagctcttccgagcaaagttgcacatgcagcttcaaggatatcctctcaggcatcacctcagcccccgaaggtagaaacaccagttccaaaggtggttttacctcctcagtcacagaaatcccccgccaaagttgatgcaacaccgcctaaagttgagaagccatcggttacaccacctcctaaagttgattatgccactgatctctttaacatgttgtcaatggatggaacaacagagaaagagtcagcgtcatcttcaaacgacgataatggctgggatggcttccagtctgcacaaccagtacctagttcagagaaaaaagattctgccaaaccagcagaaagcaagacccagtctacatctggaatggaagacttatttaaagactcaccagctgtgccattatcctcagctccagctgtttcccaagtaaacgctaagaatgatatcatgagtttgtttgagaagtccaatatggtatcacctttcgctgcccatcaacagcagctggcgctcatgtctcagcagcaagctcttctaatggctgctctcaaagctggaaatgcaccacaaatgatgattccagggactgccaatcagctaaatgctaacggaaccttgcctttccaaaactggacaaatctttatcaaaatcctgggtcgactccagcagcagcacagaatggtgccaccaaggttgctaacaacaatcaggacttctcttctggtaccttcggttttggcacacctggggtgtacaacattagcccaactgtcccagcaaatggggccacgacagcaggtgctatcaacaacggcactgcatcaactgcctcttctactctcccctcacaatctggcaaagactatgatttttcgtccttaactcaaggatttttcaccaaacgatgagcgcctagtgagcttgaaaaccaaacagaccacaggatcatgttggacgaggcatattgatttagggagcacaaggggcttacacatgcttatttcgaggcagattttcttctggtggatatattgttgtttcatgaccttgtagctgtcggacaataagagtggaaatatgccgcaaaatagctttgttgtttctaaaagcgaagaatacattgccggttatgtcaacggcttttactcgaggaccaccttgtcagttatacaagtctaatgcagtcttttcactatgttggtcttgatttatctacgacgtcgatactgattacagattgttttgtattgtattttacgacaattggattttatttgtttctacatttgtatattgtttgtgagatgggagaaacctcttcaaggcgttgaaccaaacgtacttttccaacatttcatatatatctt

SEQ ID NO: 209978 - DNA, 1998 bp, Zea Mays
atggcgagtctgacctcatggacccacaccaaacgggatagtagaagcagctggagcacgtcacggcgccgcgctgggttggtgggggcgcaccgcagtccgcaccggacctcgagaggggaggagaggagatgggaggggtcaacgaggtgggagcagacaggaaggctcggggctccttcctcctataaacccaccgcacctgccttagaggctcccattttctcggccgggagccgcaattccatcctgctgctagagttacatactcacccaatagaacaattctatgcccggtgattgtacctcctgaagtagaagagcatactgaagcagaactcgagtggtgttggatcgaaatggaaggcgggatgtcaagtttggaagccgccatgaaagcttcttcatcgatggcaagcagcatggcaaggaatgctgaccctaaccaacagactctccgccccaatttagtggagcagttctattttccaagacctggtcaatctttgccaggcattcctccattttttgggcctccctctagtttgtatcttcctaatgacaatgaagctaaatttggcaacaactttgaatcaaatccttcacagaatacagattggaacccacaggcaatagtgagcaacctaaccttccttgagcagaagatcaagcaggtaaaggatattgtgcagtccatgagtaaccgagagaaccaagtagctggtggttcctgtgaggtagctgcaaagcagcagctcataaccgctgacctcactagcattataatccagctcatatctactgcgggttcgctgctcccttcaatgaagaacccacttcttagcagcaatccagcagtcaggcagcttggcaacactcttggttctcctacgggctttggcatgaatgctaatcagcgaccaagcgtagacagcaagaccgatattcctgacacaggaaaaacttctgattatgaggagctgatgaatacccttaatactagtcaagctgaaagagatgagctgatcaaatgcccaaatccctgtggtggggaagggtctgaactgactccgatggaggaccatgatgtgaaggagagtgacgatggtggtgagggagagaatctcccccctggttcatatgtaatcttgcaactggaaaaggaggagattttagcaccacatactcatttctgcttgatctgtggtaagggtttcaaaagagatgctaacctaaggatgcacatgaggggccatggagatgagtacaagactccagctgctcttgccaaacccacaaaagattatggtgcagatcatgcaccggttacaaggtactcatgcccatttgtgggttgcaaacggaacaaggagcacaggaagttccagcctctcaaaacaatcttgtgtgtgaagaaccattacaagagaagccactgtgacaagagctacacctgcagccgttgcaacaccaagaagttctctgtcatcgcggacttgaagactcatgagaagcactgtggtcgtgacaagtggctctgttcttgcggaacgaccttctccaggaaggacaagctttttggacatgttgcgcttttccaaggccacacacctgcgctccccgtggaagacggggatgtaccagaaggttcagagcagcctcaggacggcgaaccaacgaatgaaatggcgaggagcatggtgtatagcttcccgtgtagctcgtctgatggtttattgaacctcgacatgaaaatggctgatgacgtgcgtggttatctctcgccgctgagctttgataattgctttggcgcgtttgacgacttcactcgccctggatttgacatctctgagaaccccttctccttcccgccttcaggatcttgcagttatgggcagcagaacggtgatagctgatggatgccgccatcgatgatgactacaccgcggcactgtcaacctttatgtgatgaatgtggctgtgtcggccatggagcag

SEQ ID NO: 209979 - DNA, 1519 bp, Zea Mays
tctccgacgattccctctctaccggatcccccccctccctcctcagcttccattccctctcctccgttaattctccgctctccatttattcctttccagttccgccgctccattcccagctcccaccaccaagggcaatccctctccgacatccaatccaatacaatcacgcctgcgcacacgcaaccccagctcaagccccaagtccaaaccctaacccggcggcggaagatatggccgacacggggcgcgacgccttccctgacgaggcggagcccgcgttcaccctcgacgagtacatggaggacatcgaggccgtggagctggaggcggatttggtgctgggcggggacgagggcaaggagtgcacctacgccggcggatacctcaagcgccaggccgtcttctcctgcctcacctgcgtgccggatggagtcgccggggtctgtaccgcctgcagcctcgcctgccacgacgggcatgagataccaagagatgaggaaggggagccactctatgaggaattgatatgccacaaatgctcatctgtctgccatttcttgaaattgtatccagatacaatttgggcttctggtaagccaaatctggcagtggaaactgatgcaagtgactcgaatgtgatgaaaaaaccttcagggcatgctgaccctgagaaacatgaaaatggtgctcttgttgataatacggttggcgagaagacctctgttgagaatgattctacaaaagctattgcagttcctgaggaggccaatttgggtagcagttctggcaacaactgcaagttaggagtggatgtgaatacaatgccagctattacagataaaagtgagccttttttcatgtctaaaggttggagggagacactatgcaggtgtgaaacatgcttcaacttctatgcacaacgaggtattgcatatcttattgacaaggaggattctattgaggaatacgagaagattgccaagcagaagagggagatgaaactggagcagcagcaaggagctgagacaaattttctgaattcacttaatcatgttcagaagatagagatgataagtggcatcaatgacatgaagaatgagtttcagtcctttctggagtccttcgatgcatcaaaaccggtaacatctgatgatatacattcattcttcgagaatcttgctaagaagaagaaacagaggttatcttagcttttgtgaccgcatcggaccctacccgaggcaaccgttctgctggacagaggtcctagtttgttgggctagtaaatgtaatgttatcttaggtggtacttactaatcgggccagtaatgttgaattctagctggaacgcggtaatgtttgatgcaccgaagtcgcttgcagtaggttccgatggcccaagccaccaaaaacctgtttgctccatgaacctcaatcctgttaggtgataatataatatacattgtgttgccaccgtgctttttttcttacatgttttatttgtatatccttagtctgg

SEQ ID NO: 209980 - DNA, 1621 bp, Zea Mays
tctccgacgattccctctctaccggatcccccccctccctcctcagcttccattccctctcctccgttaattctccgctctccatttattcctttccagttccgccgctccattcccagctcccaccaccaagggcaatccctctccgacatccaatccaatacaatcacgcctgcgcacacgcaaccccagctcaagccccaagtccaaaccctaacccggcggcggaagatatggccgacacggggcgcgacgccttccctgacgaggcggagcccgcgttcaccctcgacgagtacatggaggacatcgaggccgtggagctgattgttgaactttggacaaagcggaagtttcgttgtgattgtggcaactcaaagtttggtggtcacctttgcaaactctgccctgagaaagattatgagaattcagcaaatacttataaccataacttcaaaggttcctattgcacatgtgggcggccttatcctgacccagaagctaaggagcaagttgaaatgatacaatgctctatatgtgaggactggtttcatggggatcatattggtcttaactctattgaagagataccaagagatgaggaaggggagccactctatgaggaattgatatgccacaaatgctcatctgtctgccatttcttgaaattgtatccagatacaatttgggcttctggtaagccaaatctggcagtggaaactgatgcaagtgactcgaatgtgatgaaaaaaccttcagggcatgctgaccctgagaaacatgaaaatggtgctcttgttgataatacggttggcgagaagacctctgttgagaatgattctacaaaagctattgcagttcctgaggaggccaatttgggtagcagttctggcaacaactgcaagttaggagtggatgtgaatacaatgccagctattacagataaaagtgagccttttttcatgtctaaaggttggagggagacactatgcaggtgtgaaacatgcttcaacttctatgcacaacgaggtattgcatatcttattgacaaggaggattctattgaggaatacgagaagattgccaagcagaagagggagatgaaactggagcagcagcaaggagctgagacaaattttctgaattcacttaatcatgttcagaagatagagatgataagtggcatcaatgacatgaagaatgagtttcagtcctttctggagtccttcgatgcatcaaaaccggtaacatctgatgatatacattcattcttcgagaatcttgctaagaagaagaaacagaggttatcttagcttttgtgaccgcatcggaccctacccgaggcaaccgttctgctggacagaggtcctagtttgttgggctagtaaatgtaatgttatcttaggtggtacttactaatcgggccagtaatgttgaattctagctggaacgcggtaatgtttgatgcaccgaagtcgcttgcagtaggttccgatggcccaagccaccaaaaacctgtttgctccatgaacctcaatcctgttaggtgataatataatatacattgtgttgccaccgtgctttttttcttacatgttttatttgtatatccttagtctgg

SEQ ID NO: 209981 - DNA, 1738 bp, Zea Mays
tctccgacgattccctctctaccggatcccccccctccctcctcagcttccattccctctcctccgttaattctccgctctccatttattcctttccagttccgccgctccattcccagctcccaccaccaagggcaatccctctccgacatccaatccaatacaatcacgcctgcgcacacgcaaccccagctcaagccccaagtccaaaccctaacccggcggcggaagatatggccgacacggggcgcgacgccttccctgacgaggcggagcccgcgttcaccctcgacgagtacatggaggacatcgaggccgtggagctggaggcggatttggtgctgggcggggacgagggcaaggagtgcacctacgccggcggatacctcaagcgccaggccgtcttctcctgcctcacctgcgtgccggatggagtcgccgggattgttgaactttggacaaagcggaagtttcgttgtgattgtggcaactcaaagtttggtggtcacctttgcaaactctgccctgagaaagattatgagaattcagcaaatacttataaccataacttcaaaggttcctattgcacatgtgggcggccttatcctgacccagaagctaaggagcaagttgaaatgatacaatgctctatatgtgaggactggtttcatggggatcatattggtcttaactctattgaagagataccaagagatgaggaaggggagccactctatgaggaattgatatgccacaaatgctcatctgtctgccatttcttgaaattgtatccagatacaatttgggcttctggtaagccaaatctggcagtggaaactgatgcaagtgactcgaatgtgatgaaaaaaccttcagggcatgctgaccctgagaaacatgaaaatggtgctcttgttgataatacggttggcgagaagacctctgttgagaatgattctacaaaagctattgcagttcctgaggaggccaatttgggtagcagttctggcaacaactgcaagttaggagtggatgtgaatacaatgccagctattacagataaaagtgagccttttttcatgtctaaaggttggagggagacactatgcaggtgtgaaacatgcttcaacttctatgcacaacgaggtattgcatatcttattgacaaggaggattctattgaggaatacgagaagattgccaagcagaagagggagatgaaactggagcagcagcaaggagctgagacaaattttctgaattcacttaatcatgttcagaagatagagatgataagtggcatcaatgacatgaagaatgagtttcagtcctttctggagtccttcgatgcatcaaaaccggtaacatctgatgatatacattcattcttcgagaatcttgctaagaagaagaaacagaggttatcttagcttttgtgaccgcatcggaccctacccgaggcaaccgttctgctggacagaggtcctagtttgttgggctagtaaatgtaatgttatcttaggtggtacttactaatcgggccagtaatgttgaattctagctggaacgcggtaatgtttgatgcaccgaagtcgcttgcagtaggttccgatggcccaagccaccaaaaacctgtttgctccatgaacctcaatcctgttaggtgataatataatatacattgtgttgccaccgtgctttttttcttacatgttttatttgtatatccttagtctgg

SEQ ID NO: 209982 - DNA, 4748 bp, Zea Mays
cctttctcacggctataaaacacactctacctccagcctttaaagcactcaccagcctattaaacacaaaacacaaacatcacatatgtcgatcgatcttaatcagctgccgttggatggaaatgaagatggtgtacctgaggctggtggagtctttccttttgtttctccacatcaaatactccattcttttgatctaaatatcccaatggatgaacaacaagagaacctgcatccagataatgaacttaatgttttggaggattaccttaatgattatggggtttatgccgatgttgacattgtgttcgatcaagatgagttgtcggattcagaagacaatgaagaagagcatgaaattcagctcggtagactagatctgtcacatacacaaaggcaacaaatatatgaagcactactggcgagaagtaataatggaaaacaaagaaagaacaacacaacgatagttgcaaaccagttcaatgttagccttcgtacagtccagcgtatttggaatagagcaaagggatgctgtcaacgtggtgagccagttgatgtttcatcaaggaaaccaaagcgttgtggcaacaaaaaaagcggcaagaacaattgcggcgagatgattctccggactccaccacagcggaagcgccgcgcaggctccggcgccggcgatgacgccgatctcggtcttgtcaaatccgtgggcgtcgcgagcgcgaccggccgtagtccggtctccgatcgccgcctggccctctacgaccgccccaccgccctcgcgcttgccgacgcccccggggagccgttcgacgacatggtctgcacgtaccactgccgccagatggtcaaatccgagttcatggtggcacttgacacggcagagaagcaagttcaggagtatcaaacaaaacttgttgccttggaggaccaattatctaagagtgaggatgaaagaatgcagtttctggataaacttaactatgtggaacaagaactggcagcaaccaaaggacgggagagtgcattacaggaacgcctactaaaggagttgggtgaatatcaggaacgatatcgtggtcaagtaatgaaaataaatgaacttgaggtacaactcaataaagagattgattctaggatcagtgcagaatcatcagtatcatccgcgaaggcattgatcaaagacttggaaggggatttgcatcgattatctgaaagttcagaaagggagaagaaaacccttaagaaggaactttcatacgtgaaagaagacttatccctatctgcttccaaaaataatgctgagcttgagaaaacaatactcagagcagaaaactatgagagtgaggcaaagttgttgaacgagcagttgaccaacttgaaaaagcaacttgacgagtgtctcagtgagaagaatgaaatggagctcaagctattgaattccagtgctttgcctaatcaacatgccccaacagaagaacagaagttgatcaagcttttgcaagaggagctccggaattatgaaaaagaagtgcatgaagctaaaaggttgaaatcttcccacatgaatgttgagttgctgaaagaaaaactattggaggagcaggggcgcagggaaagagcagaacttgaattatctaaactgcaggaaattggtgctagagcacataagctggagcttgaattagcatcttgtacagcactgctcagcaacatacctgatgtgtcttcttatgctgacataccccaaaagatcgcagatctgcaaaagcaagcattgacatatttgaacgaagttggtgaggtaacatcaaggttgaaagaattagaggttgcactagaatatgctgatctcagcaagcaacaagcagaaggtgaagctgctcttgctaaagagagggctgcaagtgctactagggaggtcaagcggcttgagcttatgcttactgcgatcagtgaagaaagagataagctgagaaaggaacatgctacggagtcggatcagtctgggatggaaaaaacgataagagagctggagagcattatacacgagctgaaagaattgattagtcacaaggacactgaactcaatataatgaatgaaagattaaaccttgaaacaaggaaagtgaagtctttggagcgagagggagatcagctacgctctcaggtggcattactagagtctaagttaggtcatggggattactctgcttcaagcacaaaagtactgcgcatgatgaatactcttggagtcgacaatgaagccaagcagacaatagaagtactgcaagctgagctaaagaaaacaaaagagaggctgcaagcagttgaagaactgaaaggacaaactgatcctggaaccgtggtagacgctaatattgctgaaaagttagcacaacttaagaatcaaattgcgacacttgaaaaacgtgaagaaagatacaaggcggtgtttgcagagaggatctcggtcttccggaaagcctgctgctcccttttcggttacaagatagtgatgaatgatcagcagcagtcaaatgggattcccgtaacacgctttattctgcagtcagtgtatgcccaaagcgatgatgaaaagcttgagtttgactatgaatcaggaagcactaatatcgtggtcaacgattacacatcccaacaagaaattgctcggcaggtcgacatctacataaggaggacgaactccataccagccttcactgccaacctgacaatggagtctttcaacaaaagaagtatatgctgaagacatgaaactagtgtcagggcacattgcttgatttctgtatgttatcattgacgaagagtatgtatatgagcactcacattggtgggtgaaaactgctcctgctaattgaagttgaggctggagctttgattctattcccaacggattctttttttccctttaactagcaaggcgtacatgagctcacaaacggaaaaaaattgggtgtagccagctagataataactctttagtaatttgtttttcttctatttatacggaccagcagccggtatatgtggtatatgtgaggggctgtacaagagattttttatatccggcactggcggagcggcagccgcagctggagaagaagccgccgcgcggggggagggcgccgctgtcggggaaggccgtcgcggcgctgtgcgtgacgagcttcgttgtggggctgctgctcagcggcaacgtgtcgctgatgtcggcctcggcggcggcggcggcgtcgtcgtcgtactcgagcagggacagtgtttccggctgcgacaacaagcgtaaactaggagagaaccagcaccccaaggatatcctgaacgaggtgtcgaggactcatcaagcaatacaatcgctggacaaggcggtgtccaccctggagatggagatggccgtggagcgcgcgaggagcgcggcggcgtggcatccggcaggagtcctccccagaaggccttcgtcgtggtcggcatcaacacggccttcaccagcaggaagcggcgcgactcgctccgggacacctgggtccccagaggtacgtaaacatgggccgtacgaacaaagcgcatgcattgatcatgcgcgcgcgcgcatatgtaacacacggacgggagggcgggcgcgtacgtatacgtgtgcagggcataagctgaggaagctggagcgggagaagggggtcgtgatccggttcgtgatcgggcacagcggcacgccgggcggcggcgcgctggaccgcgccctggacgcggaggaggccgagagcagggacttcctgcggctcgaccacgccgagggctaccacgagctgtcgtccaagaccaggagctacttcaccaccgccgtcgccacctgggacgccgacttctacgtcaaggtcgacgacgacatccacctcaacctcggtgcgtatacgtacgtactacgtgctcgctggccaaacacagaacgcggcgtcggctgtatgaagtctgggcctgtcctgtcacagaaaggagtgaagtaccacgagccagagtactggaagttcggtgactagggcaacaagtacttccgccacgccaccggccggccaaatctacgccatctccaaagacctcgccgcctacatctccatcaactagccgatccttcacaggttcgcgaacgaggacgtctcgctgggcgcgtggctgatcgtgctcgaggtcgagcacgtcgacgaccgaagcatgtgctgcgcgacgcctccagactgcgagtggaagaagcgagccggcaacgtgtgcgtagcgtccttcgacgggtcgtgcagcggcgtctgcaagtcggcggacaggatgatgcggcacatccactgcggcgaaggcgacggggccgtctggaacgccgccacgtgagattgcccatctcacatcgggaaccccaaccgttgctgtatgtggaggtggagcttcactcggcatccgattttctgaaaacgccaaggcgagagggaagcgaggtcgttgatccactgtttggcatattgagcattccgcatatgcatgacaagtatatggccgtttcacttgagacgtcatgctgtgatatgatccacgtaaaaagcgcatggattggtgtgtgtgaatgtgaatgtgaatgtacagacagggagtgaggggcttggattaatggtacttggtcgaccaactgaagtaatgctgttcactaatcatgatttgttttttttggcctattttgaactaac

SEQ ID NO: 209983 - DNA, 2583 bp, Zea Mays
gtgctctaatcaaaaatcaaacaaaccagaagctcctcctcgcctcccatcacttcctacgccacccgcgaagcgcgcccgaggcggcaccccaccgtcgtagtagaagacacgggacgcacccccgcagcctcgctcgctcgctcccctcacttcctccccgcgcgatccacggcccccgccccccgcgctcctgtctgctctccctctccgcaatggcgacgccctcggccgtgggcgccgcgtgcctcctcctcgcgcgggccgcctggccggccgccgtcggcgaccgggcgcgcccgcggcggctccagcgcgtgctgcgccgccggtgcgtcgcggagctgagcagggagggccccgcgccgcgcccgctgccacccgcgctgctggcgcccccgctcgtgcccggcttcctcgcgccgccggccgagcccacgggtgagccggcatcgacgccgccgcccgtgcccgacgccggcctgggggtcctcggtctcgaacctgaagggattgctgaaggttccatcgataacacagtagttgtggcaagtgagcaagattctgagattgtggttggaaaggagcaagctcgagctaaagtaacacaaaacattgtctttgtaactggcgaagcttctccttatgcaaagtctgggggtctaggagatgtttgtggttcattgccagttgctcttgctgctcgtggtcaccgtgtgatggttgtaatgcccagatatttaaatggtacctccgataagaattatgcaaatgcattttacacagaaaaacacattcggattccatgctttggcggtgaacatgaagttaccttcttccatgagtatagagattcagttgactgggtgtttgttgatcatccctcatatcacagacctggaaatttatatggagataagtttggtgcttttggtgataatcagatacacactcctttgctatgctgcatgtgaggctcctttggtccttgaattgggaggatatatttatggacagaattgcatgtttgttgtcaatgattggcatgccagtctagtgccagtccttcttgctgcaaaatatagaccatatggtgtttataaagactcccgcagcattcttgtaatacataatttagcacatcagggtgtagagcctgcaagcacatatcctgaccttgggttgccacctgaatggtatggagctctggagtgggtattccctgaatgggcgaggaggcatgcccttgacaagggtgaggcagttaattttttgaaaggtgcagttgtgacagcagatcgaatcgtgactgtcagtaagggttattcatgggaggtcacaactgctgaaggtggacagggcctcaatgagctcttaagctccagaaagagtgtattaaacggaattgtaaatggaattgacattaatgattggaaccctgccacagacaaatgtatcccctgtcattattctgttgatgacctctctggaaaggccaaatgtaaaggtgcattgcagaaggagctgggtttacctataaggcctgatgttcctctgattggctttattggaagattggattatcagaaaggcattgatctcattcaacttatcataccagatctcatgcgggaagatgttcaatttgtcatgcttggatctggtgacccagagcttgaagattggatgagatctacagagtcgatcttcaaggataaatttcgtggatgggttggatttagtgttccagtttcccaccgaataactgccggctgcgatatattgttaatgccatccagattcgaaccttgtggtctcaatcagctatatgctatgcagtatggcacagttcctgttgtccatgcaactgggggccttagagataccgtggagaacttcaaccctttcggtgagaatggagagcagggtacagggtgggcattcgcacccctaaccacagaaaacatgttgtggacattgcgaactgcaatatctacatacagggaacacaagtcctcctgggaagggctaatgaagcgaggcatgtcaaaagacttcacgtgggaccatgccgctgaacaatacgaacaaatcttccagtgggccttcatcgatcgaccctatgtcatgtaaaaaaggaccaaagtggtggttccttgaagatcatcagttcatcatcctatagtaagctgaatgatgaaagaaaacccctgtacattacatggaaggcagaccggctattggctccattgctccaatgtctgctttggctgccttgcctcgatggaccggatgcagtgaggaatccagccgaacgacagttttgaaggataggaaggggagctggaagcagtcacgcaggcagcctcgccgtgattcatatggaacaagctggagtcagtttctgctgtgccactcactgtttaccttaagattattacctgtgttgttgtcctttgctcgttagggctgataacataatgactcattagaaaatcatgcctcgtttttattaactgaagtggacacttcgcattcttgcccgtttaccagagatggccactgctgatggtgcattttgac

SEQ ID NO: 209984 - DNA, 2184 bp, Zea Mays
cggaagtaggggaaaattgagagtgcgtctcttacttgccttggtggtgtgattgtaaccccccgttgcaagtagttgtactccacggcaggggcaagttatcgggggattgctgaaggttccatcgataacacagtagttgtggcaagtgagcaagattctgagattgtggttggaaaggagcaagctcgagctaaagtaacacaaaacattgtctttgtaactggcgaagcttctccttatgcaaagtctgggggtctaggagatgtttgtggttcattgccagttgctcttgctgctcgtggtcaccgtgtgatggttgtaatgcccagatatttaaatggtacctccgataagaattatgcaaatgcattttacacagaaaaacacattcggattccatgctttggcggtgaacatgaagttaccttcttccatgagtatagagattcagttgactgggtgtttgttgatcatccctcatatcacagacctggaaatttatatggagataagtttggtgcttttggtgataatcagttcagatacacactcctttgctatgctgcatgtgaggctcctttggtccttgaattgggaggatatatttatggacagaattgcatgtttgttgtcaatgattggcatgccagtctagtgccagtccttcttgctgcaaaatatagaccatatggtgtttataaagactcccgcagcattcttgtaatacataatttagcacatcagggtgtagagcctgcaagcacatatcctgaccttgggttgccacctgaatggtatggagctctggagtgggtattccctgaatgggcgaggaggcatgcccttgacaagggtgaggcagttaattttttgaaaggtgcagttgtgacagcagatcgaatcgtgactgtcagtaagggttattcatgggaggtcacaactgctgaaggtggacagggcctcaatgagctcttaagctccagaaagagtgtattaaacggaattgtaaatggaattgacattaatgattggaaccctgccacagacaaatgtatcccctgtcattattctgttgatgacctctctggaaaggccaaatgtaaaggtgcattgcagaaggagctgggtttacctataaggcctgatgttcctctgattggctttattggaagattggattatcagaaaggcattgatctcattcaacttatcataccagatctcatgcgggaagatgttcaatttgtcatgcttggatctggtgacccagagcttgaagattggatgagatctacagagtcgatcttcaaggataaatttcgtggatgggttggatttagtgttccagtttcccaccgaataactgccggctgcgatatattgttaatgccatccagattcgaaccttgtggtctcaatcagctatatgctatgcagtatggcacagttcctgttgtccatgcaactgggggccttagagataccgtggagaacttcaaccctttcggtgagaatggagagcagggtacagggtgggcattcgcacccctaaccacagaaaacatgttgtggacattgcgaactgcaatatctacatacagggaacacaagtcctcctgggaagggctaatgaagcgaggcatgtcaaaagacttcacgtgggaccatgccgctgaacaatacgaacaaatcttccagtgggccttcatcgatcgaccctatgtcatgtaaaaaaggaccaaagtggtggttccttgaagatcatcagttcatcatcctatagtaagctgaatgatgaaagaaaacccctgtacattacatggaaggcagaccggctattggctccattgctccaatgtctgctttggctgccttgcctcgatggaccggatgcagtgaggaatccagccgaacgacagttttgaaggataggaaggggagctggaagcagtcacgcaggcagcctcgccgtgattcatatggaacaagctggagtcagtttctgctgtgccactcactgtttaccttaagattattacctgtgttgttgtcctttgctcgttagggctgataacataatgactcattagaaaatcatgcctcgtttttattaactgaagtggacacttcgcattcttgcccgtttaccagagatggccactgctgatggtgcattttgac

SEQ ID NO: 209985 - DNA, 1623 bp, Zea Mays
aaacacatatctttgtttctgtatctcaaacagcactttgtagttcagatatgttatttgagttctcctttaacttgaatttatcactccaagagtgttccttgccttcttgctgcaaaatatagaccatatggtgtttataaagactcccgcagcattcttgtaatacataatttagcacatcagggtgtagagcctgcaagcacatatcctgaccttgggttgccacctgaatggtatggagctctggagtgggtattccctgaatgggcgaggaggcatgcccttgacaagggtgaggcagttaattttttgaaaggtgcagttgtgacagcagatcgaatcgtgactgtcagtaagggttattcatgggaggtcacaactgctgaaggtggacagggcctcaatgagctcttaagctccagaaagagtgtattaaacggaattgtaaatggaattgacattaatgattggaaccctgccacagacaaatgtatcccctgtcattattctgttgatgacctctctggaaaggccaaatgtaaaggtgcattgcagaaggagctgggtttacctataaggcctgatgttcctctgattggctttattggaagattggattatcagaaaggcattgatctcattcaacttatcataccagatctcatgcgggaagatgttcaatttgtcatgcttggatctggtgacccagagcttgaagattggatgagatctacagagtcgatcttcaaggataaatttcgtggatgggttggatttagtgttccagtttcccaccgaataactgccggctgcgatatattgttaatgccatccagattcgaaccttgtggtctcaatcagctatatgctatgcagtatggcacagttcctgttgtccatgcaactgggggccttagagataccgtggagaacttcaaccctttcggtgagaatggagagcagggtacagggtgggcattcgcacccctaaccacagaaaacatgttgtggacattgcgaactgcaatatctacatacagggaacacaagtcctcctgggaagggctaatgaagcgaggcatgtcaaaagacttcacgtgggaccatgccgctgaacaatacgaacaaatcttccagtgggccttcatcgatcgaccctatgtcatgtaaaaaaggaccaaagtggtggttccttgaagatcatcagttcatcatcctatagtaagctgaatgatgaaagaaaacccctgtacattacatggaaggcagaccggctattggctccattgctccaatgtctgctttggctgccttgcctcgatggaccggatgcagtgaggaatccagccgaacgacagttttgaaggataggaaggggagctggaagcagtcacgcaggcagcctcgccgtgattcatatggaacaagctggagtcagtttctgctgtgccactcactgtttaccttaagattattacctgtgttgttgtcctttgctcgttagggctgataacataatgactcattagaaaatcatgcctcgtttttattaactgaagtggacacttcgcattcttgcccgtttaccagagatggccactgctgatggtgcattttgac

SEQ ID NO: 209986 - DNA, 1596 bp, Zea Mays
ggtattactacagatggtatttcccatgttctgggtgttgacatggttttacttctaaccttttatctgtcatagatccttcttgctgcaaaatatagaccatatggtgtttataaagactcccgcagcattcttgtaatacataatttagcacatcagggtgtagagcctgcaagcacatatcctgaccttgggttgccacctgaatggtatggagctctggagtgggtattccctgaatgggcgaggaggcatgcccttgacaagggtgaggcagttaattttttgaaaggtgcagttgtgacagcagatcgaatcgtgactgtcagtaagggttattcatgggaggtcacaactgctgaaggtggacagggcctcaatgagctcttaagctccagaaagagtgtattaaacggaattgtaaatggaattgacattaatgattggaaccctgccacagacaaatgtatcccctgtcattattctgttgatgacctctctggaaaggccaaatgtaaaggtgcattgcagaaggagctgggtttacctataaggcctgatgttcctctgattggctttattggaagattggattatcagaaaggcattgatctcattcaacttatcataccagatctcatgcgggaagatgttcaatttgtcatgcttggatctggtgacccagagcttgaagattggatgagatctacagagtcgatcttcaaggataaatttcgtggatgggttggatttagtgttccagtttcccaccgaataactgccggctgcgatatattgttaatgccatccagattcgaaccttgtggtctcaatcagctatatgctatgcagtatggcacagttcctgttgtccatgcaactgggggccttagagataccgtggagaacttcaaccctttcggtgagaatggagagcagggtacagggtgggcattcgcacccctaaccacagaaaacatgttgtggacattgcgaactgcaatatctacatacagggaacacaagtcctcctgggaagggctaatgaagcgaggcatgtcaaaagacttcacgtgggaccatgccgctgaacaatacgaacaaatcttccagtgggccttcatcgatcgaccctatgtcatgtaaaaaaggaccaaagtggtggttccttgaagatcatcagttcatcatcctatagtaagctgaatgatgaaagaaaacccctgtacattacatggaaggcagaccggctattggctccattgctccaatgtctgctttggctgccttgcctcgatggaccggatgcagtgaggaatccagccgaacgacagttttgaaggataggaaggggagctggaagcagtcacgcaggcagcctcgccgtgattcatatggaacaagctggagtcagtttctgctgtgccactcactgtttaccttaagattattacctgtgttgttgtcctttgctcgttagggctgataacataatgactcattagaaaatcatgcctcgtttttattaactgaagtggacacttcgcattcttgcccgtttaccagagatggccactgctgatggtgcattttgac

SEQ ID NO: 209987 - DNA, 1579 bp, Zea Mays
cttttgcggtacgcacggatattcgtttttttcacctgcaaatctgcaataaaacgccgccaccgccgcggcgccaccacctcaagatccgatctccctctctctccccaatcctccccgcctccccctaccaaatcagcaccacccaaggcgcatccgagccacggccgcgcaatgccgccctctgtcgatgcaatgccggcccccggcgacgccgcgggcgccggcgacgtgcgcatgatctcctccaaggagctccgcgctcacgcttccgccgacgacctctggatctccatctccggcgacgtgtacgacgtcacgccctggctcccccacccccaaggtccagctcgtcctgatggccgtcctcttctacgccgcgctgtacctcgtcctcgcatgcgccagcgcctgggcgcacctcctcgcggggggtctcattggcttcgtctggatccagtccggctggatgggccacgactcgggccaccaccgcatcaccggccatccggtcctcgaccgcgtcgtgcaggtgctctccgggaactgcctcaccggcctcagcatcgcctggtggaagtgtaaccacaacacgcaccacatcgcctgcaacagcctggaccatgacccggacctccagcacatgccgctctttgccgtctcccccaagctgttcggcaacatatggtcctacttctaccaacggaccctggcgttcgatgccgcctcgaaattcttcatcagctaccagcactggaccttctacccggtaatgtgcatcgccaggataaatcttctcgcgcagtccgccctgttcgttctcacggagaagagggtgccgcagcggttgcttgagatcgcgggggtcgccacattctgggcttggtacccgttgctggtggcttccctgccgaattggtgggagagggtcgcgtttgtgcttttcagcttcaccatctgcgggattcagcacgtccaattctgcctgaaccacttctcgtccgacgtgtatgtcgggccacccaagggcaatgactggtttgagaagcagacggcaggcacgctcgacatcctgtgctctccttggatggattggttccacggtggcctgcagttccagattgagcaccatctgtttccccgcctacctcggtgccaccttcgcaaggttgcaccggccgtccgcgacctttgcaagaagcatgggctcacttattctgcagccacattctggggtgcaaatgtgcttacatggaagacactcagggctgctgcattgcaggccaggaccgctacaagtggtggtgctccgaagaatttggtatgggaggctgtgaacacccatggataaatgggatgaagatacgggctaatggcaacttctggtgttcagcttggtgcccatgtgattgtctggatgcctttcagttatttagagatattgatcattcaacctgcctgagtcaggttggaattttcgtgttgacaagtggctgtctatccagttggagagttcatgcttcaatagtctggttgttcacgggatgttctgttctccctatcacgaacaatctctttg

SEQ ID NO: 209988 - DNA, 900 bp, Zea Mays
ctccttgaccaccctaatgttgttgctttgaagcattgcttcttttcaacaactgagaaggatgagctttatctaaatttggtccttgattatgttccgaagatagttcatcgagttgtgaaacatcacaacaagatgcaccaacacatgccacttatttatgtgaagctttatatgtaccagatatgtagagcattggcttacattcatggtactatcggtgtctgccagagatattaagccacaaaatcttttgtacaggtgaacccacacacccaccagcttaaactatgtgactttggtagtgcaaaagttctggtcaagggggaaccaaacatatcatacatctgctcgcgatactatagggctccagagctcatatttggtgccactgagtataccacagcgattgacatttggtctgctggttgtgttcttgctgagcttatgctagggcaggtccttggtactccaacaagggaagaaattaaatgcatgaacccgaattgcacagagtttaagttcccacaaatcaaagcacacccatggcacaaggtattcaacaaaaggatgccgccagaagctgttgatctggtctctcggctactccagtactccccaaatctgagatgcactgctgtggaggcgcttgtccacccattctttgacgagcttcgagatcctaatactcgtcttccaaatggccgcttcctgccaccccttttcaacttcaagcctcacgaattgaaaggagtcccagcagacattgttgcgagattggttccagaacatgcgaagaagcaatgctcttatgttggatcgtgagatgaccgtgccttgggactggaacctgaggttgcaatcgtgcatttcccctgcgtttgagacgactgaggaaat

SEQ ID NO: 209989 - DNA, 1419 bp, Zea Mays
ctaagatggatgaccatagttcaaggccaagtgtttggaaacgggtgagactgttgccataaagaaggttcttcaagacaagcgttacaagaaccgcgaactgcagaccatacgcctccttgaccaccctaatgttgttgctttgaagcattgcttcttttcaacaactgagaaggatgagctttatctaaatttggtccttgattatgttccgaagatagttcatcgagttgtgaaacatcacaacaagatgcaccaacacatgccacttatttatgtgaagctttatatgtaccagatatgtagagcattggcttacattcatggtactatcggtgtctgccagagatattaagccacaaaatcttttgtacaggtgaacccacacacccaccagcttaaactatgtgactttggtagtgcaaaagttctggtcaagggggaaccaaacatatcatacatctgctcgcgatactatagggctccagagctcatatttggtgccactgagtataccacagcgattgacatttggtctgctggttgtgttcttgctgagcttatgctagggcaggtgaaagtggtgtggaccaactcgtagaaatcatcaaggtccttggtactccaacaagggaagaaattaaatgcatgaacccgaattgcacagagtttaagttcccacaaatcaaagcacacccatggcacaaggtattcaacaaaaggatgccgccagaagctgttgatctggtctctcggctactccagtactccccaaatctgagatgcactgctgtggaggcgcttgtccacccattctttgacgagcttcgagatcctaatactcgtcttccaaatggccgcttcctgccaccccttttcaacttcaagcctcacgaattgaaaggagtcccagcagacattgttgcgagattggttccagaacatgcgaagaagcaatgctcttatgttggatcgtgagatgaccgtgccttgggactggaacctgaggttgcaatcgtgcatttcccctggtatgttggatgatcttgaggcatgcgagcctgtcgttgaagatgcaaggttacctactttacgacgtacgccaatgcgacctgtgtagctgtgagtagtctaatgttgcagtgacatgtaatggcgcacccccgtcctactaacagatgcttactggagattgccatagctgatcttgtaatttgttatagggcagtatgaatatatttatggtagcttgaatctatttgtggattcacttcgtttttccatgtttccttgtctccagacctggactggactgctatcggtttttgtttcagaattcctagctacctgttgcctagtgcctcccagcttgctcctgtcgattatttgcacactggcgatggtacctgttcttgattg

SEQ ID NO: 209990 - DNA, 1400 bp, Zea Mays
tgaagcggtgaatcatcgtctaagatggatgaccatagttcaaggccaagtgtttggaaacgggtgagactgttgccataaagaaggttcttcaagacaagcgttacaagaaccgcgaactgcagaccatacgcctccttgaccaccctaatgttgttgctttgaagcattgcttcttttcaacaactgagaaggatgagctttatctaaatttggtccttgattatgttccgaagatagttcatcgagttgtgaaacatcacaacaagatgcaccaacacatgccacttatttatgtgaagctttatatgtaccagatatgtagagcattggcttacattcatggtactatcggtgtctgccagagatattaagccacaaaatcttttgtacaggtgaacccacacacccaccagcttaaactatgtgactttggtagtgcaaaagttctggtcaagggggaaccaaacatatcatacatctgctcgcgatactatagggctccagagctcatatttggtgccactgagtataccacagcgattgacatttggtctgctggttgtgttcttgctgagcttatgctagggcaggtccttggtactccaacaagggaagaaattaaatgcatgaacccgaattgcacagagtttaagttcccacaaatcaaagcacacccatggcacaaggtattcaacaaaaggatgccgccagaagctgttgatctggtctctcggctactccagtactccccaaatctgagatgcactgctgtggaggcgcttgtccacccattctttgacgagcttcgagatcctaatactcgtcttccaaatggccgcttcctgccaccccttttcaacttcaagcctcacgaattgaaaggagtcccagcagacattgttgcgagattggttccagaacatgcgaagaagcaatgctcttatgttggatcgtgagatgaccgtgccttgggactggaacctgaggttgcaatcgtgcatttcccctggtatgttggatgatcttgaggcatgcgagcctgtcgttgaagatgcaaggttacctactttacgacgtacgccaatgcgacctgtgtagctgtgagtagtctaatgttgcagtgacatgtaatggcgcacccccgtcctactaacagatgcttactggagattgccatagctgatcttgtaatttgttatagggcagtatgaatatatttatggtagcttgaatctatttgtggattcacttcgtttttccatgtttccttgtctccagacctggactggactgctatcggtttttgtttcagaattcctagctacctgttgcctagtgcctcccagcttgctcctgtcgattatttgcacactggcgatggtacctgttcttgattg

SEQ ID NO: 209991 - DNA, 1395 bp, Zea Mays
tgaagcggtgaatcatcgtctaagatggatgaccatagttcaaggccaagtgtttggaaacgggtgagactgttgccataaagaaggttcttcaagacaagcgttacaagaaccgcgaactgcagaccatacgcctccttgaccaccctaatgttgttgctttgaagcattgcttcttttcaacaactgagaaggatgagctttatctaaatttggtccttgattatgttccgaagatagttcatcgagttgtgaaacatcacaacaagatgcaccaacacatgccacttatttatgtgaagctttatatgtaccagatatgtagagcattggcttacattcatggtactatcggtgtctgccagagatattaagccacaaaatcttttggtgaacccacacacccaccagcttaaactatgtgactttggtagtgcaaaagttctggtcaagggggaaccaaacatatcatacatctgctcgcgatactatagggctccagagctcatatttggtgccactgagtataccacagcgattgacatttggtctgctggttgtgttcttgctgagcttatgctagggcaggtccttggtactccaacaagggaagaaattaaatgcatgaacccgaattgcacagagtttaagttcccacaaatcaaagcacacccatggcacaaggtattcaacaaaaggatgccgccagaagctgttgatctggtctctcggctactccagtactccccaaatctgagatgcactgctgtggaggcgcttgtccacccattctttgacgagcttcgagatcctaatactcgtcttccaaatggccgcttcctgccaccccttttcaacttcaagcctcacgaattgaaaggagtcccagcagacattgttgcgagattggttccagaacatgcgaagaagcaatgctcttatgttggatcgtgagatgaccgtgccttgggactggaacctgaggttgcaatcgtgcatttcccctggtatgttggatgatcttgaggcatgcgagcctgtcgttgaagatgcaaggttacctactttacgacgtacgccaatgcgacctgtgtagctgtgagtagtctaatgttgcagtgacatgtaatggcgcacccccgtcctactaacagatgcttactggagattgccatagctgatcttgtaatttgttatagggcagtatgaatatatttatggtagcttgaatctatttgtggattcacttcgtttttccatgtttccttgtctccagacctggactggactgctatcggtttttgtttcagaattcctagctacctgttgcctagtgcctcccagcttgctcctgtcgattatttgcacactggcgatggtacctgttcttgattg

SEQ ID NO: 209992 - DNA, 599 bp, Zea Mays
cttgttcataatacaccaacagtcttccaggccaagtgtttggaaacgggtgagactgttgccataaagaaggttcttcaagacaagcgttacaagaaccgcgaactgcagaccatacgcctccttgaccaccctaatgttgttgctttgaagcattgcttcttttcaacaactgagaaggatgagctttatctaaatttggtccttgattatgttccgaagatagttcatcgagttgtgaaacatcacaacaagatgcaccaacacatgccacttatttatgtgaagctttatatgtaccagatatgtagagcattggcttacattcatggtactatcggtgtctgccagagatattaagccacaaaatcttttgtacaggtgaacccacacacccaccagcttaaactatgtgactttggtagtgcaaaagttctggtcaagggggaaccaaacatatcatacatctgctcgcgatactatagggctccagagctcatatttggtgccactgagtataccacagcgattgacatttggtctgctggttgtgttcttgctgagcttatgctagggcaggtgaaagtggtgtggaccaa

SEQ ID NO: 209993 - DNA, 1904 bp, Zea Mays
cgcctcgccctgctgctaatccagttccctacgcgcgctactgcatacagctatatttctctgatcggagaagaaggcgagcgcgcggtgtccaccactccctcctctcctctcccgtcctatccatccggcacgcccagcatccatccactcctcccctgctccggctccggctccggctccgccatgggcctttcaacagtttactccccggccggaccgcgcctcgtgccggcccctctcggccgctgccgctctgcccagccccgccgcccgcgccgagccccgctcgccaccgtccggtgctccgtcgacgccaccaagcaggcgcaggatggcgtggcgacggcggtcgcgacggaggcgccggcgtcgcggaaggagtgcttcggggtcttctgcaccacctacgacctcaaggcggaggacaagaccaagtcgtggaagaagctagtgaatgttgctgtgtcaggcgcggccgggatgatatcaaatcacctgctgttcaactcgcttctggtgaggttttcggacaagaccaaccaatagcacttaagctactcggctcagaaagatcgtttcaagccctcgaaggtgtagctatggaactggaggactcgctgtatccactgctgagggaagtcagcattggcatagatccttacgtggtctttcaagatgtagattgggcccttcttattggcgctaagccccgaggtcccggcatggagcgagctgcgctactggatatcaatggccaaatctttgctgaccaggggaaagcacttaatgcggtcgcctcgcggaacgcgaaagtcttagttgtcggaaatccctgtaacactaatgcgctgatttgtttgaaaaatgccccaaacataccggcaaaaaactttcatgcattgacgaggttggatgaaaatagagcaaagtgccagctggcactaaaagcaggtgtattttatgacaaagtatcaaacgtgactatttgggggaaccattcgacgactcaggttcctgatttcttgaatgccaaaattgatggaagaccagtgaaagaagtcattaaggataccaagtggttagaggaagagttcaccctcacagttcaaaagcgtggaggtgtgctcatccaaaaatggggcagatcatcagctgcatcgaccgctgtttcgatagtggatgctattagatccctcgtaactcctaccccagaaggtgactggttttctacaggggtttatacgactggaaatccttatggcatagcagaggatatcgtgttcagcatgccatgcagatcgaagggtgatggtgattacgaactagctagtgatgtgttgatggacgattttctctgggaacggattaaaaagagcgaagctgaattgcttgctgagaagaaatgcgttgcccatcttacaggagaggggaatgcattctgtgatcttccggaagataccatgctaccaggagaagtgtagtttagttacagaagcaacagcagcggaatgcatttgccaatacattagctgagacttgaaacatctgcttgccagatgcagcaactacttttatatatatatgtgtatattcaataattgtgccacacgaatttgactatgatgcaaacctcttacacaggcgtgtgccgttcagccacaacttgcattcatcgttacgttgtgaaccatcatgactcccatggaggatctgaaatatatatacatgattttgcactatcatcgccactgcaactagaagcatggcaaatgacatcatcacaccaatgaggcgattcgcatactattattaaatgctctctccattctaagttataaattatgttattaagagtcgaagcatcttaaatttagtcaacattatagaaaaaaaaatacaaa

SEQ ID NO: 209994 - DNA, 914 bp, Zea Mays
ttggtgcggactgtggaccgtggacgtgtggaggacaagaccaagtcgtggaagaagctagtgaatgttgctgtgtcaggcgcggccgggatgatatcaaatcacctgctgttcaaactcgcttctggtgaggttttcggacaagaccaaccaatagcacttaagctactcggctcagaaagatcgtttcaagccctcgaagattgggcccttcttattggcgctaagccccgaggtcccggcatggagcgagctgcgctactggatatcaatggccaaatctttgctgaccaggggaaagcacttaatgcggtcgcctcgcggaacgcgaaagtcttagttgtcggaaatccctgtaacactaatgcgctgatttgtttgaaaaatgccccaaacataccggcaaaaaactttcatgcattgacgaggttggatgaaaatagagcaaagtgccagctggcactaaaagcaggtgtattttatgacaaagtatcaaacgtgactatttgggggaaccattcgacgactcaggttcctgatttcttgaatgccaaaattgatggaagaccagtgaaagaagtcattaaggataccaagtggttagaggaagagttcaccctcacagttcaaaagcgtggaggtgtgctcatccaaaaatggggcagatcatcagctgcatcgaccgctgtttcgatagtggatgctattagatccctcgtaactcctaccccagaaggtgactggttttctacaggggtttatacgactggaaatccttatggcatagcagaggatatcgtgttcagcatgccatgcagatcgaagggtgatggtgattacgaactagctagtgatgtgttgatggacgattttctctgggaacggattaaaaagttgaccctgtaatattttca

SEQ ID NO: 209995 - DNA, 1397 bp, Zea Mays
cgcctcgccctgctgctaatccagttccctacgcgcgctactgcatacagctatatttctctgatcggagaagaaggcgagcgcgcggtgtccaccactccctcctctcctctcccgtcctatccatccggcacgcccagcatccatccactcctcccctgctccggctccggctccggctccgccatgggcctttcaacagtttactccccggccggaccgcgcctcgtgccggcccctctcggccgctgccgctctgcccagccccgccgcccgcgccgagccccgctcgccaccgtccggtgctccgtcgacgccaccaagcaggcgcaggatggcgtggcgacggcggtcgcgacggaggcgccggcgtcgcggaaggagtgcttcggggtcttctgcaccacctacgacctcaaggcggaggacaagaccaagtcgtggaagaagctagtgaatgttgctgtgtcaggcgcggccgggatgatatcaaatcacctgctgttcaaactcgcttctggtgaggttttcggacaagaccaaccaatagcacttaagctactcggctcagaaagatcgtttcaagccctcgaaggtgtagctatggaactggaggactcgctgtatccactgctgagggaagtcagcattggcatagatccttacgtggtctttcaagatgtagattgggcccttcttattggcgctaagccccgaggtcccggcatggagcgagctgcgctactggatatcaatggccaaatctttgctgaccaggggaaagcacttaatgcggtcgcctcgcggaacgcgaaagtcttagttgtcggaaatccctgtaacactaatgcgctgatttgtttgaaaaatgccccaaacataccggcaaaaaactttcatgcattgacgaggttggatgaaaatagagcaaagtgccagctggcactaaaagcaggtgtattttatgacaaagtatcaaacgtgactatttgggggaaccattcgacgactcaggttcctgatttcttgaatgccaaaattgatggaagaccagtgaaagaagtcattaaggataccaagtggttagaggaagagttcaccctcacagttcaaaagcgtggaggtgtgctcatccaaaaatggggcagatcatcagctgcatcgaccgctgtttcgatagtggatgctattagatccctcgtaactcctaccccagaaggtgactggttttctacaggggtttatacgactggaaatccttatggcatagcagaggatatcgtgttcagcatgccatgcagatcgaagggtgatggtgattacgaactagctagtgatgtgttgatggacgattttctctgggaacggattaaaaagttgaccctgtaatattttca

SEQ ID NO: 209996 - DNA, 1276 bp, Zea Mays
ctatgatttgactcctatcatgtatttttatccttatattttgacagttgttaagcatgcttttagattatactcccttgttgctgatggtaataataaaaaaatctgtctgtttcctttcagacggtgcacccaagtaacccaacatttttctctgcagattgacttggatacaattgaagttagcaatctgaatagacagtttttgtttcggcagagtcatgttggtcagtcaaaagctaaagttgctcgggatgctgtattgaaatttaggccaaatatcaatataaacccataccatgcaaacgtgaaggattctcatttcaatgttgatttcttcaagcaatttaatgttgttctgaatggtcttgataacttggatgctagacgccatgttaatcgcctttgccttgctgctgatgttcctttggttgaaagtggtactactggttttttgggacaggttactgttcatgtcaagggtaaaacagagtgctatgagtgtcaaccaaagcctgtccctaaatcatatcctgtctgcacaattacaaacacaccatcaaagtttgttcattgcattgtttgggcgaaagatctgctttttgcaaaattatttggtgataaaaaacaggataatgatcttaatgtgcactccaaagatgataccagttcaaaaacagatgtttttgaaaggagtgtagatgaagatcttgagcaatacacccagagaatatatgaccacgtatttggttacaacattgaagttgcattggataataaggaaacttggaagaatcggagaaagccaaaccctatttacattagagatgcattgcctgaagacgctgttcaacaaaatggtcgctctcaggatcacgtgaatgaggagcaggatccttctgctatggtatccttaggccttagaaatacacaagagatatggagtcttgctgacaattcaagagtgttcttggaggctttaaaattattttttgacaaaagagagaaggaaatagggagccttatttttgacaaggacgaccagttggctgttgagtttgttaccgctgcagcaaatatcagagcttcctcttttggaataccactgcatagtctttttgaagctaaaggtgttgctggaaatatagttcatgctgtggcaactaccaatgctataattgctggtctaatcgtcatcgaggcaattaaagtgctcaagggtgattatcaagattataggtgcttacgccttatataatgggacggagagagtaat

SEQ ID NO: 209997 - DNA, 2222 bp, Zea Mays
cttggatacaattgaagttagcaatctgaatagacagtttttgtttcggcagagtcatgttggtcagtcaaaagctaaagttgctcgggatgctgtattgaaatttaggccaaatatcaatataaacccataccatgcaaacgtgaaggattctcatttcaatgttgatttcttcaagcaatttaatgttgttctgaatggtcttgataacttggatgctagacgccatgttaatcgcctttgccttgctgctgatgttcctttggttgaaagtggtactactggttttttgggacagtttgttcattgcattgtttgggcgaaagatctgctttttgcaaaattatttggtgataaaaaacaggataatgatcttaatgtgcactccaaagatgataccagttcaaaaacagatgtttttgaaaggagtgtagatgaagatcttgagcaatacacccagagaatatatgaccacgtatttggttacaacattgaagttgcattggataataaggaaacttggaagaatcggagaaagccaaaccctatttacattagagatgcattgcctgaagacgctgttcaacaaaatggtcgctctcaggatcacgtgaatgaggagcaggatccttctgctatggtatccttaggccttagaaatacacaagagatatggagtcttgctgacaattcaagagtgttcttggaggctttaaaattattttttgacaaaagagagaaggaaatagggagccttatttttgacaaggacgaccagttggctgttgagtttgttaccgctgcagcaaatatcagagcttcctcttttggaataccactgcatagtctttttgaagctaaaggtgttgctggaaatatagttcatgctgtggcaactaccaatgctataattgctggtctaatcgtcatcgaggcaattaaagtgctcaagggtgattatcaagattatagaatgacatattgccttgagcatccagcaaggaagatgctcttgatgcctgtcgagccttttgaacctagtaaatcatgttatgtctgctctgagaccccacttgttctggaggttaataccaagacaacaaagctccgggaagtcattgaaaaggttataaaaggtaagcttggaatgaacctacctttgataatggttggcgccacacttgtttttgaggatggtgaagatctggaggaggatgagattgcaaattatgctttaaaccttgaaaaggtcttggctgaacttccagctccagttctaaatggtacaatggttacagtcgaggatttgcatcaggaactaaaatgcagtatcaacatcaaacacagggatgagttcgatgaagaaaaggagcctgacagaatggttcttgttgggtggtctggcccagttgataagcaaaccactagtaatggtgagactaaatcagttccatcttcatccaatacagaagatgtggatggtactgccgaggacatatcagcaacttctggaatgaagcgtaagctgaacgaaatattagagacaaaggagaattttgatgctctcgaaaatctttcgggtgttgattccagcagcgctcaagttgttgaagatgacaatgacgatggccttcttatgtttgatgaggacccaaggcaaagtaagaagaagagattgcagtagcatcctgctgcggcgataacagctcttgactcccggcatcgtggctaacacattgttcgatcgtaacatctttgataacttatttatgcggttatgtaccaggttgatgttgaaacattagtaacaatgcccagggcaccttttggcctcagatagtcagataccctgtagggttgtaatttgtaggatttaggaacaagagcaactaatgctcagctgacagcctgctgcgagatagaatttgtatctcaagagccaaggtcctgttttggttatgttttttgttcagttgaggggtgaccgggtgaaccaagctctgtcttgttaggtgccaatcacagggtctggaaatatgtactcatcctgtattcttgctaaggttatggatcagatggtgtatatatctgtgcaaaacactaatttatagttttgcactaatctacactgtagattatattgtttaccgagtgaagtttgaagtaaacggctggaaatagcttaacgttaagcaatatgcgaaacaaggattgggtttttg

SEQ ID NO: 209998 - DNA, 1496 bp, Zea Mays
gcaaatgccaaatgtgcaacctggccggcccggccgtctgcccgtctgccttcggcgtgcagatctccccaactccaggaccagaaaacccacgcgaagaccagagcagcgggtggactcggcaccggccgtcgggaccgcgacgatggccgccgcctggcctctctccgccatcgccggcatcctgccggcctccctctcgctgaccctcctcctcgccaccctcgtatccatcctggtgctgggcgcagcggcgttcttcttcgagcacatccgcaagataggatgcatgcactcgctggagaggtccgccgtctcggacgccttcttcgaggaccccaactcgctcaagaaggtgccctgcccgtcggttttggatcctcctgagaaatatatttcgttgatagttcctgcctacaatgaggagtatcgactccccgaggctcttacagaaacactcaactacttgaagcggagatcaactgctgacaagtccttttcatatgaggtattgattgtcgatgatggtagcactgatgggacctctaaagtcgctttcagttttgtaaagaaacacaagattgataatgttagagttcttctacttggaagaaatcatgggaaaggtgaagcagtccgaaaacatctaatagggaatgcttcattcacgtggtgaactattactcatgcttgatgctgatggtgcaactaaagtgaccgatttggaaaagcttgaagctcaggttcatgcattggctaagaaagctaagtctagcccagggacatctactagttcatctcagaatctatctgatgttgaagttgctgtttttggttcccgagctcatctagagaagcaggctcttgcgacaaggaaatggtatagaaactttcttatgaaaggtttccatttggtagttttgttgactgctggtcccgggatcaaagatacacagtgtgggtttaagatgttcacacgagcagctgcaaggaagcttttcacaaatatcagattgaagaggtggtgtttcgatgttgaacttgtatacctgtgcaagcgcctcaggatcccaatggtagaagtatccgttaattggaccgagatacctggatccaaagtgcgcatgacgagcatcatgcacatggtattcgagctcctgctgatcaaagtaggttatggactggggatatggaaaatcggctcgtagatccttgacattctatgctgactagtttctgcaactcagtttggaggaatactgtacaattttccgcaaaacctagttggtcgccagcaaatccatttggaggaatactgtacaattttccgagattttcaaatcgagagcatcaattcacatgtaccctagtgtttgatcatagagacgttgacagatgtaggccaaaattgttgtcccagctatatccttttactgatttgttatacaggaactcaaacgtgttgccaatattgttcattctagtttatagttgtt

SEQ ID NO: 209999 - DNA, 1440 bp, Zea Mays
gcaaatgccaaatgtgcaacctggccggcccggccgtctgcccgtctgccttcggcgtgcagatctccccaactccaggaccagaaaacccacgcgaagaccagagcagcgggtggactcggcaccggccgtcgggaccgcgacgatggccgccgcctggcctctctccgccatcgccggcatcctgccggcctccctctcgctgaccctcctcctcgccaccctcgtatccatcctggtgctgggcgcagcggcgttcttcttcgagcacatccgcaagataggatgcatgcactcgctggagaggtccgccgtctcggacgccttcttcgaggaccccaactcgctcaagaaggtgccctgcccgtcggttttggatcctcctgagaaatatatttcgttgatagttcctgcctacaatgaggagtatcgactccccgaggctcttacagaaacactcaactacttgaagcggagatcaactgctgacaagtccttttcatatgaggtattgattgtcgatgatggtagcactgatgggacctctaaagtcgctttcagttttgtaaagaaacacaagattgataatgttagagttcttctacttggaagaaatcatgggaaaggtgaagcagtccgaaaaggaatgcttcattcacgtggtgaactattactcatgcttgatgctgatggtgcaactaaagtgaccgatttggaaaagcttgaagctcaggttcatgcattggctaagaaagctaagtctagcccagggacatctactagttcatctcagaatctatctgatgttgaagttgctgtttttggttcccgagctcatctagagaagcaggctcttgcgacattttgttgactgctggtcccgggatcaaagatacacagtgtgggtttaagatgttcacacgagcagctgcaaggaagcttttcacaaatatcagattgaagaggtggtgtttcgatgttgaacttgtatacctgtgcaagcgcctcaggatcccaatggtagaagtatccgttaattggaccgagatacctggatccaaagtgcgcatgacgagcatcatgcacatggtattcgagctcctgctgatcaaagtaggttatggactggggatatggaaaatcggctcgtagatccttgacattctatgctgactagtttctgcaactcagtttggaggaatactgtacaattttccgcaaaacctagttggtcgccagcaaatccatttggaggaatactgtacaattttccgagattttcaaatcgagagcatcaattcacatgtaccctagtgtttgatcatagagacgttgacagatgtaggccaaaattgttgtcccagctatatccttttactgatttgttatacaggaactcaaacgtgttgccaatattgttcattctagtttatagttgtt

SEQ ID NO: 210000 - DNA, 803 bp, Zea Mays
ctatccttcactgcttcaaagatgccacacaagaaacaataaattaaggacactaaggatgaatctggcaggttctctggtgtcttctcttctagtggttcaccaagacatggtttctcaagaagttcaagcagattgtccatgcaggatgatactgatgatgcagattttccttttgctgtggatgatgtttatccagattcacggccagggagtagtagtggaaaggacacaggggatcaggctggttcgtcatcccataaatcccaagatgctgctgttgggtatctcgtccacctgctgaaatctgcacgtccactgagagattctacctactcatctcatacatcaaggggtgaatctaccgaagcaggaagcaccagctctttcttgtcccgcaggacatccgacgcactggaggagtttgaatctttcaaggaaacaagggagaacctgctagcacgtagtagatctcggctgcaagattcattggataagccctagtgttgatgcagtctgtggttcgattcctcaaaaggtgaagggtccaaactgtagagtaaagatcatatggcgagcctgggtaaactctttatttcagactagtccgtgtgtaaatagctaattaactggcgcttgattccgaaagagaatacacaggtcgccgttgattctattgttggaaacttgtcattcttaaactcaaagcaggaatatcgtgtgcctttgttcatagtgtttgtttacaagtgaaatcaacatgataatccatctttatcaaaatagaattcgttttgcttatt

SEQ ID NO: 210001 - DNA, 902 bp, Zea Mays
gcagtactgcagcggatcccgatcccatggcacacggtcgtttgaggcattgcgagtcccgagtcgactctctcccgtttcccggccgtccccttcaccaatccaatccaactccaattcgtcctccggtcctccccctcgaggcctacgcacaatagattcgatctcgagtcctcgaatcctgccttttcctctggtcaggaaagcatgagcttgatttccggcgcttctcgccgtcgagctcgaaccagaagataagaagaatccgctaggggcgagccccatagaagatggccccgcacccgcaggaggacaaatcagatcggcacagcagcggcgccggtgcgtcgagggagcaggaacggcggccgtccaaggcatggggaatcctcatcttcggcctcatcggcgtcaccaccgccagtttcgctattactcaagttcgcaaaagcatggactggttctacactcagtcaacatcatcttggacttggaggtatacaagtaataactcaagtcgtggaagcttcagtgaggaagctaagaaaagatattatcagcgaatgcagcaggaatatgaagaggaacaagagagagttcaaagaataaggcatatgcagagtgtcttcaacagagagaggaataaatttggacgaggttatgaaagctggagggagaatggccctcctcgtggctacaattacatccctcgggatgattggtattggcagaccgatacttctcactcagaacataaaaataggcggacgtacacaccggcaggacctagggtttatcctatgtcgcatcactatgcagttctaggtcttgacagatcacgagcgacaccatatacagatgcagaagtgaagtttataacggagctgattatgaggatgatg

SEQ ID NO: 210002 - DNA, 2406 bp, Zea Mays
caaaaagtagcgcgtcaacattacgttgaaacccaggggagaaattgcaaacacaaactagcggaatggcagaaaaggcaccgccacctccaccgaaaaaggcactccccagcgcgggaagcagcgcaggtggcggagccggaggcggtgcagcagcagcgccccccgcgccgggacaggagccctcatcttcgccaccacggtcaccgtcgcctcccgaaccgttcacgtacaacttcggcgcaggaagtaccggaggcggaggcggcgacggtgcagcagcagcgccccccgcgccgagacaggagccctcttcgccgctacggtcaccgtcgcctcccgaaccgttcacgtacaacttcggcgcgggaagtaccggaggcggaggaggcgatggtgcagcagcagcgctccccgcgccgagacaggagccctcttcttcgccgccacggtcaccgtcgcctcccaaaccgtttacgtacaagcagaaggcggtgtggcgctggcgctggaagaggcagagggggcgcggcgcgggaagaggcagaggcggcgcgacgggaccgaaactctcttatttgccgtcgccgctttcacggccgttctccggtgacgaggttgatgatgaaaagccggacgaatttgaaaaagaaaacggatggggttctctgttcatgagtgaccctcaagttctttctatgcacgatccacaaaatctccctcgttatattggccggcaaaaatgtgatccgatcagcacacaggagttttttgcactgcgccacgattggctacagctgctagatggcaagaagacatacctccgtggtactgccgactccaattatgccgactctaacttcgtaaccccaaaacctcttacggtcgcagtattatgtcagatacttaatgaacattatgtgtgcttcagaccaatgcgaacggatgggtcacagttttacagagcgttccttttctcttacttggaaaatcttgggaaaatgcaaggtagtcaagctgaggtgactcgcttaatggaatgcgtggcaaggtccaaagtgaatttctgtcgtttagaatggaataaagcatacttctcaaatccaaaagcatttttctcaagtgttgtttctgaatttgagcacttggtcaattcagttgcaaatgggctgaatgctgatgagctttacaagataagcgtacaggagaattcgtcatccaggattctttgtttgcttagattgctgacagaagttcatatccgtacacatgaagtggactacaacagagaactgagtcagaatcggaaagaaaaaataaaagcacttttgcactgcaaaaaatctgtgcgtccctttgacgctgatgccgaccttttagaaatgaaggctctatcacaagctcttggcattcccttgcacctagcagctgtggacgataaccccctgcccgacagaactgtgcaagtaaagtggattgacttcattcctcgaccaggacctctcggttcaatcagagaatactacctaggacctctcggttcaatcagacaatactacctacccagtgcaactgataaacatccagtcttgccagctgaaaactttcttttgtctggtcgcatgcctctagtcaccatattaaggactgtccgtgctactgccattctttatcgcaagtgaacagattctgagtatgcagcaggcagcagcctctggttgatggttgtaacaggcagtttatgaaataatttggacttggcatagtatgagaggcactgtttcttacagtaggaagaataccttaaggtgggagcagtggaatatatcagttagatttttttttgcttatggatgtagttccctgttgcttaagcagttggatggatgattgacattcgctaagagcatatgaaggactagttctttcctgatacagagatatgtggtttggagcatccatcttcaaggaacaatataataccgagatttgcagcatgaagggtgagtccctattattgcaggccttcatttggtcaatgattggtaatgcttgctaaaagtaactttaaatcgataatgatgcggtatttgtaaaattcttcgaagatactttttgtggagaactaggattaacattgatagaagaatccatcaaatgaaaatgtagtatgagagctgtcattatttttggataagagtaaccatgtgactgaatgacgtactcggccagtcttgcgtattgctgcagcttgcataatacaaacgggaacacgacattttggtgcgcaataacaatacaagtggtaacctggcagctggttcttataaatacatttgatcctgttatttgctcatgttttgtggtcagtagtaacatgtttataatcagagtttgagatttcag

SEQ ID NO: 210003 - DNA, 2334 bp, Zea Mays
gtggacccgagtggctgagtccacctctgatgctctgacctccgcctcctcctttctctcgtcgtcgtctccacgacacctcaaccccaatcagaacccggacccagatctctaaaaaatccccaatcccaatctgccgtacgccgttgcgatcatacctccaaatccgcccccaagtctgttcgatgcgaatagcacctgcgatttagcgaaccgtgcgctcgctaggtttagggtttcgagggtttgcgttagggtttgggcgcacgatggggcggtcgcgaggggtgctgagttccggcgacgacgacaccgggcacaggtcgaagcggaggagagtctcgtcgggcggggatgcgacggactccatttcagcctccatcgggggagctggagagggagggggcaagaaggcgctctatcactgcaactactgcaacaaggacatctccgggaagatacggatcaagtgctccaagtgccctgacttcgacctttgcgtggagtgtttctctgtcggcgctgaagtcaccccgcaccgcagcaaccatccttacaaagtcatggacaacttgtctttcccacttatttgcccggattggaatgcagatgaagaaattctcctccttgagggaattgaaatgtatggtctgggaaactggcttgaagttgcagagcatgttggtaccaagtctaagttacagtgtattgatcattacacatcagcatacatgaactcaccttgttatcccctcccggatatgtctcatgttaatggcaagaataggaaggaacttctagctatggctaaagtacagggtgagagtaaaaaagggactttgctgttacctggagaactcactcctaagggtggaagatgcacttggagaaggtccagcaggtcgatcaccttcacacatggctgttggtgcaaataaaaaagcttcaaatgtgggacatattaaggatggcgctactgtatcaaaagtcgaagatgttcatgtagatagaagtgttggtgtgaagaagcccagatattctgcagatgaaggcccttcgttgactgaactgagtggatacaatgcaaagagacatgagtttgacccagaatacgataatgatgccgaacaagctcttgctgagatggaatttaaagaaactgattcggaaactgatcgtgaactgaaactccgtgtgctgcgtatttacctctccaggcttgatgaaagaaaaagaagaaaggagttcatattggaaagaaatttgttgttccctaatcccttggagaaggatcttacgagtgaagacagggaactttaccatcgctataaagtcttcatgcgttttctttctaaggaggaacatgaagccctcgttaggagtgttattgaggagcgaaaaattcggaggagaattcaagaactccaggaatgccgttctgctggatgccgcacactggctgaagcaaagatacacatagagcaaaagaggaaaaaagaatacgagctgaatgcgcaaaaagctaaggatagcagtcaacttaatgcaaataataaatcagtacaaaagatgaatcgacctatgaaaattgagtccgatgggaatttggatccaaagaaaggtggtgctggcttggattctcctaagacaacaggacctacaagtgttaagcagtgggatgactgggatatagttggtcttcctggggcagagctattaagtgctagcgaaaagcttctatgctgtcagaacagattgctacccagccattacctgagaatgcaggaggtgctgatgcaggagatattcaagggtagcgtcctaaagaaggaagacgcccacgtcttatttaaggtcgatcctaccaaagtagatagtgtttatgatatggtatctaaaaaactgggcaaccatgaggaggccccaaccgtctagcttacgcttttgagcttgcctgctgtgacatgccgaaggaaacaaatcttggtctggcccttcgcagcgtgtctgaatcagggctgaaggtggtggaaccatactaaatcgaatcggccatagttagctgaaattcatatcagctgtcagtagcacagtaaggcattcccgccaagctgtaaaattattgccccgacgagaatgtgtagcatgaatttgaatttcttttctgctattgctgtgtactgttgcagggtagtgccttattgtagtatatgtataggtgcctgagttttatgtatcatcgtgtatgtaccatttgggcgctctatttatgccattgtaccaaccccaaacatcgattattataattcatctcgcagccaaattcttgtctct

SEQ ID NO: 210004 - DNA, 3597 bp, Zea Mays
gaaggaggcggaaccattcgaatttcgaacgccgccggtcgctccctgttccctagctctctcctccgcggctccgcctccggcctccacggtttcgcaggcagagatgaagaaggcgtccgcggcgtcgcgctacgcggcctacgactccccgtccccttcgccgcgccgcgcggcgccttccgcggccgccgcgaccccgggagcagcgcacggcagcagccgcgccctggtggtcgcggggagatccggccgcgatctactgggcgccaagccgcaagcccacggcaacctaggctccgtgctacggcggctcatctccatggacaagaagccgccttcctccaagaaccagctcccggttccccctgccgccgccgccgcagcagcagcagcagcgaagaacaacggtggcgggaagctgccggggctgtcgcggaagttgttccagaaagcctcgtccaccgaggcggcggcgcccaggaagacgaaggccctgatggaagtcaagaacagcggcaacaacgccaacacgcggacgctcggcatggtgctgcgcagcgagcgggagctcctggcgcagaccagggcgcaggaggacgagatcgccgcgctccgcctgcagctcgagaacaaggaccgggaggtggagcggctcaaggacctatgcctgcggcagcgggaggagatcaggacgctcaaagacgccgtcctgttcccggacgtggagccggagccagagcccgaccgccgcctccgacacgagatttccacgctcaccgaccagatccagtgcctcgcgcaggaggtcgcccaggttaaggccgagaagcactcggcaaggtcgtgctttgacgaggatggatacttctcttcccctaggacgcctgggtttaacgaggagaccgctttctctctggagtgcagcattggggaagctgagacgccgaactacggtagcccagacgaaatgttcagcaaggatcttaatccttgcttgaccccgtgcattgccaagagcagatctgatgtatccgcacaattccagtcgtcttcctcccagttcacaaaggaatctagcggttctcgtcgcagcagcggcaaggaaagagcagaccgctcttatggttcttttggcaggccaatgtcaaagagctctgaccatcacaagccggccgcctcaggaagcagcaacaagcgacgagtatacagatccgatcaagacaaaatcaatcagaacctgttttgagttcaccatcgtcatcagcttgccagtgaaggtagcctccagcttctactaggtgaaatatttataagcatgtggactttttatggtccgtcgataccggtgctcgtgatctgtcagtgaatgaaacctttggtttgtgctttttttgtgttatgctctagcttgcccagctatttggaatggaatgccagtttggctctgctatgtcatcgataggtgaatatttggcttctcatgttctccgttctctcacgaatcacgatggcggctccaacatccgtcggtgcgagtgcgcggtcgtcgggtcgaagcggaggagagtctcgtcgggcggggatgcgacggactccatttcagcctccatcgggggagctggagagggagggggcaagaaggcgctctatcactgcaactactgcaacaaggacatctccgggaagatacggatcaagtgctccaagtgccctgacttcgacctttgcgtggagtgtttctctgtcggcgctgaagtcaccccgcaccgcagcaaccatccttacaaagtcatggacaacttgtctttcccacttatttgcccggattggaatgcagatgaagaaattctcctccttgagggaattgaaatgtatggtctgggaaactggcttgaagttgcagagcatgttggtaccaagtctaagttacagtgtattgatcattacacatcagcatacatgaactcaccttgttatcccctcccggatatgtctcatgttaatggcaagaataggaaggaacttctagctatggctaaagtacagggtgagagtaaaaaagggactttgctgttacctggagaactcactcctaaggttgaatctcaattttctccctccagggtcaaggtggaagatgcacttggagaaggtccagcaggtcgatcaccttcacacatggctgttggtgcaaataaaaaagcttcaaatgtgggacatattaaggatggcgctactgtatcaaaagtcgaagatgttcatgtagatagaagtgttggtgtgaagaagcccagatattctgcagatgaaggcccttcgttgactgaactgagtggatacaatgcaaagagacatgagtttgacccagaatacgataatgatgccgaacaagctcttgctgagatggaatttaaagaaactgattcggaaactgatcgtgaactgaaactccgtgtgctgcgtatttacctctccaggcttgatgaaagaaaaagaagaaaggagttcatattggaaagaaatttgttgttccctaatcccttggagaaggatcttacgagtgaagacagggaactttaccatcgctataaagtcttcatgcgttttctttctaaggaggaacatgaagccctcgttaggagtgttattgaggagcgaaaaattcggaggagaattcaagaactccaggaatgccgttctgctggatgccgcacactggctgaagcaaagatacacatagagcaaaagaggaaaaaagaatacgagctgaatgcgcaaaaagctaaggatagcagtcaacttaatgcaaataataaatcagtacaaaagatgaatcgacctatgaaaattgagtccgatgggaatttggatccaaagaaaggtggtgctggcttggattctcctaagacaacaggacctacaagtgttaagcagtgggatgactgggatatagttggtcttcctggggcagagctattaagtgctagcgaaaagcttctatgctgtcagaacagattgctacccagccattacctgagaatgcaggaggtgctgatgcaggagatattcaagggtagcgtcctaaagaaggaagacgcccacgtcttatttaaggtcgatcctaccaaagtagatagtgtttatgatatggtatctaaaaaactgggcaaccatgaggaggccccaaccgtctagcttacgcttttgagcttgcctgctgtgacatgccgaaggaaacaaatcttggtctggcccttcgcagcgtgtctgaatcagggctgaaggtggtggaaccatactaaatcgaatcggccatagttagctgaaattcatatcagctgtcagtagcacagtaaggcattcccgccaagctgtaaaattattgccccgacgagaatgtgtagcatgaatttgaatttcttttctgctattgctgtgtactgttgcagggtagtgccttattgtagtatatgtataggtgcctgagttttatgtatcatcgtgtatgtaccatttgggcgctctatttatgccattgtaccaaccccaaacatcgattattataattcatctcgcagccaaattcttgtctct

SEQ ID NO: 210005 - DNA, 4971 bp, Zea Mays
ctcccgtgtccgtactccgtaggcaacacctcaccgaggcggaaacgcgacgagatcgcggtcgcgcaggccgcgctagtaccacactagcactgacacgtcggcaggccacggaaggaggcggaaccattcgaatttcgaacgccgccggtcgctccctgttccctagctctctcctccgcggctccgcctccggcctccacggtttcgcaggcagagatgaagaaggcgtccgcggcgtcgcgctacgcggcctacgactccccgtccccttcgccgcgccgcgcggcgccttccgcggccgccgcgaccccgggagcagcgcacggcagcagccgcgccctggtggtcgcggggagatccggccgcgatctactgggcgccaagccgcaagcccacggcaacctaggctccgtgctacggcggctcatctccatggacaagaagccgccttcctccaagaaccagctcccggttccccctgccgccgccgccgcagcagcagcagcagcgaagaacaacggtggcgggaagctgccggggctgtcgcggaagttgttccagaaagcctcgtccaccgaggcggcggcgcccaggaagacgaaggccctgatggaagtcaagaacagcggcaacaacgccaacacgcggacgctcggcatggtgctgcgcagcgagcgggagctcctggcgcagaccagggcgcaggaggacgagatcgccgcgctccgcctgcagctcgagaacaaggaccgggaggtggagcggctcaaggacctatgcctgcggcagcgggaggagatcaggacgctcaaagacgccgtcctgttcccggacgtggagccggagccagagcccgaccgccgcctccgacacgagatttccacgctcaccgaccagatccagtgcctcgcgcaggaggtcgcccaggttaaggccgagaagcactcggcaaggtcgtgctttgacgaggatggatacttctcttcccctaggacgcctgggtttaacgaggagaccgctttctctctggagtgcagcattggggaagctgagacgccgaactacggtagcccagacgaaatgttcagcaaggatcttaatccttgcttgaccccgtgcattgccaagagcagatctgatgtatccgcacaattccagtcgtcttcctcccagttcacaaaggaatctagcggttctcgtcgcagcagcggcaaggaaagagcagaccgctcttatggttcttttggcaggccaatgtcaaagagctctgaccatcacaagccggccgcctcaggaagcagcaacaagcgacgagtatacagatccgatcaagacaaaatcaatcagaacctgttttgagttcaccatcgtcatcagcttgccagtgaaggtagcctccagcttctactaggtgaaatatttataagcatgtggactttttatggtccgtcgataccggtgctcgtgatctgtcagtgaatgaaacctttggtttgtgctttttttgtgttatgctctagcttgcccagctatttggaatggaatgccagtttggctctgctatgtcatcgataggtgaatgtgcgtgcaaattctttttcttcttattctcaaaattgttcacaaagaaatttggatcacggcctgtcttaggccccatttcaatcttagagataaactttagcttcctgctaaactttagctatatgaattgaagtgctaaagtttagcttcgattaccaccattagctctcctgtttagattacaaatgactaaaagtagctaaaaaagctgctaaagtttatctcgcgagattagaacatgaccatagctgcatatggaccatatggcaatgtgatatgtagcatatgcatgacgtgtcatttgccgatcgatgcaggtagcatgtgatttgtgaagtgtacgttggttttggtttgcgaaattatggaaacaggtgtaatggaccgcttgtatttttttgtcgtgttgacgtttcgtctatggatactcaaattttgaaatttcgtagactagtaaaaaaaataaagaactctttgggcgtcggtctatggggattcaggcattgaggacacgtttgttatttgggaaatttagatccataccattaaaagatcatcactttagatccatatcattactatctcacttacatgtgggtccacatgagtcaataacatgtgaggtccatgttatatatctaaagtttggatcttttaatggtatagatccaattgttccttgttattattttgttcggcgctgtatggcatcgagtcttgtatgttctgagctctttggacttgtgcggacgagatttggcttctcatgttctccgttctctcacgaatcacgatggcggctccaacatccgtcggtgcgagtgcgcggtcgtcgggtaaccgattgaacgacaaggtccgtaccgaccgcgttagaacctgtatggtccaactgccaattgcattcatgaaatttgaatttgaaaattttcaacccctctaaaatggagaatctgaactcattcatgcaactcatactttgaatttctctactacctgctcatactcatcacaccctcgttttatttgatttgggtaaagcgttgttgagatgtcatgatccaatctggattcaacatggccgaagatgaggtgatggagttgttgcattgcatcaagtaataatgcagcgaacgttggagattgcttctgagtcttccatgtcaatgaggtgacatcaacgatgccaaagatacatggagttgtatccgtccgtggccagttgatacaatactacacttcaacaacccgtgcatgtcgaagcggaggagagtctcgtcgggcggggatgcgacggactccatttcagcctccatcgggggagctggagagggagggggcaagaaggcgctctatcactgcaactactgcaacaaggacatctccgggaagatacggatcaagtgctccaagtgccctgacttcgacctttgcgtggagtgtttctctgtcggcgctgaagtcaccccgcaccgcagcaaccatccttacaaagtcatggacaacttgtctttcccacttatttgcccggattggaatgcagatgaagaaattctcctccttgagggaattgaaatgtatggtctgggaaactggcttgaagttgcagagcatgttggtaccaagtctaagttacagtgtattgatcattacacatcagcatacatgaactcaccttgttatcccctcccggatatgtctcatgttaatggcaagaataggaaggaacttctagctatggctaaagtacagggtgagagtaaaaaagggactttgctgttacctggagaactcactcctaaggttgaatctcaattttctccctccagggtcaaggtggaagatgcacttggagaaggtccagcaggtcgatcaccttcacacatggctgttggtgcaaataaaaaagcttcaaatgtgggacatattaaggatggcgctactgtatcaaaagtcgaagagatatgctttctcaagaacgtctttttctgtaatttgagttctattaagaaatgaaatggtgatagtctcacgttacgacatgatgttcatgtagatagaagtgttggtgtgaagaagcccagatattctgcagatgaaggcccttcgttgactgaactgagtggatacaatgcaaagagacatgagtttgacccagaatacgataatgatgccgaacaagctcttgctgagatggaatttaaagaaactgattcggaaactgatcgtgaactgaaactccgtgtgctgcgtatttacctctccaggcttgatgaaagaaaaagaagaaaggagttcatattggaaagaaatttgttgttccctaatcccttggagaaggatcttacgagtgaagacagggaactttaccatcgctataaagtcttcatgcgttttctttctaaggaggaacatgaagccctcgttaggagtgttattgaggagcgaaaaattcggaggagaattcaagaactccaggaatgccgttctgctggatgccgcacactggctgaagcaaagatacacatagagcaaaagaggaaaaaagaatacgagctgaatgcgcaaaaagctaaggatagcagtcaacttaatgcaaataataaatcagtacaaaagatgaatcgacctatgaaaattgagtccgatgggaatttggatccaaagaaaggtggtgctggcttggattctcctaagacaacaggacctacaagtgttaagcagtgggatgactgggatatagttggtcttcctggggcagagctattaagtgctagcgaaaagcttctatgctgtcagaacagattgctacccagccattacctgagaatgcaggaggtgctgatgcaggagatattcaagggtagcgtcctaaagaaggaagacgcccacgtcttatttaaggtcgatcctaccaaagtagatagtgtttatgatatggtatctaaaaaactgggcaaccatgaggaggccccaaccgtctagcttacgcttttgagcttgcctgctgtgacatgccgaaggaaacaaatcttggtctggcccttcgcagcgtgtctgaatcagggctgaaggtggtggaaccatactaaatcgaatcggccatagttagctgaaattcatatcagctgtcagtagcacagtaaggcattcccgccaagctgtaaaattattgccccgacgagaatgtgtagcatgaatttgaatttcttttctgctattgctgtgtactgttgcagggtagtgccttattgtagtatatgtataggtgcctgagttttatgtatcatcgtgtatgtaccatttgggcgctctatttatgccattgtaccaaccccaaacatcgattattataattcatctcgcagccaaattcttgtctct

SEQ ID NO: 210006 - DNA, 2489 bp, Zea Mays
tcgcggttctaccgctccgctcatgcccgcggccgaaccctcccccgcatcccacagccgccgacgctcaccttccatcctccccgcagcccgcagccgccaacgctcaccttccatccccgcggatcccacgctccctcgggcgctccttccgcgcccgcccacagatctcccatcgacgtcgatgctctgcgattaagcccagctaaactcgcgcggtttggctttggcgcagcgctggagctctcgagacgctcgcttggcgccgaagcggacgaggagcagttgtcggcgtccgctgccgtgtcctcagctccgccatctccttctccagctcgacgatcctctgcttcctgctcgtgaactccagcgcggcagcgtcgagctcggcgcacagccacccgttctcggcttccacccgctctgcggtgtccctgcacctctggagctcggtcttcttggccgcgagctcggcctccaggactgcgccaaagccaaactgctactgctacaactccgccgtgctctccatggaagcttctgcgcctagatcaacagcgttcggccgctggtgcccggcgctaagctccacgccgtcatcgagcgtggcacagtgattccgtcctcgacctccccttcctctgcaacatgtccaggaccgggaactagtagtgggaggatcaccgtccaccgtcgagcgtctgcaaggcaaatcagatcaaccaccacatcggagtgaaaagtctgcgccactctgcctcacacagccaaaaaatgtatcaggtgattaagaaccatcccagctcattgaagctttatgagcagaaactgctaggaacgagtgaagtcatgaaagaagatgtccagaggatccatgacaaggtgaaccgaatcttgaacgaagagtttgctaagagcaaagactacgttcccaacaagagggattggctctcagcttactggactggctttaagtcaccagagcaaatatcacgtgttcgcaacactggagtgaagcctaaaatactgaaacgtgtaggtcaggcaattactacactgcctgaaaacttcaaaccacatagagcagtgaagaagatttttgagctgcgtgcagctatgatagagagtgctcaaggaattgattgggctgttgccgaagccctggcctttgcaacacttatagtggaaggcaatcatgttaggctaagtggacaggatgtggaaagaggaactttcagccatcagcatgcagttctgcatgatcaggaaactggagcaaagtactgcccacttgaccatgttgcaatgaattaaaatgaggagctatttattgttagcaacagagactagttggagcttcattgttgatttttgcaaataagcaagacatgcaaggagctctaaaaccaactggaatcacgaaggtaagcgaacttcagtcatttattatatgcattagagacatgttttcctatctatgacatcatttttaacttgtactatgtttttccggtcctcatggttgccaagattttacttagttcgatgtgggagcaaaaggatatgccaaattgaatgtagtttcatcaattatgctcaattatggatgttcagaggcatccaatttcagtgtgtactgcaatacttgggtccacctgtacttggtttaagaagcgctccgcggacttccacggccgcgccgccgatctcgtccacggcctccggggcacggcgatgcccaggagacaggccctcaaggaagagcagtgcagagaagagaaaggtatctcgactattccaaagcacaagtatgcatccaaagcctgttccccaaaagaaattgtgcaggatcgaaaggaacttcaacctgaaccagcgagagtatcgatacaaagactgtttgaaatcttctagaaatgacatcgaatggaacttcaagctgaacaagcgaaagcatctatacaaagactgtctgaaatcttctagaaacgacatcgaaaggaacttcaagctgaacaagcgaaagcatctatacaaagactgtctgaaatcttctagtttactgataacaactgctcagaaaaacctaaaccctatcgggaatggagacgctctcggcgaagcaggagggcacagtggacgtgaagctgaagccgacttctaaccaatccaactcgtaggcgggcgggaagcggatgtgccaactagaagagtggtctctctcggcgcttgcttgacaaacgtgtgttattaaccgttgtatataatgttattaattaatgttctttattccctgatgcttctgttgtggctcacgttctcaactttgtatctgatgatgaaagaccagatgttttcttgcagttttcgaaaaagtcttctagagacaacttaattttgattaacaacacaacacatggccatatatacatgatattgttgcactattttttcggttgcaacacacatgtatctacctaggattcttt

SEQ ID NO: 210007 - DNA, 1854 bp, Zea Mays
tcgcggttctaccgctccgctcatgcccgcggccgaaccctcccccgcatcccacagccgccgacgctcaccttccatcctccccgcagcccgcagccgccaacgctcaccttccatccccgcggatcccacgctccctcgggcgctccttccgcgcccgcccacagatctcccatcgacgtcgatgctctgcgattaagcccagctaaactcgcgcggtttggctttggcgcagcgctggagctctcgagacgctcgcttggcgccgaagcggacgaggagcagttgtcggcgtccgctgccgtgtcctcagctccgccatctccttctccagctcgacgatcctctgcttcctgctcgtgaactccagcgcggcagcgtcgagctcggcgcacagccacccgttctcggcttccacccgctctgcggtgtccctgcacctctggagctcggtcttcttggccgcgagctcggcctccaggactgcgccaaagccaaactgctactgctacaactccgccgtgctctccatggaagcttctgcgcctagatcaacagcgttcggccgctggtgcccggcgctaagctccacgccgtcatcgagcgtggcacagtgattccgtcctcgacctccccttcctctgcaacatgtccaggaccgggaactagtagtgggaggatcaccgtccaccgtcgagcgtctgcaaggcaaatcagatcaaccaccacatcggagtgaaaagtctgcgccactctgcctcacacagccaaaaaatgtatcaggtgattaagaaccatcccagctcattgaagctttatgagcagaaactgctaggaacgagtgaagtcatgaaagaagatgtccagaggatccatgacaaggtgaaccgaatcttgaacgaagagtttgctaagagcaaagactacgttcccaacaagagggattggctctcagcttactggactggctttaagtcaccagagcaaatatcacgtgttcgcaacactggagtgaagcctaaaatactgaaacgtgtaggtcaggcaattactacactgcctgaaaacttcaaaccacatagagcagtgaagaagatttttgagctgcgtgcagctatgatagagagtgctcaaggaattgattgggctgttgccgaagccctggcctttgcaacacttatagtggaaggcaatcatgttaggctaagtggacaggatgtggaaagaggaactttcagccatcagcatgcagttctgcatgatcaggaaactggagcaaagtactgcccacttgaccatgttgcaatgaattaaaatgaggagctatttattgttagcaacagagactagttggagcttcattgttgatttttgcaaataagcaagacatgcaaggagctctaaaaccaactggaatcacgaagtcactctctgatagctcatcgccgcctggttctcccgccggtacacaaggtttaagaagcgctccgcggacttccacggccgcgccgccgatctcgtccacggcctccggggcacggcgatgcccaggagacaggccctcaaggaagagcagtgcagagaagagaaaggtatctcgactattccaaagcacaagtatgcatccaaagcctgttccccaaaaggatcgaaaggaacttcaacctgaaccagcgagagtatcgatacaaagactgtttgaaatcttctagaaatgacatcgaatggaacttcaagctgaacaagcgaaagcatctatacaaagactgtctgaaatcttctagaaacgacatcgaaaggaacttcaagctgaacaagcgaaagcatctatacaaagactgtctgaaatcttct

SEQ ID NO: 210008 - DNA, 756 bp, Zea Mays
ttggaaaaggaatgataattggggacaataaagttgatgtcaacatttagtaataactataagctctctgtgagccaatttttgagatgatgtccaacatgttcatttaagttgtgcctaagttggtgtcagaaatacgtcaaggaaaaatgtcgaacaacaactcagaagataaattcaagaactggttgcttcaacaagagtctgtccatgaggatggcatgcaacattacttgccctttgattgagataggtggctacggtgatgctttgttgaacctgatatacgcatctccatcaagccagttcgaagagctcagtttagaatataccaaagtagccttggtaacaacaataagagggttgggctttttgatatgggtgatggaagtagtgagcctgctgctgaggacaacaatcaaatgcatcagtttatatgcactcctgatcctggagaaggtgctcgccaagttcctcgtcatgtaccctaactacgcgtccgcctcagacgtgggcagcctccacgactatgagtacccgcacatggacaaggtatgcctccactgcgactttggcctcttctcctacctccaaagttacaactctgctgactcgtcagctgcattcacgctctcagaaatcatcgccaacctcagcaaccatgcactctacgacaccgctgataagggcacaatggagcacatcaagaactgccttcaacctgaatttggtacctggccatgcactagggtctag

SEQ ID NO: 210009 - DNA, 1094 bp, Zea Mays
tgcgcattcacgccacagcgtcctcccctccccgtcctccctcttcttcacaccactcacagctcacaggtcctccccctcctcctcccgggctgccattgctgccgcccggccagctgattcaagatgccgaccatcatcgtctcggtggacctggaatgcagccgctgccgtgccaagatcgagaaggtgctcaacaggatccaagggtgagttctgcatcgacgacatcgacttggacgagaagagcaacaaggtgaaggtgacggggcccttcgacccggacaagctcgccgacaagctgtgctgcaaggcgtgcaagatcatcaagcagatcgagatcgtggagccgccgccgccgccgccggagaagcccaagaaggaggaacccgccccgccgccgccgaagaagaaggaggagccggccccgccgccgccggcgaaggtcgagccgccaccgaaggagaagcccccgccaccagcaccgaaggaggagccaaagcccgccccggcgccggcgccgccgcccaaggtggtggaggtcccctacccgtggccgtacccgtgcccgtacccgtacccggcgtggccgtccgactgctgctgccaccacgggcacggcggctgccactgctgctcctgcggcaaggcccccgaggccccggcgccgcccccgatgccgcagtacgtgccccagccgtacccctgcggcggcggcggcggctaccggatcgtctgcgatgaggacccctcctacgcctgcgccatcatgtgattcattgtcccgttacgcgcccacaacccaccacaccagtgtcagtcatctcgtcatgccgtgccgtgccgtgcctcccgtataatcgccgtacagattcatcatacacacacacacactcatattatatatatatacacagcatcatgtataccgtacgtacgtccgtacctgtaccgtctccttagcttgcgtgttatgttgtgcttcaattaagtacggagtatcatatagtagtacatatatgttaggcaaagtgagagaataaaataagcgatgatgatgttggttttccgtgtataaagaagaagaaaaaaaa

SEQ ID NO: 210010 - DNA, 2316 bp, Zea Mays
tgcgcattcacgccacagcgtcctcccctccccgtcctccctcttcttcacaccactcacagctcacaggtcctccccctcctcctcccgggctgccattgctgccgcccggccagctgattcaagatgccgaccatcatcgtctcggtggacctggaatgcagccgctgccgtgccaagatcgagaaggtgctcaacaggatccaagagaagggtgagttctgcatcgacgacatcgacttggacgagaagagcaacaaggtgaagatgacaatggcaggaagatgcatccacgatcttcattcaaggccttcttggaggtggttaaatggagaagtgttccctgggaggatgttgaaatggatgctatccattctttgcagttaatattacgtgactccctgcaaggtgaagatgccaacagaaacaacatcaggtccattgtaaaagctccatctgatgatatgaagaagttacaggggctacttgaactaagaacagttacaaacgagatggtccgcttaattgagacagcaactgcccctgtcttggctgttgacattgccggtaacataaatggatggaacaaaaaagctgcagaactaacagggttacctgtaatggaagccatagggaggcctctgatagatcttgttgttgctgattctgttgaagtggttaagcagattttggactcagctttacaaggaattgaagagcaaaatctggaaatcaagcttaaaacattccatgaacaggagtgttgtggtccagttatcttgatgattaactcctgctgtagtcgggatctttcagagaaagtcattggagtttgctttgtagcacaagatttgaccaggcagaagatgattatggataagtatactaggatacaaggagactatgttgccataataaagaaccccagtgagctcatccctcccatatttatgatcaatgatcttggttcctgcttagagtggaataaagctatgcagaagattactggtatgaagagggaagacgcgataaataagttgttaattggggaggtcttcacgctccatgattatggctgtagggtgaaagatcatgctactctaacgaaacttagcatactgatgaatgcagtgatttctggtcaggatccagagaagctcctgtttggtttcttcggcacaggtgggaagtatattgaatccttgctgacagtgaacaagagaacaaatgctgagggtaaaatcactggcgctctttgctttctgcatgtggctagcccagagcttcagcatgctcttgaggtccagaaaatgtctgaacaagctgctacaaacagctttaaagaattaacttacattcgtcaagaattaaggaacccactcaatggcatgcaatttacttataacttattgaagccttccgaattgacagaggatcagcggcaacttgtttcatctaatgttctgtgtcaggaccagctgaaaaagattttacatgacactgatcttgaaagcattgaacagtgctatatggagacgaacacagtagagttcaaccttgaggaagctctgaatacggtcctgatgcaaggcattcctttgggcaaggaaaaacgtatttctattgaacgtgattggcctgtggaagtgtcacacatgtacatttacggggacaatataaggcttcagcaggtcctagcagattatctggcttgcgcccttcaattcacacaaccagctgaaggacatatcgtgctccaggtcattcccaagaaggaaaacattgggtctggcatgcagattgctcatttggaattcaggattgtccatccagctccaggcgttccagaggccctgatacaggagatgttccagcacaacccaggggtgtccagggagggtctcggcctgtacataagccagaagctggtgaaaacgatgagcggcacgttgcagtacctacgagaagccgacacctcttcgttcatcatcctgatagagttcccggtcgcccagctcagcagcaagcggtccaagccttcgccaagtaaattctgacactgatgctcctggaactgcagtgacggttcggccgtgtcaaattctcgggtgtagggtgtacctctggccaagtgactgatattctgaaaaacatacggacttctagtataggagaagaggaatcctaatcctagtaattatatcttagtagatatgtgcttagtctcttgttaattttttgtcttgagaggactatatatactgataaagtgataatttattcagagaataaagaatgggctccatgctttgtcta

SEQ ID NO: 210011 - DNA, 598 bp, Zea Mays
accgatttcctcccattcaattcgtaaatttcgtccatgcatgggcatggaatggatggatgtgaatgccacgaacgattccgccccgccggccagcctgtgagtttgaatcgaaatggaagatcgtctcccgaaaaattgcacggaaaagaactgagcttagcatgaagtcagtgttgcaacatcgagaagcagctttgagcagagtggaaacattcatggattgtagccacctaaaaatcaaatggcagtcaagttgagaccatttaatcacttgcactatgcaggtggcaggcatctaacttggagaaacataaccacttaagaatcctcctgtcttctagcagctcgtagcaaagataacttataatcttctgctgaacaatcaagatggctgctgctatgctttcttaacatgaaaaaccaagagtagccccagtgaaattctatgtttgatttttttttctatgaacaattgtttccgaacaataatatggatcatgcgacacccgtttgtaaatgtaaattatacttatgtattgtaatcacctatatttcttctcattcatcttggcctttcagtggagctattctttcc

SEQ ID NO: 210012 - DNA, 767 bp, Zea Mays
accgatttcctcccattcaattcgtaaatttcgtccatgcatgggcatggaatggatggatgtgaatgccacgaacgattccgccccgccggccaggctgcggcaacataatggtgagttaaaaggtggtgcaaaagcttcctctgccggcaggccttggaatctcgcatgccttgttgaaggatttgccaacagaagtgaagcaacttgactgcctgtcatgtgtcctggcgtataaccaactagttcatctatctttttcgagcctgtgagtttgaatcgaaatggaagatcgtctcccgaaaaattgcacggaaaagaactgagcttagcatgaagtcagtgttgcaacatcgagaagcagctttgagcagagtggaaacattcatggattgtagccacctaaaaatcaaatggcagtcaagttgagaccatttaatcacttgcactatgcaggtggcaggcatctaacttggagaaacataaccacttaagaatcctcctgtcttctagcagctcgtagcaaagataacttataatcttctgctgaacaatcaagatggctgctgctatgctttcttaacatgaaaaaccaagagtagccccagtgaaattctatgtttgatttttttttctatgaacaattgtttccgaacaataatatggatcatgcgacacccgtttgtaaatgtaaattatacttatgtattgtaatcacctatatttcttctcattcatcttggcctttcagtggagctattctttcc

SEQ ID NO: 210013 - DNA, 1260 bp, Zea Mays
accgatttcctcccattcaattcgtaaatttcgtccatgcatgggcatggaatggatggatgtgaatgccacgaacgattccgccccgccggccaggtgagagatgagcctcacggcggccttccgtgccaccaaaatcccgcgcgctcttcctccaaagtgcggtgagcctgccgcctcctcctcggcctcggcgtccggggatccgccgccgggggccgcgaagagtactaaggcgccgccgccgtggtgcgtgtaccttatagcctcatcccggatccgccgcacgtacgtcggcgtcaccaccgatttccctcgccggtgattcctcgccctgctctacctgcctcccccgttcctttccccacttgcttgtctcggatagtcgtcatatggttgcagcaagctaagttcgtgtggtgttagcatttggagaagactacggttggagttgcagaaccacaagaaattgaccccatccggttgtgcttgttgcaggacagtgtggctctatctcgttagggctgaaatttgattgctttgcttcaatttagtacttcttgttttgtattcatactctgagtcgccttgctctggtttgcaggatacacatgcttgaaaatgcaaatttaattcacagtttttcaataggctgcggcaacataatggtgagttaaaaggtggtgcaaaagcttcctctgccggcaggccttggaatctcgcatgccttgttgaaggatttgccaacagaagtgaagcctgtgagtttgaatcgaaatggaagatcgtctcccgaaaaattgcacggaaaagaactgagcttagcatgaagtcagtgttgcaacatcgagaagcagctttgagcagagtggaaacattcatggattgtagccacctaaaaatcaaatggcagtcaagttgagaccatttaatcacttgcactatgcaggtggcaggcatctaacttggagaaacataaccacttaagaatcctcctgtcttctagcagctcgtagcaaagataacttataatcttctgctgaacaatcaagatggctgctgctatgctttcttaacatgaaaaaccaagagtagccccagtgaaattctatgtttgatttttttttctatgaacaattgtttccgaacaataatatggatcatgcgacacccgtttgtaaatgtaaattatacttatgtattgtaatcacctatatttcttctcattcatcttggcctttcagtggagctattctttcc

SEQ ID NO: 210014 - DNA, 2302 bp, Zea Mays
atcatatctcctcgaatcgtttcatgtgcttactgcttatatatatatatgtgtgtgtgtctgtcgactcaagcacacacacacacatcctccaccaccattcatcagaaagcgaagcaccagcctctgatgccaagccaaagcacacacacctcctccagcctttcttcctctacaaccccaattcttccctgcagctctgctgctgccttgtttcgatcggtcatggcggcggtggccacagagactccgttccatgtcctggcggtggacgacagcctcccggacaggaagctcatcgagaggctcctcaagacctcttccttccaagtgaccactgtcgactccgggagcaaggcgctgcagttcctgggcctccatgaccaggacagcacggttcctcctgtccacacgcaccagctggatgtggctgccaatcaggatgtggctgtgaacctgatcatcacagactactgcatgcctggcatgacaggatatgacctgctcaagaagatcaaggagtcgtcgtctctcagagatatcccggtggtgatcatgtcctctgagaacattccttcaaggatcaataggtgagcagtcagctagcactctactatttgtcttgtggatctaaacaacagtttttaagggaaacaaatcttaagttaaaaattggggaaaaattacactagtgaggtgaggacttgagtagagttcaggcaagaaaacaactttatcatttataaggatttttttagcagccggcctgttcttgctcagaaaatcacatcatgttcacaaaaccattagacagccactataaagttccttttttctctctctcttccatgcatgcggacataaataaatgaataagttttgtaccaaaagattggatatggaaatctctccgaatccttaatgatctgctgtcacatgtgttgtataatagtagatgacagcaacccttgtattatatctcggcctggtcggtgtaaaataaatcaaaaacaaataaaagaagatatgaaatgatacgcagttcgatcttgcggatcttttcatatcgccgtacgtatccatggaacaggtctgttgatgcagacaggtcactagcaccactgacaaattgttgcgttgcgcgatacaccagtggcagggcgctaaagtcaaagaaagaatcaaacgatattattgctgttctttcgaacaaaaaaaaaagaaggaatcataagatatgacatatccaaaaataaaaatatataaaaaaacacaagttgcaagacttgtcttttaacagcatatatatgatgctctatatatgatcaacgggagagagagaaaactaacaatcctggttttgaaattctgaaccaggtgcctggaggaaggagctgacgagttcttcctaaaacctgtgcggctatcagacatgaacaagctcaagccccacatactgaaaagcagatgcaaccaggaacagcaccagcaaagtgacagtcacagtggcgaacgcaggaaccccacaatcagcagcagcgatagcataaacaaccgcaagagaaagggtgcaggcaccgaagaaatcttgccccagctggcaaacagatcaaggcacagttaactgagaactgactagtacagctaaaaccttttctttttcactttactttggcttactgatttgtaacgtagatgttagccctggatttgcaaaacggaacggaatctgtaaactgatactgcttgagtcgaatcgatcgaagtgattctgcaccagatctccctatttcatttatcagaatcgaaagccagctgacagagtcacagtaacagcccgttggacatagcagcaggtgccgaagccaagaacatctgaaactgaccgtcggataacctacgatgggagtagccttttactgcttctaagctttagcctggatacaagttgtcactacagtagtcagtagggcagtaacttggtgcatctccaagagttttcaaaacacactgtcaatctagaaatttttggtgatgtagcttctcccacaagtggcctcttgcaaattcttcagtgatgtggtttctaccacttgtgctcttggattctcagttccttgactctacagtatttttgtctctacgtgctacttaatggtgttccaggtagttggattaactactgcaagggccttccgcaggataaccccctttctccctacatattcatcatcgtcttcggccccgttttaccctctagatcatataatccagcttaaataaattaaaagacaaacaaaca

SEQ ID NO: 210015 - DNA, 1482 bp, Zea Mays
cctttttttgcttgtccggttagatagatcttgggagttgagaagactgcttcacaacaagaaataaagaaggcatatcacaaattggctctgcgcctccatccagataagaatcctggggatgaggaagccaaagagaagtttcagcagctgcagaaggttatatccattcttggagatgcagagaaaagagctttatatgatgagactggcattactgatgatgatgcactggtgggagaagctgcaaatgatcttcaggagtacttcagaacaatgtacaagaaggtcactgaggctgacattgaagaatttgaagctaaatacagagggtcagattctgagaaaacggacttgaaggaactctacacaaaatataagggcaacatgaacaggcttttctgcacaatgatttgctcagaaccaaagcttgattcccaccgcttcaaggatataatcgatggggcgattgctgaaggtgagctgaagtcaactaaggcgtatgagaaatggtctaaaaagatttcggagatggagccaccaacaaatccattagagaggagagcgaagagtaggaagaaaagtgaggagaacgatctgatcctggccatctcacagcgcagggctgagcggaaaaaccagttcaactccatcctctcgaacatcatgtccaagtgtgattccaaggcaagcagttctgagcccacagaagaggagtttgagctggcgcgacagaggctggagagcaaaatggccaagaggcgcaaatgatgcctgctgccagccttctttccctatgcgtctatgccgaacatcgtcttaagctttgggtgtgatctgattttaccagcacgcaagtgatggttgtgagagctagcttgagcgtgtcaggatctgtatcatatctcgtgtcctctgggacagtaggtcgtgtggttatcgccttgccgagagggaagctttctctgaacttcaataccatggatacgtgggtaatggctatgcagttgtagtttagtgtgtgtgtggttatatatataatgtaatcgtgccagcagctatccgattatgttctttgaagaaagctgtagtgccctccaggcctcgaggatgcaagtgttgaagggcggacaacaggcgggctgtggcttataatccagtcctcacgaggtgtaattgccattaatgtcgaggtttacaacagcatcaagtcctgcaagtaccgatgcaaataccatcaccatgtttatcatttacaagtgtaagagctttccatttgaataacgctctagagtcagagactcgccgctgttggctttttgactagagcaaaaacggtgctcaaggcaatggccatcgttgctgctgaaatcgcagaaagtgaagctggcatatgattagagatgtcaatgggaaattttccaccctttatagtatcctatcatgtttgatctatctcaatatctatcatggttgtaaaac

SEQ ID NO: 210016 - DNA, 1860 bp, Zea Mays
gtcctggtggtgatggggtgacccagaacattgtgtgtgaagtatgtggagatattggttacagacaacttctgctatgttgcggagactgtaagcgttatgctgtgcaccagtactgtttggacaaagttgttttcgatgcaacgttgctagaatggttctgttatgaatgcctacaaaggcgtggtgaagttacttgcgtcgcatctctagaacaggtgtcaagtgaaagcccactaagtcatgctcattttggtcctctagtacatcagcgtactactaagagggtggagtcagtaacagggccatattcacccagtgatgactgtgaggaattattttcctaccctggcatagaaagcatcccaagtgttcaagaaataagtgtagatcccattaagacttcaagtatttctgaacatgataccatagaagcagctgcaagcagtgaaagattcacggagtgtcaaaaggctagctcctgtcgcgaggggataactgtgaagatggctatggcgccctcatcatatgagaactcaggagaagacattttctctgaaaatgtatttttggaatatgttttggcatataaatgttatctatctaaagcacaaaagaagagagtaatggagcttattcaggaaattcaacctgaattcacagtttttatatcaataatgcggaggggcaatgtgcgacctccgggtccttttctgataaaagcacaaatgtcactcttgagatgcctgacaagagcaagaagtggcatcccaaattctacagaagagatgtaagcagaacctgcatgcttacgggacagtggctagactttgtctgcgacaatcatgtgcaggagggagatatatgcctccttttaccgacaaaagatgagataagatgcacgtttatggtctatgttcttcatgaaacaactcattcttctagaggtgaggctggctttcaaatgggtggcccatgccctggtgcatctggtgtggcttcagaaatccatgttgaggaggaaccaaccactggtattagtgcaaaacattaaaaaactattgagtatctatattatttcttttcttgttgtctaaaaccgtctgcaggggaacatgtttcttcagaaagtgatatgcgagaaattcctcatgaatctctctcgagaggagactctgatgatcaatttgagcctccatactttgtaccatgcaagagtcctctatctgaatcccaaaagagaatggttgaggagcgagtgcgagctatccgatctgaaattcccatttgtgtggcagtaatgaagaacaacaatgttggtgtcgctcaacgttggatgctagaattaggttcacgatatggttcggtatatctcccaactaaagggcaaaccatattgctccagtgcggggggacgacatggaaggcaaaattgatgtttcataatggtagaaggtggtttctgaatggaggttggcccaattttgctcgcggcaatggcctgcgtgtgggtgacatctgtctattcgaactgaagaagaaagacagtaagcttaccatggcagtccacatcattcgcagggagaagttttagtttgcactataccaaagtgtggctcctgttctttcggctggtaccctgggcttattgtacttgttctattttgacagtcgtgtggctgatctctcgaaggattagagaccaatctgtaacatctgttggtagctatcgtgccgccttgcttttgcttatgttgtacttaacacccttcttaaagtttcatctgaattaaaagtgatgactattgtttgtcatcgaacatctagtctgtgttctcaatatagtctctcatgcctgtt

SEQ ID NO: 210017 - DNA, 1086 bp, Zea Mays
aagtgttctctttatgcaacaaaaagctggagaacacgctgttggatggcagcccggcgccgcgcctaaagatctgcgactttggctactctaagtcatcgctgctgcactcaaagcctaaatccacggttggaactccggcgtacattgctccggaggtactctctcgccgggaatacgacggcaagatggcagacgtttggtcttgtggagtgactctttacgtgatgctggttggtgcatacccttttgaggaccccgatgatcccaagaatttcagaaaaacgattgggagaatagtgtcaattcaataccagataccagagtatgtccacatatcccaggattgcagacagctccttgctaggatcttcgtcgcaaatcctgcaaagagaataacaattagggagattaggaatcacccctggttcctgaagaatttgcccagagagcttacagaagctgcgcaagcgaagtactacaagaaggacaacggtgcccccaccttctctgatcaaacagtcgaagagatcatgaagatcgtagaggaggcccgcacgccgccccagtcgcctgctccagtggctggttttggttgggcagaggaagaagagcaggaagatgggaagaaacctgaggatgacgagcaggatggggaggatgagcaatacgacggcgaggacgagtatgacaaacaggtgaagcaagtacatgccagcggggactttcgacacctaataaaatgaagctcctagcaagaccgagttctcaactgatgagatactgtctggttttgctgtagtttgtggtgctaagatgatgcaccctcggtgcttacgtagtatacttctgtctggattcacctttttttcgcatattgtgttaatactctgtaaattatcaaactggcttcctcaatgctcgtgtaattaaatgaaccgttgagtgattaagctagaaggcaagatatactttctatggagtaaattctgaaagtatcaatatgtgttgaactagactaatttaaattttattttcgcaaccattacatactattgaatagtctatttcattctgtgtacctag

SEQ ID NO: 210018 - DNA, 3656 bp, Zea Mays
cgcacgccgaacggcgcctcctcgcaccgatcagcgcagcggctcagcgcccgccagccgccatcaggcagcagcctcgcctctggccattgaagcacacggaattgtctctttcacctgggcaatccgcggagaggtacggcgcgcatagctaaccaaggaggcgtacgagcagcgtgcgtagcaggcaaccatggagacgccgcgcctcgtggtcggtgcggcgtcgcgggccccgccaccagctcctcgatcacagcgacggcgtatcctgcgtccgtgcggcggggcacattgctccccctccgcccgcgctgctccaccggtgcttctaacccggtgctcctcctactcctcttccagggaggggaacggcgattctcatggtaaggcccgccgcgagagctccggttccgtccggttggacgtcgaagcagatagcgatcaggtaccaagtttggctgacgagcaacgtgagggtgatattacagagctcttcaacctggctcaacggaatatcctgtacattaacaagcagcggcttattgccatggaggagatgaagaaactgcatgatgaaaataatttgcttctcgaggaaatacaaggactagaaacagaaatgcaaggtattcccctagaagcagcacagtcgtcaagtttcagtgagttactcctgcggatagatacaatggtcatttctggaatgatcagcatgacggaagcatctgatttaagagagaaacttgtcactaatagaagcataatacaaagcaccttttgtgatattcatcataagccaaatactgaattgctgtctgaactgcaactctttttgcgtaaaccaatagagtatgctaccacttaccttacttttttttcccagttttaccgccttttactcaaattttctgcagtgttgcgggatacctatgtccattttttattgctgccatgacaacttgacacagcgaattgcccattgacacctgacatggcctggctcatatctgatacattgagaaagaatcttgctgcagagggcaagaggaagctcatgtgtgttatccatgagagggaaaaatggcagaagacaatgataggtgtgtagccgtagagagggaatcactttaaatgctggttaagacaatgataggtgtgtagccgtagagagggaatcactttaaatgctggttttgactgttgttctatgcacaaactgtagctaatctggagcttttgctgtaatcccaggtcttttcctttggtaaagcacacaatggaatctttagtgtccttttagtttgttttatagtaaataggattaatcttagattttttttaacgacataggagagttgcatgtcattttactaagaagagggattaatattgtacttaatatttgaagagctaaaatgctgttctattttttaaaatttattagaagaattcctgaatcctatttttctgagcctgcctagctaaacacctgcatctgtatcggattctggttcccacacctgcgtcctggtaacactatttttgcctatgttttgaatcttttggctgcctccctatgtataatttttggccccgccactgcttcccgctgatatttcacctagtgtatctgcaattactttataataatcatgcgacatatttaatttgtcttgttttatcatatttgttgatgctatatttgagcctatgttcaatgcaggaaacctcttcatattgtgcacatctgtagtgaaatgtacccagtagcatcatgtggaccattatcagcatatgttgccagtttatcttgtgagattcaaaaaaaggctaacttggtggaggtgatactacccaagtacaccagcataaacttggatggaattcatggtctaaggagatctgaggcagaatatgaatcttatttcggtggcctttggcataaaaataaaatatggactgggtaaagatacactcctagtgtgcaaagagattacgtcaagtggtgttggtcttgtaataatagaaccatctcagctctcctattttagtcgtgatatgttacgtggctaccctgatgactttgagcgattttcctatttttcccgtgcatccctggattatattgttaaatctggaaagcggccagacattatacacatacataactgggaaactgctatagtggcaccgcttttctgggaaatatttgctcaccagggacttgggaacactcggatattactgacatgccaagacttgaattcagaagtaaatattcatgcctagaggagccaaataaactggagatgtgtgggcttgatccccgtaagcttcatcgtcctgatcgtctgcaggatacaaacaagacacatcttgttaatattcttaagggaggcattgtttattcaaataaagtcgttttgatgtcctcaacacattcaaaagatgctcttattcagggttcacgacatgagctgcaatcaacattagccgcacatagggagaagatattggttgcatcttatggattggatggtgaactttgggatccattcaaagacatttatcttcctcgaaggtattctgccaatgatattgaggggaagtccatttgcagacaagcacttaggcgtagacttcggttcaatggtgattcatccattatagtaggatgtatctgtgatgataattcagatgtccatagtcttaaagaagcagttcatgttgctctgcacaggaatactcaggtcatcatcatggaaacgttagggtctgttgtgaactcaattttgcaagcattaaagggagagataaagggagacaaaatagcatttgttgaggcatatgatgaagctctggcacatttaatatatgcaggctctgatatcattctttgctcttccttccaagatccatcactgcaaatagcgatgaaggcaatgaagtatggatctgtgccagtacagttaaacttttccagcgatgaatcaagggagtcaaaggggcatgagtgccgcaatacagtaatgtctcagtacatcatctcaacctatggagatttgtctctttctcaagcacttgatgactttatcaaggatgggatggctaggggttcttcatgggacgcaaagtgctatagccttcattgggaggcttattcatccataacgaagctgtgaactgggcatctgctagagaagcacatgacctacatgaggcaccatctccccaaattaagggtggatgaagactggcaattattggcctgcgctgcggtctcgacgccgtgcagaggcgtcatgtggtttcgtgatccacgcggggatgggaggagccgcatgagatgctgagtgattggacggttagttggcctcctcacgtggcgcgtctctgcacctttgtctctctggctgactgactggctctgctttcgcctgcgcctgggcatatcgtggaaccctgattggcctagctcgatacggccgcagctatcatgtggtgtttgtttcagcttattttcagcttctggcagctgtggaacatttagctttttaactcgtttttgtgagaatcgatttggtaaaaaccgttaaaaatcaatttaaacatataatcggctgattcgtcatccgttaccttctggatcataa

SEQ ID NO: 210019 - DNA, 3050 bp, Zea Mays
cgcacgccgaacggcgcctcctcgcaccgatcagcgcagcggctcagcgcccgccagccgccatcaggcagcagcctcgcctctggccattgaagcacacggaattgtctctttcacctgggcaatccgcggagaggtacggcgcgcatagctaaccaaggaggcgtacgagcagcgtgcgtagcaggcaaccatggagacgccgcgcctcgtggtcggtgcggcgtcgcgggccccgccaccagctcctcgatcacagcgacggcgtatcctgcgtccgtgcggcggggcacattgctccccctccgcccgcgctgctccaccggtgcttctaacccggtgctcctcctactcctcttccagggaggggaacggcgattctcatggtaaggcccgccgcgagagctccggttccgtccggttggacgtcgaagcagatagcgatcaggtaccaagtttggctgacgagcaacgtgagggtgatattacagagctcttcaacctggctcaacggaatatcctgtacattaacaagcagcggcttattgccatggaggagatgaagaaactgcatgatgaaaataatttgcttctcgaggaaatacaaggactagaaacagaaatgcaaggtattcccctagaagcagcacagtcgtcaagtttcagtgagttactcctgcggatagatacaatggtcatttctggaatgatcagcatgacggaagcatctgatttaagagagaaacttgtcactaatagaagcataatacaaagcaccttttgtgatattcatcataagccaaatactgaattgctgtctgaactgcaactctttttgcgtaaaccaatagagaaacctcttcatattgtgcacatctgtagtgaaatgtacccagtagcatcatgtggaccattatcagcatatgttgccagtttatcttgtgagattcaaaaaaaggctaacttggtggaggtgatactacccaagtacaccagcataaacttggatggaattcatggtctaaggagatctgaggcagaatatgaatcttatttcggtggcctttggcataaaaataaaatatggactgggtaaagatacactcctagtgtgcaaagagattacgtcaagtggtgttggtcttgtaataatagaaccatctcagctctcctattttagtcgtgatatgttacgtggctaccctgatgactttgagcgattttcctatttttcccgtgcatccctggattatattgttaaatctggaaagcggccagacattatacacatacataactgggaaactgctatagtggcaccgcttttctgggaaatatttgctcaccagggacttgggaacactcggatattactgacatgccaagacttgaattcagaagtaaatattcatgcctagaggagccaaataaactggagatgtgtgggcttgatccccgtaagcttcatcgtcctgatcgtctgcaggatacaaacaagacacatcttgttaatattcttaagggaggcattgtttattcaaataaagtcgttttgatgtcctcaacacattcaaaagatgctcttattcagggttcacgacatgagctgcaatcaacattagccgcacatagggagaagatattggttgcatcttatggattggatggtgaactttgggatccattcaaagacatttatcttcctcgaaggtattctgccaatgatattgaggggaagtccatttgcagacaagcacttaggcgtagacttcggttcaatggtgattcatccattatagtaggatgtatctgtgatgataattcagatgtccatagtcttaaagaagcagttcatgttgctctgcacaggaatactcaggtgtgtggtagagtactttgttagataacttccttgggacttaaacagtttatttctctgctagcacagttgcaagagtttataatgtacaggtcatcatcatggaaacgttagggtctgttgtgaactcaattttgcaagcattaaagggagagataaagggagacaaaatagcatttgttgaggcatatgatgaagctctggcacatttaatatatgcaggctctgatatcattctttgctcttccttccaagatccatcactgcaaatagcgatgaaggcaatgaagtatggatctgtgccagtacagttaaacttttccagcgatgaatcaagggagtcaaaggggcatgagtgccgcaatacagtaatgtctcagtacatcatctcaacctatggagatttgtctctttctcaagcacttgatgactttaaaaatgacccttcgcattgggatcgacagatcaaggatgggatggctaggggttcttcatgggacgcaaagtgctatagccttcattgggaggcttattcatccataacgaagctgtgaactgggcatctgctagagaagcacatgacctacatgaggcaccatctccccaaattaagggtggatgaagactggcaattattggcctgcgctgcggtctcgacgccgtgcagaggtagctgcagctttgctcattgggtttgttgcttgcttttgtccagagactagggcaggacaggactgtgttaaggcaggcggccgcgttattgcctgtgcttctgttgttaccttgtgctatgctatatgctaatcatttggcaggcgtcatgtggtttcgtgatccacgcggggatgggaggagccgcatgagatgctgagtgattggacggttagttggcctcctcacgtggcgcgtctctgcacctttgtctctctggctgactgactggctctgctttcgcctgcgcctgggcatatcgtggaaccctgattggcctagctcgatacggccgcagctatcatgtggtgtttgtttcagcttattttcagcttctggcagctgtggaacatttagctttttaactcgtttttgtgagaatcgatttggtaaaaaccgttaaaaatcaatttaaacatataatcggctgattcgtcatccgttaccttctggatcataa

SEQ ID NO: 210020 - DNA, 1715 bp, Zea Mays
gaagacaatgataggaaacctcttcatattgtgcacatctgtagtgaaatgtacccagtagcatcatgtggaccattatcagcatatgttgccagtttatcttgtgagattcaaaaaaaggctaacttggtggaggtgatactacccaagtacaccagcataaacttggatggaattcatggtctaaggagatctgaggcagaatatgaatcttatttcggtggcctttggcataaaaataaaatatggactgggtaaagatacactcctagtgtgcaaagagattacgtcaagtggtgttggtcttgtaataatagaaccatctcagctctcctattttagtcgtgatatgttacgtggctaccctgatgactttgagcgattttcctatttttcccgtgcatccctggattatattgttaaatctggaaagcggccagacattatacacatacataactgggaaactgctatagtggcaccgcttttctgggaaatatttgctcaccagggacttgggaacactcggatattactgacatgccaagacttgaattcagaagtaaatattcatgcctagaggagccaaataaactggagatgtgtgggcttgatccccgtaagcttcatcgtcctgatcgtctgcaggatacaaacaagacacatcttgttaatattcttaagggaggcattgtttattcaaataaagtcgttttgatgtcctcaacacattcaaaagatgctcttattcagggttcacgacatgagctgcaatcaacattagccgcacatagggagaagatattggttgcatcttatggattggatggtgaactttgggatccattcaaagacatttatcttcctcgaaggtattctgccaatgatattgaggggaagtccatttgcagacaagcacttaggcgtagacttcggttcaatggtgattcatccattatagtaggatgtatctgtgatgataattcagatgtccatagtcttaaagaagcagttcatgttgctctgcacaggaatactcaggtcatcatcatggaaacgttagggtctgttgtgaactcaattttgcaagcattaaagggagagataaagggagacaaaatagcatttgttgaggcatatgatgaagctctggcacatttaatatatgcaggctctgatatcattctttgctcttccttccaagatccatcactgcaaatagcgatgaaggcaatgaagtatggatctgtgccagtacagttaaacttttccagcgatgaatcaagggagtcaaaggggcatgagtgccgcaatacagtaatgtctcagtacatcatctcaacctatggagatttgtctctttctcaagcacttgatgactttaaaaatgacccttcgcattgggatcgacagatcaaggatgggatggctaggggttcttcatgggacgcaaagtgctatagccttcattgggaggcttattcatccataacgaagctgtgaactgggcatctgctagagaagcacatgacctacatgaggcaccatctccccaaattaagggaacaagcatgaacagtgtcagtgcacttggcacatacacatcattctggacaaacaaacagtacccctccgttttaggggcctttttaaagcgtttttcaaggaataagaactcggataatagatttgcctcgcaattgtaactcatcagc

SEQ ID NO: 210021 - DNA, 1785 bp, Zea Mays
aaaatggcagaagacaatgataggaaacctcttcatattgtgcacatctgtagtgaaatgtacccagtagcatcatgtggaccattatcagcatatgttgccagtttatcttgtgagattcaaaaaaaggctaacttggtggaggtgatactacccaagtacaccagcataaacttggatggaattcatggtctaaggagatctgaggcagaatatgaatcttatttcggtggcctttggcataaaaataaaatatggactggtacgtcaagtggtgttggtcttgtaataatagaaccatctcagctctcctattttagtcgtgatatgttacgtggctaccctgatgactttgagcgattttcctatttttcccgtgcatccctggattatattgttaaatctggaaagcggccagacattatacacatacataactgggaaactgctatagtggcaccgcttttctgggaaatatttgctcaccagggacttgggaacactcggatattactgacatgccaagacttgaattcagaagtaaatattcatgcctagaggagccaaataaactggagatgtgtgggcttgatccccgtaagcttcatcgtcctgatcgtctgcaggatacaaacaagacacatcttgttaatattcttaagggaggcattgtttattcaaataaagtcgttttgatgtcctcaacacattcaaaagatgctcttattcagggttcacgacatgagctgcaatcaacattagccgcacatagggagaagatattggttgcatcttatggattggatggtgaactttgggatccattcaaagacatttatcttcctcgaaggtattctgccaatgatattgaggggaagtccatttgcagacaagcacttaggcgtagacttcggttcaatggtgattcatccattatagtaggatgtatctgtgatgataattcagatgtccatagtcttaaagaagcagttcatgttgctctgcacaggaatactcaggtgtgtggtagagtactttgttagataacttccttgggacttaaacagtttatttctctgctagcacagttgcaagagtttataatgtacaggtcatcatcatggaaacgttagggtctgttgtgaactcaattttgcaagcattaaagggagagataaagggagacaaaatagcatttgttgaggcatatgatgaagctctggcacatttaatatatgcaggctctgatatcattctttgctcttccttccaagatccatcactgcaaatagcgatgaaggcaatgaagtatggatctgtgccagtacagttaaacttttccagcgatgaatcaagggagtcaaaggggcatgagtgccgcaatacagtaatgtctcagtacatcatctcaacctatggagatttgtctctttctcaagcacttgatgactttaaaaatgacccttcgcattgggatcgacagatcaaggatgggatggctaggggttcttcatgggacgcaaagtgctatagccttcattgggaggcttattcatccataacgaagctgtgaactgggcatctgctagagaagcacatgacctacatgaggcaccatctccccaaattaagggaacaagcatgaacagtgtcagtgcacttggcacatacacatcattctggacaaacaaacagtacccctccgttttaggggcctttttaaagcgtttttcaaggaataagaactcggataatagatttgcctcgcaattgtaactcatcagc

SEQ ID NO: 210022 - DNA, 2755 bp, Zea Mays
cgcacgccgaacggcgcctcctcgcaccgatcagcgcagcggctcagcgcccgccagccgccatcaggcagcagcctcgcctctggccattgaagcacacggaattgtctctttcacctgggcaatccgcggagaggtacggcgcgcatagctaaccaaggaggcgtacgagcagcgtgcgtagcaggcaaccatggagacgccgcgcctcgtggtcggtgcggcgtcgcgggccccgccaccagctcctcgatcacagcgacggcgtatcctgcgtccgtgcggcggggcacattgctccccctccgcccgcgctgctccaccggtgcttctaacccggtgctcctcctactcctcttccagggaggggaacggcgattctcatggtaaggcccgccgcgagagctccggttccgtccggttggacgtcgaagcagatagcgatcaggtaccaagtttggctgacgagcaacgtgagggtgatattacagagctcttcaacctggctcaacggaatatcctgtacattaacaagcagcggcttattgccatggaggagatgaagaaactgcatgatgaaaataatttgcttctcgaggaaatacaaggactagaaacagaaatgcaaggtattcccctagaagcagcacagtcgtcaagtttcagtgagttactcctgcggatagatacaatggtcatttctggaatgatcagcatgacggaagcatctgatttaagagagaaacttgtcactaatagaagcataatacaaagcaccttttgtgatattcatcataagccaaatactgaattgctgtctgaactgcaactctttttgcgtaaaccaatagagaaacctcttcatattgtgcacatctgtagtgaaatgtacccagtagcatcatgtggaccattatcagcatatgttgccagtttatcttgtgagattcaaaaaaaggctaacttggtggaggtgatactacccaagtacaccagcataaacttggatggaattcatggtctaaggagatctgaggcagaatatgaatcttatttcggtggcctttggcataaaaataaaatatggactgggtaaagatacactcctagtgtgcaaagagattacgtcaagtggtgttggtcttgtaataatagaaccatctcagctctcctattttagtcgtgatatgttacgtggctaccctgatgactttgagcgattttcctatttttcccgtgcatccctggattatattgttaaatctggaaagcggccagacattatacacatacataactgggaaactgctatagtggcaccgcttttctgggaaatatttgctcaccagggacttgggaacactcggatattactgacatgccaagacttgaattcagaatgcctagaggagccaaataaactggagatgtgtgggcttgatccccgtaagcttcatcgtcctgatcgtctgcaggatacaaacaagacacatcttgttaatattcttaagggaggcattgtttattcaaataaagtcgttttgatgtcctcaacacattcaaaagatgctcttattcagggttcacgacatgagctgcaatcaacattagccgcacatagggagaagatattggttgcatcttatggattggatggtgaactttgggatccattcaaagacatttatcttcctcgaaggtattctgccaatgatattgaggggaagtccatttgcagacaagcacttaggcgtagacttcggttcaatggtgattcatccattatagtaggatgtatctgtgatgataattcagatgtccatagtcttaaagaagcagttcatgttgctctgcacaggaatactcaggtcatcatcatggaaacgttagggtctgttgtgaactcaattttgcaagcattaaagggagagataaagggagacaaaatagcatttgttgaggcatatgatgaagctctggcacatttaatatatgcaggctctgatatcattctttgctcttccttccaagatccatcactgcaaatagcgatgaaggcaatgaagtatggatctgtgccagtacagttaaacttttccagcgatgaatcaagggagtcaaaggggcatgagtgccgcaatacagtaatgtctcagtacatcatctcaacctatggagatttgtctctttctcaagcacttgatgactttgtaagtttgcaatctcaagggagaatatctattctgtcacgggctgctcattgtgcacaatcaatatctcttaacagattaaataatgttctgaacaacaatataggtcaaagttgcaatcggaaggctcaggaagatgattgagtgaaactatcttattttctgaagttacttgcttcttgaatttaacataatttacttcccaatgtacagaaaaatgacccttcgcattgggatcgacagatcaaggatgggatggctaggggttcttcatgggacgcaaagtgctatagccttcattgggaggcttattcatccataacgaagctgtgaactgggcatctgctagagaagcacatgacctacatgaggcaccatctccccaaattaagggaacaagcatgaacagtgtcagtgcacttggcacatacacatcattctggacaaacaaacagtacccctccgttttaggggcctttttaaagcgtttttcaaggaataagaactcggataatagatttgcctcgcaattgtaactcatcagc

SEQ ID NO: 210023 - DNA, 2474 bp, Zea Mays
cgcacgccgaacggcgcctcctcgcaccgatcagcgcagcggctcagcgcccgccagccgccatcaggcagcagcctcgcctctggccattgaagcacacggaattgtctctttcacctgggcaatccgcggagaggtacggcgcgcatagctaaccaaggaggcgtacgagcagcgtgcgtagcaggcaaccatggagacgccgcgcctcgtggtcggtgcggcgtcgcgggccccgccaccagctcctcgatcacagcgacggcgtatcctgcgtccgtgcggcggggcacattgctccccctccgcccgcgctgctccaccggtgcttctaacccggtgctcctcctactcctcttccagggaggggaacggcgattctcatggtaaggcccgccgcgagagctccggttccgtccggttggacgtcgaagcagatagcgatcaggtaccaagtttggctgacgagcaacgtgagggtgatattacagagctcttcaacctggctcaacggaatatcctgtacattaacaagcagcggcttattgccatggaggagatgaagaaactgcatgatgaaaataatttgcttctcgaggaaatacaaggactagaaacagaaatgcaaggtattcccctagaagcagcacagtcgtcaagtttcagaaacctcttcatattgtgcacatctgtagtgaaatgtacccagtagcatcatgtggaccattatcagcatatgttgccagtttatcttgtgagattcaaaaaaaggctaacttggtggaggtgatactacccaagtacaccagcataaacttggatggaattcatggtctaaggagatctgaggcagaatatgaatcttatttcggtggcctttggcataaaaataaaatatggactggtacgtcaagtggtgttggtcttgtaataatagaaccatctcagctctcctattttagtcgtgatatgttacgtggctaccctgatgactttgagcgattttcctatttttcccgtgcatccctggattatattgttaaatctggaaagcggccagacattatacacatacataactgggaaactgctatagtggcaccgcttttctgggaaatatttgctcaccagggacttgggaacactcggatattactgacatgccaagacttgaattcagaatgcctagaggagccaaataaactggagatgtgtgggcttgatccccgtaagcttcatcgtcctgatcgtctgcaggatacaaacaagacacatcttgttaatattcttaagggaggcattgtttattcaaataaagtcgttttgatgtcctcaacacattcaaaagatgctcttattcagggttcacgacatgagctgcaatcaacattagccgcacatagggagaagatattggttgcatcttatggattggatggtgaactttgggatccattcaaagacatttatcttcctcgaaggtattctgccaatgatattgaggggaagtccatttgcagacaagcacttaggcgtagacttcggttcaatggtgattcatccattatagtaggatgtatctgtgatgataattcagatgtccatagtcttaaagaagcagttcatgttgctctgcacaggaatactcaggtcatcatcatggaaacgttagggtctgttgtgaactcaattttgcaagcattaaagggagagataaagggagacaaaatagcatttgttgaggcatatgatgaagctctggcacatttaatatatgcaggctctgatatcattctttgctcttccttccaagatccatcactgcaaatagcgatgaaggcaatgaagtatggatctgtgccagtacagttaaacttttccagcgatgaatcaagggagtcaaaggggcatgagtgccgcaatacagtaatgtctcagtacatcatctcaacctatggagatttgtctctttctcaagcacttgatgactttaaaaatgacccttcgcattgggatcgacagatcaaggatgggatggctaggggttcttcatgggacgcaaagtgctatagccttcattgggaggcttattcatccataacgaagctgtgaactgggcatctgctagagaagcacatgacctacatgaggcaccatctccccaaattaagggtaccattttttggcatataattagactatcatttaatttcttagatgaacatttaatcaagcaaaaggtcagtgaataaaaaatggtatgtagagctgcactggatttcacaatatttccaatttactattttgagtgtgcgtttttaggaacaagcatgaacagtgtcagtgcacttggcacatacacatcattctggacaaacaaacagtacccctccgttttaggggcctttttaaagcgtttttcaaggaataagaactcggataatagatttgcctcgcaattgtaactcatcagc

SEQ ID NO: 210024 - DNA, 2631 bp, Zea Mays
cgcacgccgaacggcgcctcctcgcaccgatcagcgcagcggctcagcgcccgccagccgccatcaggcagcagcctcgcctctggccattgaagcacacggaattgtctctttcacctgggcaatccgcggagaggtacggcgcgcatagctaaccaaggaggcgtacgagcagcgtgcgtagcaggcaaccatggagacgccgcgcctcgtggtcggtgcggcgtcgcgggccccgccaccagctcctcgatcacagcgacggcgtatcctgcgtccgtgcggcggggcacattgctccccctccgcccgcgctgctccaccggtgcttctaacccggtgctcctcctactcctcttccagggaggggaacggcgattctcatggtaaggcccgccgcgagagctccggttccgtccggttggacgtcgaagcagatagcgatcaggtaccaagtttggctgacgagcaacgtgagggtgatattacagagctcttcaacctggctcaacggaatatcctgtacattaacaagcagcggcttattgccatggaggagatgaagaaactgcatgatgaaaataatttgcttctcgaggaaatacaaggactagaaacagaaatgcaaggtattcccctagaagcagcacagtcgtcaagtttcagtgagttactcctgcggatagatacaatggtcatttctggaatgatcagcatgacggaagcatctgatttaagagagaaacttgtcactaatagaagcataatacaaagcaccttttgtgatattcatcataagccaaatactgaattgctgtctgaactgcaactctttttgcgtaaaccaatagagaaacctcttcatattgtgcacatctgtagtgaaatgtacccagtagcatcatgtggaccattatcagcatatgttgccagtttatcttgtgagattcaaaaaaaggctaacttggtggaggtgatactacccaagtacaccagcataaacttggatggaattcatggtctaaggagatctgaggcagaatatgaatcttatttcggtggcctttggcataaaaataaaatatggactgggtaaagatacactcctagtgtgcaaagagattacgtcaagtggtgttggtcttgtaataatagaaccatctcagctctcctattttagtcgtgatatgttacgtggctaccctgatgactttgagcgattttcctatttttcccgtgcatccctggattatattgttaaatctggaaagcggccagacattatacacatacataactgggaaactgctatagtggcaccgcttttctgggaaatatttgctcaccagggacttgggaacactcggatattactgacatgccaagacttgaattcagaatgcctagaggagccaaataaactggagatgtgtgggcttgatccccgtaagcttcatcgtcctgatcgtctgcaggatacaaacaagacacatcttgttaatattcttaagggaggcattgtttattcaaataaagtcgttttgatgtcctcaacacattcaaaagatgctcttattcagggttcacgacatgagctgcaatcaacattagccgcacatagggagaagatattggttgcatcttatggattggatggtgaactttgggatccattcaaagacatttatcttcctcgaaggtattctgccaatgatattgaggggaagtccatttgcagacaagcacttaggcgtagacttcggttcaatggtgattcatccattatagtaggatgtatctgtgatgataattcagatgtccatagtcttaaagaagcagttcatgttgctctgcacaggaatactcaggtcatcatcatggaaacgttagggtctgttgtgaactcaattttgcaagcattaaagggagagataaaggctctgatatcattctttgctcttccttccaagatccatcactgcaaatagcgatgaaggcaatgaagtatggatctgtgccagtacagttaaacttttccagcgatgaatcaagggagtcaaaggggcatgagtgccgcaatacagtaatgtctcagtacatcatctcaacctatggagatttgtctctttctcaagcacttgatgactttaaaaatgacccttcgcattgggatcgacagatcaaggatgggatggctaggggttcttcatgggacgcaaagtgctatagccttcattgggaggcttattcatccataacgaagctgtgaactgggcatctgctagagaagcacatgacctacatgaggcaccatctccccaaattaagggtaccattttttggcatataattagactatcatttaatttcttagatgaacatttaatcaagcaaaaggtcagtgaataaaaaatggtatgtagagctgcactggatttcacaatatttccaatttactattttgagtgtgcgtttttaggaacaagcatgaacagtgtcagtgcacttggcacatacacatcattctggacaaacaaacagtacccctccgttttaggggcctttttaaagcgtttttcaaggaataagaactcggataatagatttgcctcgcaattgtaactcatcagc

SEQ ID NO: 210025 - DNA, 2600 bp, Zea Mays
cgcacgccgaacggcgcctcctcgcaccgatcagcgcagcggctcagcgcccgccagccgccatcaggcagcagcctcgcctctggccattgaagcacacggaattgtctctttcacctgggcaatccgcggagaggtacggcgcgcatagctaaccaaggaggcgtacgagcagcgtgcgtagcaggcaaccatggagacgccgcgcctcgtggtcggtgcggcgtcgcgggccccgccaccagctcctcgatcacagcgacggcgtatcctgcgtccgtgcggcggggcacattgctccccctccgcccgcgctgctccaccggtgcttctaacccggtgctcctcctactcctcttccagggaggggaacggcgattctcatggtaaggcccgccgcgagagctccggttccgtccggttggacgtcgaagcagatagcgatcaggtaccaagtttggctgacgagcaacgtgagggtgatattacagagctcttcaacctggctcaacggaatatcctgtacattaacaagcagcggcttattgccatggaggagatgaagaaactgcatgatgaaaataatttgcttctcgaggaaatacaaggactagaaacagaaatgcaaggtattcccctagaagcagcacagtcgtcaagtttcagtgagttactcctgcggatagatacaatggtcatttctggaatgatcagcatgacggaagcatctgatttaagagagaaacttgtcactaatagaagcataatacaaagcaccttttgtgatattcatcataagccaaatactgaattgctgtctgaactgcaactctttttgcgtaaaccaatagagaaacctcttcatattgtgcacatctgtagtgaaatgtacccagtagcatcatgtggaccattatcagcatatgttgccagtttatcttgtgagattcaaaaaaaggctaacttggtggaggtgatactacccaagtacaccagcataaacttggatggaattcatggtctaaggagatctgaggcagaatatgaatcttatttcggtggcctttggcataaaaataaaatatggactggtacgtcaagtggtgttggtcttgtaataatagaaccatctcagctctcctattttagtcgtgatatgttacgtggctaccctgatgactttgagcgattttcctatttttcccgtgcatccctggattatattgttaaatctggaaagcggccagacattatacacatacataactgggaaactgctatagtggcaccgcttttctgggaaatatttgctcaccagggacttgggaacactcggatattactgacatgccaagacttgaattcagaatgcctagaggagccaaataaactggagatgtgtgggcttgatccccgtaagcttcatcgtcctgatcgtctgcaggatacaaacaagacacatcttgttaatattcttaagggaggcattgtttattcaaataaagtcgttttgatgtcctcaacacattcaaaagatgctcttattcagggttcacgacatgagctgcaatcaacattagccgcacatagggagaagatattggttgcatcttatggattggatggtgaactttgggatccattcaaagacatttatcttcctcgaaggtattctgccaatgatattgaggggaagtccatttgcagacaagcacttaggcgtagacttcggttcaatggtgattcatccattatagtaggatgtatctgtgatgataattcagatgtccatagtcttaaagaagcagttcatgttgctctgcacaggaatactcaggtcatcatcatggaaacgttagggtctgttgtgaactcaattttgcaagcattaaagggagagataaaggctctgatatcattctttgctcttccttccaagatccatcactgcaaatagcgatgaaggcaatgaagtatggatctgtgccagtacagttaaacttttccagcgatgaatcaagggagtcaaaggggcatgagtgccgcaatacagtaatgtctcagtacatcatctcaacctatggagatttgtctctttctcaagcacttgatgactttaaaaatgacccttcgcattgggatcgacagatcaaggatgggatggctaggggttcttcatgggacgcaaagtgctatagccttcattgggaggcttattcatccataacgaagctgtgaactgggcatctgctagagaagcacatgacctacatgaggcaccatctccccaaattaagggtaccattttttggcatataattagactatcatttaatttcttagatgaacatttaatcaagcaaaaggtcagtgaataaaaaatggtatgtagagctgcactggatttcacaatatttccaatttactattttgagtgtgcgtttttaggaacaagcatgaacagtgtcagtgcacttggcacatacacatcattctggacaaacaaacagtacccctccgttttaggggcctttttaaagcgtttttcaaggaataagaactcggataatagatttgcctcgcaattgtaactcatcagc

SEQ ID NO: 210026 - DNA, 2658 bp, Zea Mays
cgcacgccgaacggcgcctcctcgcaccgatcagcgcagcggctcagcgcccgccagccgccatcaggcagcagcctcgcctctggccattgaagcacacggaattgtctctttcacctgggcaatccgcggagaggtacggcgcgcatagctaaccaaggaggcgtacgagcagcgtgcgtagcaggcaaccatggagacgccgcgcctcgtggtcggtgcggcgtcgcgggccccgccaccagctcctcgatcacagcgacggcgtatcctgcgtccgtgcggcggggcacattgctccccctccgcccgcgctgctccaccggtgcttctaacccggtgctcctcctactcctcttccagggaggggaacggcgattctcatggtaaggcccgccgcgagagctccggttccgtccggttggacgtcgaagcagatagcgatcaggtaccaagtttggctgacgagcaacgtgagggtgatattacagagctcttcaacctggctcaacggaatatcctgtacattaacaagcagcggcttattgccatggaggagatgaagaaactgcatgatgaaaataatttgcttctcgaggaaatacaaggactagaaacagaaatgcaaggtattcccctagaagcagcacagtcgtcaagtttcagtgagttactcctgcggatagatacaatggtcatttctggaatgatcagcatgacggaagcatctgatttaagagagaaacttgtcactaatagaagcataatacaaagcaccttttgtgatattcatcataagccaaatactgaattgctgtctgaactgcaactctttttgcgtaaaccaatagagaaacctcttcatattgtgcacatctgtagtgaaatgtacccagtagcatcatgtggaccattatcagcatatgttgccagtttatcttgtgagattcaaaaaaaggctaacttggtggaggtgatactacccaagtacaccagcataaacttggatggaattcatggtctaaggagatctgaggcagaatatgaatcttatttcggtggcctttggcataaaaataaaatatggactgggtaaagatacactcctagtgtgcaaagagattacgtcaagtggtgttggtcttgtaataatagaaccatctcagctctcctattttagtcgtgatatgttacgtggctaccctgatgactttgagcgattttcctatttttcccgtgcatccctggattatattgttaaatctggaaagcggccagacattatacacatacataactgggaaactgctatagtggcaccgcttttctgggaaatatttgctcaccagggacttgggaacactcggatattactgacatgccaagacttgaattcagaatgcctagaggagccaaataaactggagatgtgtgggcttgatccccgtaagcttcatcgtcctgatcgtctgcaggatacaaacaagacacatcttgttaatattcttaagggaggcattgtttattcaaataaagtcgttttgatgtcctcaacacattcaaaagatgctcttattcagggttcacgacatgagctgcaatcaacattagccgcacatagggagaagatattggttgcatcttatggattggatggtgaactttgggatccattcaaagacatttatcttcctcgaaggtattctgccaatgatattgaggggaagtccatttgcagacaagcacttaggcgtagacttcggttcaatggtgattcatccattatagatgtatctgtgatgataattcagatgtccatagtcttaaagaagcagttcatgttgctctgcacaggaatactcaggtcatcatcatggaaacgttagggtctgttgtgaactcaattttgcaagcattaaagggagagataaagggagacaaaatagcatttgttgaggcatatgatgaagctctggcacatttaatatatgcaggctctgatatcattctttgctcttccttccaagatccatcactgcaaatagcgatgaaggcaatgaagtatggatctgtgccagtacagttaaacttttccagcgatgaatcaagggagtcaaaggggcatgagtgccgcaatacagtaatgtctcagtacatcatctcaacctatggagatttgtctctttctcaagcacttgatgactttatcaaggatgggatggctaggggttcttcatgggacgcaaagtgctatagccttcattgggaggcttattcatccataacgaagctgtgaactgggcatctgctagagaagcacatgacctacatgaggcaccatctccccaaattaagggtaccattttttggcatataattagactatcatttaatttcttagatgaacatttaatcaagcaaaaggtcagtgaataaaaaatggtatgtagagctgcactggatttcacaatatttccaatttactattttgagtgtgcgtttttaggaacaagcatgaacagtgtcagtgcacttggcacatacacatcattctggacaaacaaacagtacccctccgttttaggggcctttttaaagcgtttttcaaggaataagaactcggataatagatttgcctcgcaattgtaactcatcagc

SEQ ID NO: 210027 - DNA, 2643 bp, Zea Mays
cgcacgccgaacggcgcctcctcgcaccgatcagcgcagcggctcagcgcccgccagccgccatcaggcagcagcctcgcctctggccattgaagcacacggaattgtctctttcacctgggcaatccgcggagaggtacggcgcgcatagctaaccaaggaggcgtacgagcagcgtgcgtagcaggcaaccatggagacgccgcgcctcgtggtcggtgcggcgtcgcgggccccgccaccagctcctcgatcacagcgacggcgtatcctgcgtccgtgcggcggggcacattgctccccctccgcccgcgctgctccaccggtgcttctaacccggtgctcctcctactcctcttccagggaggggaacggcgattctcatggtaaggcccgccgcgagagctccggttccgtccggttggacgtcgaagcagatagcgatcaggtaccaagtttggctgacgagcaacgtgagggtgatattacagagctcttcaacctggctcaacggaatatcctgtacattaacaagcagcggcttattgccatggaggagatgaagaaactgcatgatgaaaataatttgcttctcgaggaaatacaaggactagaaacagaaatgcaagcacagtcgtcaagtttcagtgagttactcctgcggatagatacaatggtcatttctggaatgatcagcatgacggaagcatctgatttaagagagaaacttgtcactaatagaagcataatacaaagcaccttttgtgatattcatcataagccaaatactgaattgctgtctgaactgcaactctttttgcgtaaaccaatagagaaacctcttcatattgtgcacatctgtagtgaaatgtacccagtagcatcatgtggaccattatcagcatatgttgccagtttatcttgtgagattcaaaaaaaggctaacttggtggaggtgatactacccaagtacaccagcataaacttggatggaattcatggtctaaggagatctgaggcagaatatgaatcttatttcggtggcctttggcataaaaataaaatatggactggtacgtcaagtggtgttggtcttgtaataatagaaccatctcagctctcctattttagtcgtgatatgttacgtggctaccctgatgactttgagcgattttcctatttttcccgtgcatccctggattatattgttaaatctggaaagcggccagacattatacacatacataactgggaaactgctatagtggcaccgcttttctgggaaatatttgctcaccagggacttgggaacactcggatattactgacatgccaagacttgaattcagaatgcctagaggagccaaataaactggagatgtgtgggcttgatccccgtaagcttcatcgtcctgatcgtctgcaggatacaaacaagacacatcttgttaatattcttaagggaggcattgtttattcaaataaagtcgttttgatgtcctcaacacattcaaaagatgctcttattcagggttcacgacatgagctgcaatcaacattagccgcacatagggagaagatattggttgcatcttatggattggatggtgaactttgggatccattcaaagacatttatcttcctcgaaggtattctgccaatgatattgaggggaagtccatttgcagacaagcacttaggcgtagacttcggttcaatggtgattcatccattatagtaggatgtatctgtgatgataattcagatgtccatagtcttaaagaagcagttcatgttgctctgcacaggaatactcaggtcatcatcatggaaacgttagggtctgttgtgaactcaattttgcaagcattaaagggagagataaagggagacaaaatagcatttgttgaggcatatgatgaagctctggcacatttaatatatgcaggctctgatatcattctttgctcttccttccaagatccatcactgcaaatagcgatgaaggcaatgaagtatggatctgtgccagtacagttaaacttttccagcgatgaatcaagggagtcaaaggggcatgagtgccgcaatacagtaatgtctcagtacatcatctcaacctatggagatttgtctctttctcaagcacttgatgactttaaaaatgacccttcgcattgggatcgacagatcaaggatgggatggctaggggttcttcatgggacgcaaagtgctatagccttcattgggaggcttattcatccataacgaagctgtgaactgggcatctgctagagaagcacatgacctacatgaggcaccatctccccaaattaagggtaccattttttggcatataattagactatcatttaatttcttagatgaacatttaatcaagcaaaaggtcagtgaataaaaaatggtatgtagagctgcactggatttcacaatatttccaatttactattttgagtgtgcgtttttaggaacaagcatgaacagtgtcagtgcacttggcacatacacatcattctggacaaacaaacagtacccctccgttttaggggcctttttaaagcgtttttcaaggaataagaactcggataatagatttgcctcgcaattgtaactcatcagc

SEQ ID NO: 210028 - DNA, 2526 bp, Zea Mays
cgcacgccgaacggcgcctcctcgcaccgatcagcgcagcggctcagcgcccgccagccgccatcaggcagcagcctcgcctctggccattgaagcacacggaattgtctctttcacctgggcaatccgcggagaggtacggcgcgcatagctaaccaaggaggcgtacgagcagcgtgcgtagcaggcaaccatggagacgccgcgcctcgtggtcggtgcggcgtcgcgggccccgccaccagctcctcgatcacagcgacggcgtatcctgcgtccgtgcggcggggcacattgctccccctccgcccgcgctgctccaccggtgcttctaacccggtgctcctcctactcctcttccagggaggggaacggcgattctcatggtaaggcccgccgcgagagctccggttccgtccggttggacgtcgaagcagatagcgatcaggtaccaagtttggctgacgagcaacgtgagggtgatattacagagctcttcaacctggctcaacggaatatcctgtacattaacaagcagcggcttattgccatggaggagatgaagaaactgcatgatgaaaataatttgcttctcgaggaaatacaaggactagaaacagaaatgcaaggtattcccctagaagcagcacagtcgtcaagtttcagtgagttactcctgcggatagatacaatggtcatttctggaatgatcagcatgacggaagcatctgatttaagagagaaacttgtcactaatagaagcataatacaaagcaccttttgtgatattcatcataagccaaatactgaattgctgtctgaactgcaactctttttgcgtaaaccaatagagaaacctcttcatattgtgcacatctgtagtgaaatgtacccagtagcatcatgtggaccattatcagcatatgttgccagtttatcttgtgagattcaaaaaaaggctaacttggtggaggtgatactacccaagtacaccagcataaacttggatggaattcatggtctaaggagatctgaggcagaatatgaatcttatttcggtggcctttggcataaaaataaaatatggactgggtaaagatacactcctagtgtgcaaagagattacgtcaagtggtgttggtcttgtaataatagaaccatctcagctctcctattttagtcgtgatatgttacgtggctaccctgatgactttgagcgattttcctatttttcccgtgcatccctggattatattgttaaatctggaaagcggccagacattatacacatacataactgggaaactgctatagtggcaccgcttttctgggaaatatttgctcaccagggacttgggaacactcggatattactgacatgccaagacttgaattcagaatgcctagaggagccaaataaactggagatgtgtgggcttgatccccgtaagcttcatcgtcctgatcgtctgcaggatacaaacaagacacatcttgttaatattcttaagggaggcattgtttattcaaataaagtcgttttgatgtcctcaacacattcaaaagatgctcttattcagggttcacgacatgagctgcaatcaacattagccgcacataggtaggatgtatctgtgatgataattcagatgtccatagtcttaaagaagcagttcatgttgctctgcacaggaatactcaggtcatcatcatggaaacgttagggtctgttgtgaactcaattttgcaagcattaaagggagagataaagggagacaaaatagcatttgttgaggcatatgatgaagctctggcacatttaatatatgcaggctctgatatcattctttgctcttccttccaagatccatcactgcaaatagcgatgaaggcaatgaagtatggatctgtgccagtacagttaaacttttccagcgatgaatcaagggagtcaaaggggcatgagtgccgcaatacagtaatgtctcagtacatcatctcaacctatggagatttgtctctttctcaagcacttgatgactttaaaaatgacccttcgcattgggatcgacagatcaaggatgggatggctaggggttcttcatgggacgcaaagtgctatagccttcattgggaggcttattcatccataacgaagctgtgaactgggcatctgctagagaagcacatgacctacatgaggcaccatctccccaaattaagggtaccattttttggcatataattagactatcatttaatttcttagatgaacatttaatcaagcaaaaggtcagtgaataaaaaatggtatgtagagctgcactggatttcacaatatttccaatttactattttgagtgtgcgtttttaggaacaagcatgaacagtgtcagtgcacttggcacatacacatcattctggacaaacaaacagtacccctccgttttaggggcctttttaaagcgtttttcaaggaataagaactcggataatagatttgcctcgcaattgtaactcatcagc

SEQ ID NO: 210029 - DNA, 2644 bp, Zea Mays
cgcacgccgaacggcgcctcctcgcaccgatcagcgcagcggctcagcgcccgccagccgccatcaggcagcagcctcgcctctggccattgaagcacacggaattgtctctttcacctgggcaatccgcggagaggtacggcgcgcatagctaaccaaggaggcgtacgagcagcgtgcgtagcaggcaaccatggagacgccgcgcctcgtggtcggtgcggcgtcgcgggccccgccaccagctcctcgatcacagcgacggcgtatcctgcgtccgtgcggcggggcacattgctccccctccgcccgcgctgctccaccggtgcttctaacccggtgctcctcctactcctcttccagggaggggaacggcgattctcatggtaaggcccgccgcgagagctccggttccgtccggttggacgtcgaagcagatagcgatcaggtaccaagtttggctgacgagcaacgtgagggtgatattacagagctcttcaacctggctcaacggaatatcctgtacattaacaagcagcggcttattgccatggaggagatgaagaaactgcatgatgaaaataatttgcttctcgaggaaatacaaggactagaaacagaaatgcaaggtattcccctagaagcagcacagtcgtcaagtttcagtgagttactcctgcggatagatacaatggtcatttctggaatgatcagcatgacggaagcatctgatttaagagagaaacttgtcactaatagaagcataatacaaagcaccttttgtgatattcatcataagccaaatactgaattgctgtctgaactgcaactctttttgcgtaaaccaatagagaaacctcttcatattgtgcacatctgtagtgaaatgtacccagtagcatcatgtggaccattatcagcatatgttgccagtttatcttgtgagattcaaaaaaaggctaacttggtggaggtgatactacccaagtacaccagcataaacttggatggaattcatggtctaaggagatctgaggcagaatatgaatcttatttcggtggcctttggcataaaaataaaatatggactggtacgtcaagtggtgttggtcttgtaataatagaaccatctcagctctcctattttagtcgtgatatgttacgtggctaccctgatgactttgagcgattttcctatttttcccgtgcatccctggattatattgttaaatctggaaagcggccagacattatacacatacataactgggaaactgctatagtggcaccgcttttctgggaaatatttgctcaccagggacttgggaacactcggatattactgacatgccaagacttgaattcagaatgcctagaggagccaaataaactggagatgtgtgggcttgatccccgtaagcttcatcgtcctgatcgtctgcaggatacaaacaagacacatcttgttaatattcttaagggaggcattgtttattcaaataaagtcgttttgatgtcctcaacacattcaaaagatgctcttattcagggttcacgacatgagctgcaatcaacattagccgcacatagggagaagatattggttgcatcttatggattggatggtgaactttgggatccattcaaagacatttatcttcctcgaaggtattctgccaatgatattgaggggaagtccatttgcagacaagcacttaggcgtagacttcggttcaatggtaggatgtatctgtgatgataattcagatgtccatagtcttaaagaagcagttcatgttgctctgcacaggaatactcaggtcatcatcatggaaacgttagggtctgttgtgaactcaattttgcaagcattaaagggagagataaagggagacaaaatagcatttgttgaggcatatgatgaagctctggcacatttaatatatgcaggctctgatatcattctttgctcttccttccaagatccatcactgcaaatagcgatgaaggcaatgaagtatggatctgtgccagtacagttaaacttttccagcgatgaatcaagggagtcaaaggggcatgagtgccgcaatacagtaatgtctcagtacatcatctcaacctatggagatttgtctctttctcaagcacttgatgactttaaaaatgacccttcgcattgggatcgacagatcaaggatgggatggctaggggttcttcatgggacgcaaagtgctatagccttcattgggaggcttattcatccataacgaagctgtgaactgggcatctgctagagaagcacatgacctacatgaggcaccatctccccaaattaagggtaccattttttggcatataattagactatcatttaatttcttagatgaacatttaatcaagcaaaaggtcagtgaataaaaaatggtatgtagagctgcactggatttcacaatatttccaatttactattttgagtgtgcgtttttaggaacaagcatgaacagtgtcagtgcacttggcacatacacatcattctggacaaacaaacagtacccctccgttttaggggcctttttaaagcgtttttcaaggaataagaactcggataatagatttgcctcgcaattgtaactcatcagc

SEQ ID NO: 210030 - DNA, 2918 bp, Zea Mays
ggaacgcctcggccgaacatgtgaccgccagcctagtaactaatccttgcccgattccccgataaacacaacacgcaccaccgctcactcgctcgcccacgtgccacgtcccacctccgcgagcacgcacgccgaacggcgcctcctcgcaccgatcagcgcagcggctcagcgcccgccagccgccatcaggcagcagcctcgcctctggccattgaagcacacggaattgtctctttcacctgggcaatccgcggagaggtacggcgcgcatagctaaccaaggaggcgtacgagcagcgtgcgtagcaggcaaccatggagacgccgcgcctcgtggtcggtgcggcgtcgcgggccccgccaccagctcctcgatcacagcgacggcgtatcctgcgtccgtgcggcggggcacattgctccccctccgcccgcgctgctccaccggtgcttctaacccggtgctcctcctactcctcttccagggaggggaacggcgattctcatggtaaggcccgccgcgagagctccggttccgtccggttggacgtcgaagcagatagcgatcaggtaccaagtttggctgacgagcaacgtgagggtgatattacagagctcttcaacctggctcaacggaatatcctgtacattaacaagcagcggcttattgccatggaggagatgaagaaactgcatgatgaaaataatttgcttctcgaggaaatacaaggactagaaacagaaatgcaaggtattcccctagaagcagcacagtcgtcaagtttcagtgagttactcctgcggatagatacaatggtcatttctggaatgatcagcatgacggaagcatctgatttaagagagaaacttgtcactaatagaagcataatacaaagcaccttttgtgatattcatcataagccaaatactgaattgctgtctgaactgcaactctttttgcgtaaaccaatagagtatgctaccacttaccttacttttttttcccagttttaccgccttttactcaaattttctgcagtgttgcgggatacctatgtccattttttattgctgccatgacaacttgacacagcgaattgcccattgacacctgacatggcctggctcatatctgatacattgagaaagaatcttgctgcagagggcaagaggaagctcatgtgtgttatccatgagagggaaaaatggcagaagacaatgataggaaacctcttcatattgtgcacatctgtagtgaaatgtacccagtagcatcatgtggaccattatcagcatatgttgccagtttatcttgtgagattcaaaaaaaggctaacttggtggaggtgatactacccaagtacaccagcataaacttggatggaattcatggtctaaggagatctgaggcagaatatgaatcttatttcggtggcctttggcataaaaataaaatatggactgggtaaagatacactcctagtgtgcaaagagattacgtcaagtggtgttggtcttgtaataatagaaccatctcagctctcctattttagtcgtgatatgttacgtggctaccctgatgactttgagcgattttcctatttttcccgtgcatccctggattatattgttaaatctggaaagcggccagacattatacacatacataactgggaaactgctatagtggcaccgcttttctgggaaatatttgctcaccagggacttgggaacactcggatattactgacatgccaagacttgaattcagaatgcctagaggagccaaataaactggagatgtgtgggcttgatccccgtaagcttcatcgtcctgatcgtctgcaggatacaaacaagacacatcttgttaatattcttaagggaggcattgtttattcaaataaagtcgttttgatgtcctcaacacattcaaaagatgctcttattcagggttcacgacatgagctgcaatcaacattagccgcacatagggagaagatattggttgcatcttatggattggatggtgaactttgggatccattcaaagacatttatcttcctcgaaggtattctgccaatgatattgaggggaagtccatttgcagacaagcacttaggcgtagacttcggttcaatggtgattcatccattatagtaggatgtatctgtgatgataattcagatgtccatagtcttaaagaagcagttcatgttgctctgcacaggaatactcaggtcatcatcatggaaacgttagggtctgttgtgaactcaattttgcaagcattaaagggagagataaagggagacaaaatagcatttgttgaggcatatgatgaagctctggcacatttaatatatgcaggctctgatatcattctttgctcttccttccaagatccatcactgcaaatagcgatgaaggcaatgaagtatggatctgtgccagtacagttaaacttttccagcgatgaatcaagggagtcaaaggggcatgagtgccgcaatacagtaatgtctcagtacatcatctcaacctatggagatttgtctctttctcaagcacttgatgactttaaaaatgacccttcgcattgggatcgacagatcaaggatgggatggctaggggttcttcatgggacgcaaagtgctatagccttcattgggaggcttattcatccataacgaagctgtgaactgggcatctgctagagaagcacatgacctacatgaggcaccatctccccaaattaagggaacaagcatgaacagtgtcagtgcacttggcacatacacatcattctggacaaacaaacagtacccctccgttttaggggcctttttaaagcgtttttcaaggaataagaactcggataatagatttgcctcgcaattgtaactcatcagc

SEQ ID NO: 210031 - DNA, 1310 bp, Zea Mays
cgaaaaaggcctcaaggttttattttccttaagagatggcgagtgaagatcaaccccatttgagtactattgtgctaatcaccgaaatatactggctcctatttgcctaagtgataatacgccgaatggacttaaaaggtgcacactatgaggtcaaagcatttgaggattacaaatttctcaactcctcgtatgttcctgtgctccggcaactggagtcagcaaacctccagaaattctattttgagaacaagcttgagaatgccaccaaagatgccagcaatatgaagtttaggaatcccaaatatctgtctatgcttaatcacttgcgattctatttgccggagatgtacccaaagctacaccgcattcttttcctggatgatgatgttgtggtacagagggatcttacaggactctggaagattgacatggatgggaaggtgaatggggcagtagaaacatgctttggatcttttcaccgatatgcacagtatatgaacttctcacaccctcttatcaaagcaaagtttaatcctaatgcctgtggatgggcatacggaatgaatttcttcgatcttgattcttggaggagggagaaatgtactgagcagtaccattattggcagaatcagaatgagaacaggacattatggaagctaggaacgctgccccctggcttgatcactttctactcgaccacaaaacctctggagaaatcttggcatgttcttggacttggatacaatcctagcatcagcatggaggagattagaaatgctgctgttgtgcatttcaacggcaacatgaagccctggctggacatcggtatgaaccagttcaggcacctttggacaaagtatgtggactatgatgactcatatattcgtcaatgcaattttgcaccgccatagaaggctttaattatcgacaacgaagaagaatcggtaaacgtggcacatacatacgccgcaagcacgttttctgtagagataaggagtttctagagtacaactgaagggaccaccacaatcttttctagctcataatgtttgccattagttatgatcaaagtaatgtttgccacatgactgcatgagcattattgtcgttgtgtgtgttagttatgtcagcaatactctgtatatgccgaagtcagatatatttctgttcacgtggatccaagaagtaaagtgtctgatgtatttacaaaaggcaccaaatactaattgtagattgaaactctacaatgtcactgtatatttctcttgtcacattttctcaccgtgctggtatcaaattgtttgcta

SEQ ID NO: 210032 - DNA, 2464 bp, Zea Mays
gtctgctctgctcagctcaggcgacacggcgcgctccgtgccgcccacgaaacctcatcggcgtcatcctcatcaatccctgcctctgccgtccgagataaccatgctccacggtctctgactcacccctgcatcttgccgtgtagccttcttgtacagcttggactggactagactggaggtggagtggagcttttccttctccaaaatccaaatcaccacatccccccattaatttaaggggtttttatgtccaccgccgccgccagcgccaactaaacccgcgacgacggtcgaccatggcgtcctcgctgctctcctcccccgctaaacccaccatcaccaccaccaccaaaacgaccccggccccaagacccgcccgctccgcccatgtccatgtcctctccgccgcccgctgcctccgcctccgcctccgcgcgtcgtcgcagcatcctccgcctccgcccaccccgcggtcgcggcggccggattacgtcccgaaccgcatcgacgaccccaactacgtgcgcatcttcgacaccacgctgcgcgacggggagcagtcgccgggcgccaccatgacgagcgcccagaagctcgtcgtcgcgcgccagctggcccgcctcggcgtcgacatcatcgaggccgggttcccggcctcctcccccgacgacctcgacgccgtgcgctccatcgccatcgaggtcggcaacccggcgccaggacccgccggggaggaggacgccgtccacgtgccggtcatctgcggcctctcgcggtgcaaccggaaggacatcgacgccgcgtgggaggccgtgcgccacgcgcgccgcccccggatccacaccttcatcgccaccagcgacattcacatgcagcataagctcaggaagacgcccgaccaggtggtcgccattgccagggagatggtggcctacgcccgcagcctcggatgcactgacgtcgagttcagccccgaggacgccggcaggtcaaatagagagttcttgtatcatattctaggggaagtcataaaagctggagctacgactctcaatatcccggacactgtcggatacaatcttccttatgaatttggaaagttgattgctgatataaaggcaaacactcctggaattgaaaaggctatcatttccactcattgtcagaatgaccttggtcttgcgactgccaacacactagcggagcacggcagttagaggttactattaatggtattggtgaaagggctggaaatgcttctttggaggaggttgtcatggcaattaaatgccgcagagaactgttagatggtctctatactggaatcgattcccgacatatcactttgacgagcaaaatggtgcaagagcatagtggacttcacgtgcagccacataaagctattgttggtgccaatgcgttcgctcatgaaagtggaattcatcaggatgggatgcttaaatataaaggaacatacgaaattatatcgcctgatgatattggtctaacacgtgcaaatgaatttggtattgttcttgggaaactcagcggaaggcatgctgtgagatctaagctagtagagcttggatatgaaatcggtgacaaggaatttgaggacttctttaaacgctacaaagaggttgcagagaagaaaaagcgcgtaactgatgaagacttagaagcgttattgtcagatgagatattccagcctaaggttatttggtcccttgctgatgtacaggcaacatgtggtacacttgctttatctacggcaacagtgaaattggtagcaccagatggagaggagaaaatagcatgttcagtcggaacaggtccagtcgatgcagcttacaaggctgttgacaaaataatccagattccaacggttctccgagaatacagtatgacatcagtcacagaaggcattgacgcaatcgcgacaactcgggttgttgtcactggagatgtgagcaacaacgccaaacatgccctgactggccagtccttcaaccgctccttcagcgggagcggggcatccatggacattgtggtgtccagtgtcagagcttacctgagcgccctgaacaagatctgcagtttcgctggcgccgtgaaagccagcagcgatgtagctgagaccgcaagcgtcccgagcacagaatgagcttccgtttagttcacagtgacatgttcaaaatttctggaaggatcttccattgagcttaggacaggcaggaagtcttggggcctatgtagtgtacaatttatgtgtgtcatatcccgtgctcgttgccagtttgtattgtaccatatataaaccatagaatatgttgccatttagaagtctggccaaggtcagctgtaatgattcacatgcttatagcctggaaacattagacattgaaaacccgagcggtgaataaaggatgcccaaggtagaaactgtgatgaatcatccata

SEQ ID NO: 210033 - DNA, 725 bp, Zea Mays
ttccttcctcgacttggcatttttttttgttttcaacattgagcaaggtctccctgttctcccggagtggctaagcttcaaccgactgacagcacgcttgaggcagggctatgaaattggtcctgctaggcttcttctaagtgcctctggaggtcacatggagggaaattttccacctcatgaagcatttgcaattggtgggacaaatagtgtaagaggatatgaagaaggtgctgttggctctgggcgttcttatgctgtaggtagtggtgaagtgtcatgccgcatgtttgggccactggaaggcgtggtctttggagactatggtagtgatcttggttctggtcctaaagttcctggtgacccagccggagctcgtggaaagccagggagtggctttggctatggtgttggcgtccgcgtggactcccctctgggacctctacggcttgagtacgcctttaatgataggcaagcaagcagatttcactttggtgttggctacagaaattaacatgtatattggtcacattctgattcaatcttgttcttctgagcattttgggctggtagaaactagtgccatgccttccattttttggcgatatcaaagcaagttttgtccagatcagatttcattttttttgtaacatatagttcctttacttctgttgagtgttcttcatctagagaaattaaatggacccttactggtaggttttacc

SEQ ID NO: 210034 - DNA, 1786 bp, Zea Mays
ccctccagctcctatccccaaactcgattgcagctcgtgcaccacacacggacacgaatcctcctccgggtcctccctctggaaaaccaggactacctcggatcagatgcagtgcctaccctgcggaccgtccaccaacgcgcccgctgcgcatgccgcggccaggagcgtcagccgtcggagggttgtcgtcgaagggcgtcacctcggcaacccacgacagcgaggaagcgcctccaaggtcaatgagggcaacaggtgaccgtggtgcaatgtcaagcaaaaccttatggctcgtgtcaaagaggaagcttattgctttgtcagccttttgtcttagcttacattcttcaagcatttgctttgggtgatacgtctgtcaaaatcgaggatgtgactcctaagatttttccatctgggccattatttccaactgagaaacggattgcagagctatttgaaataaatacttactcagttgtgaacatttttgatgcaacactacggccgcagcttaatgttactggtgttgtggagttgttggcagtgctctttcaaaaaatccgaagcctggtgatgttgttgcacgcgtcaacattcttgctgctgaaggaaaaattttgaaggcaaattggttggtgcagatcgtgctaaagatcttgctgttcttaaggttgatgctcctactgatcttttgaagccaattaatgtgggacaatcctcggccctaagagttggtcagcaatgcttagcaattggaaatccttttggttttgaccatactctaacagttggtgttatcagtggtttaaatcgagatattttaagtcaggctggggtgacaattggaggcggaattcaaacagatgcagctattaaccctggtaacagtggtggtcctttgcttgactcaaaggggcatatgattggtattaatgcagcaattttcacacagacagggacatccgctggtgttggcttcgctatcccatcatcaaccgtacttaaaatcgctcctcagttaatccagtttggaaaagttcgccgtgctggcttgaacgtggacttcgctccagatccaattgcgtatcagcttaacgttcgcaacggagctcttatactcaaggtaaactgcatgtatcagatgttcgcttgcactagcatctccctttcctaccggacgttggctcctccgtaggtacctgggggcagcgccgcagccaaagcagggcttgctccgaccagcaggggttttgccggtaacatcgttctcggtgacatcgttgtcgctgtggatggcaagcctgttaaaggcaaatctgacctgctgagggttctagatgactacggtgtcggagaccaggtgagcttgacgatccggcgaggctccgagaccctggaggcgacgctgcctttagaagaggcagacatgtgagcagtttgtggaaaatagaacccacgtataccgagctgtccacgactgtcgtcccattggaaacaattccatttcactaggaaatattgaagtgtccttttcgctctggacattcccttccatgcacgtgtatgagcatgatcatgagcttcacttctcgtgcttgtagttgccttaagatcagacagcctgatgttggagaacaagctgacctgttagttggattctgttgtcatctcattcccgtcagttcatctgcggtgttggctcaagttctatttttctcggctgacaaagatcgtgcgattgctgtgcacgcggtaaaagccaattaggtagtgtttggttgag

SEQ ID NO: 210035 - DNA, 1786 bp, Zea Mays
ccctccagctcctatccccaaactcgattgcagctcgtgcaccacacacggacacgaatcctcctccgggtcctccctctggaaaaccaggactacctcggatcagatgcagtgcctaccctgcggaccgtccaccaacgcgcccgctgcgcatgccgcggccaggagcgtcagccgtcggagggttgtcgtcgaagggcgtcacctcggcaacccacgacagcgaggaagcgcctccaaggtcaatgagggcaacaggtgaccgtggtgcaatgtcaagcaaaaccttatggctcgtgtcaaagaggaagcttattgctttgtcagccttttgtcttagcttacattcttcaagcatttgctttgggtgatacgtctgtcaaaatcgaggatgtgactcctaagatttttccatctgggccattatttccaactgagaaacggattgcagagctatttgaaataaatacttactcagttgtgaacatttttgatgcaacactacggccgcagcttaatgttactggtgttgtggagatccctgaaggaaatggttctggtgtagtgtgggacgattttggacatattattacaaattatcatgttgttggcagtgctctttcaaaaaatccgaagcctggtgatgttgttgcacgcgtcaacattcttgctgctgaagggatacagaaaaattttgaaggcaaattggttggtgcagatcgtgctaaagatcttgctgttcttaaggttgatgctcctactgatcttttgaagccaattaatgtgggacaatcctcggccctaagagttggtcagcaatgcttagcaattggaaatccttttggttttgaccatactctaacagttggtgttatcagtggtttaaatcgagatattttaagtcaggctggggtgacaattggaggcggaattcaaacagatgcagctattaaccctggtaacagtggtggtcctttgcttgactcaaaggggcatatgattggtattaatgcagcaattttcacacagacagggacatccgctggtgttggcttcgctatcccatcatcaaccgtacttaaaatcgctcctcagttaatccagtttggaagttcgccgtgctggcttgaacgtggacttcgctccagatccaattgcgtatcagcttaacgttcgcaacggagctcttatactcaaggtacctgggggcagcgccgcagccaaagcagggcttgctccgaccagcaggggttttgccggtaacatcgttctcggtgacatcgttgtcgctgtggatggcaagcctgttaaaggcaaatctgacctgctgagggttctagatgactacggtgtcggagaccaggtgagcttgacgatccggcgaggctccgagaccctggaggcgacgctgcctttagaagaggcagacatgtgagcagtttgtggaaaatagaacccacgtataccgagctgtccacgactgtcgtcccattggaaacaattccatttcactaggaaatattgaagtgtccttttcgctctggacattcccttccatgcacgtgtatgagcatgatcatgagcttcacttctcgtgcttgtagttgccttaagatcagacagcctgatgttggagaacaagctgacctgttagttggattctgttgtcatctcattcccgtcagttcatctgcggtgttggctcaagttctatttttctcggctgacaaagatcgtgcgattgctgtgcacgcggtaaaagccaattaggtagtgtttggttgag

SEQ ID NO: 210036 - DNA, 1732 bp, Zea Mays
ccctccagctcctatccccaaactcgattgcagctcgtgcaccacacacggacacgaatcctcctccgggtcctccctctggaaaaccaggactacctcggatcagatgcagtgcctaccctgcggaccgtccaccaacgcgcccgctgcgcatgccgcggccaggagcgtcagccgtcggagggttgtcgtcgaagggcgtcacctcggcaacccacgacagcgaggaagcgcctccaaggtcaatgagggcaacaggtgaccgtggtgcaatgtcaagcaaaaccttatggctcgtgtcaaagaggaagcttattgctttgtcagccttttgtcttagcttacattcttcaaggtactttccagcatttgctttgggtgatacgtctgtcaaaatcgaggatgtgactcctaagatttttccatctgggccattatttccaactgagaaacggattgcagagctatttgaaataaatacttactcagttgtgaacatttttgatgcaacactacggccgcagcttaatgttactggtgttgtggagttgttggcagtgctctttcaaaaaatccgaagcctggtgatgttgttgcacgcgtcaacattcttgctgctgaagggatacagaaaaattttgaaggcaaattggttggtgcagatcgtgctaaagatcttgctgttcttaaggttgatgctcctactgatcttttgaagccaattaatgtgggacaatcctcggccctaagagttggtcagcaatgcttagcaattggaaatccttttggttttgaccatactctaacagttggtgttatcagtggtttaaatcgagatattttaagtcaggctggggtgacaattggaggcggaattcaaacagatgcagctattaaccctggtaacagtggtggtcctttgcttgactcaaaggggcatatgattggtattaatgcagcaattttcacacagacagggacatccgctggtgttggcttcgctatcccatcatcaaccgtacttaaaatcgctcctcagttaatccagtttggaaaagttcgccgtgctggcttgaacgtggacttcgctccagatccaattgcgtatcagcttaacgttcgcaacggagctcttatactcaaggtacctgggggcagcgccgcagccaaagcagggcttgctccgaccagcaggggttttgccggtaacatcgttctcggtgacatcgttgtcgctgtggatggcaagcctgttaaaggcaaatctgacctgctgagggttctagatgactacggtgtcggagaccaggtgagcttgacgatccggcgaggctccgagaccctggaggcgacgctgcctttagaagaggcagacatgtgagcagtttgtggaaaatagaacccacgtataccgagctgtccacgactgtcgtcccattggaaacaattccatttcactaggaaatattgaagtgtccttttcgctctggacattcccttccatgcacgtgtatgagcatgatcatgagcttcacttctcgtgcttgtagttgccttaagatcagacagcctgatgttggagaacaagctgacctgttagttggattctgttgtcatctcattcccgtcagttcatctgcggtgttggctcaagttctatttttctcggctgacaaagatcgtgcgattgctgtgcacgcggtaaaagccaattaggtagtgtttggttgag

SEQ ID NO: 210037 - DNA, 1781 bp, Zea Mays
ccctccagctcctatccccaaactcgattgcagctcgtgcaccacacacggacacgaatcctcctccgggtcctccctctggaaaaccaggactacctcggatcagatgcagtgcctaccctgcggaccgtccaccaacgcgcccgctgcgcatgccgcggccaggagcgtcagccgtcggagggttgtcgtcgaagggcgtcacctcggcaacccacgacagcgaggaagcgcctccaaggtcaatgagggcaacaggtgaccgtggtgcaatgtcaagcaaaaccttatggctcgtgtcaaagaggaagcttattgctttgtcagccttttgtcttagcttacattcttcaagcatttgctttgggtgatacgtctgtcaaaatcgaggatgtgactcctaagatttttccatctgggccattatttccaactgagaaacggattgcagagctatttgaaataaatacttactcagttgtgaacatttttgatgcaacactacggccgcagcttaatgttactggtgttgtggagatccctgaaggaaatggttctggtgtagtgtgggacgattttggacatattattacaaattatcatgttgttggcagtgctctttcaaaaaatccgaagcctggtgatgttgttgcacgcgtcaacattcttgctgctgaaggaaaaattttgaaggcaaattggttggtgcagatcgtgctaaagatcttgctgttcttaaggttgatgctcctactgatcttttgaagccaattaatgtgggacaatcctcggccctaagagttggtcagcaatgcttagcaattggaaatccttttggttttgaccatactctaacagttggtgttatcagtggtttaaatcgagatattttaagtcaggctggggtgacaattggaggcggaattcaaacagatgcagctattaaccctggtaacagtggtggtcctttgcttgactcaaaggggcatatgattggtattaatgcagcaattttcacacagacagggacatccgctggtgttggcttcgctatcccatcatcaaccgtacttaaaatcgctcctcagttaatccagtttggaaaagttcgccgtgctggcttgaacgtggacttcgctccagatccaattgcgtatcagcttaacgttcgcaacggagctcttatactcaaggtacctgggggcagcgccgcagccaaagcagggcttgctccgaccagcaggggttttgccggtaacatcgttctcggtgacatcgttgtcgctgtggatggcaagcctgttaaaggcaaatctgacctgctgagggttctagatgactacggtgtcggagaccaggtgagcttgacgatccggcgaggctccgagaccctggaggcgacgctgcctttagaagaggcagacatgtgagcagtttgtggaaaatagaacccacgtataccgagctgtccacgactgtcgtcccattggaaacaattccatttcactaggaaatattgaagtgtccttttcgctctggacattcccttccatgcacgtgtatgagcatgatcatgagcttcacttctcgtgcttgtagttgccttaagatcagacagcctgatgttggagaacaagctgacctgttagttggattctgttgtcatctcattcccgtcagttcatctgcggtgttggctcaagttctatttttctcggctgacaaagatcgtgcgattgctgtgcacgcggtaaaagccaattaggtagtgtttggttgag

SEQ ID NO: 210038 - DNA, 1748 bp, Zea Mays
cagagatgtcagatgtcaaacggcaacccctccagctcctatccccaaactcgattgcagctcgtgcaccacacacggacacgaatcctcctccgggtcctccctctggaaaaccaggactacctcggatcagatgcagtgcctaccctgcggaccgtccaccaacgcgcccgctgcgcatgccgcggccaggagcgtcagccgtcggagggttgtcgtcgaagggcgtcacctcggcaacccacgacagcgaggaagcgcctccaaggtcaatgagggcaacaggtgaccgtggtgcaatgtcaagcaaaaccttatggctcgtgtcaaagaggaagcttattgctttgtcagccttttgtcttagcttacattcttcaagcatttgctttgggtgatacgtctgtcaaaatcgaggatgtgactcctaagatttttccatctgggccattatttccaactgagaaacggattgcagagctatttgaaataaatacttactcagttgtgaacatttttgatgcaacactacggccgcagcttaatgttactggtgttgtggagttgttggcagtgctctttcaaaaaatccgaagcctggtgatgttgttgcacgcgtcaacattcttgctgctgaagggatacagaaaaattttgaaggcaaattggttggtgcagatcgtgctaaagatcttgctgttcttaaggttgatgctcctactgatcttttgaagccaattaatgtgggacaatcctcggccctaagagttggtcagcaatgcttagcaattggaaatccttttggttttgaccatactctaacagttggtgttatcagtggtttaaatcgagatattttaagtcaggctggggtgacaattggaggcggaattcaaacagatgcagctattaaccctggtaacagtggtggtcctttgcttgactcaaaggggcatatgattggtattaatgcagcaattttcacacagacagggacatccgctggtgttggcttcgctatcccatcatcaaccgtacttaaaatcgctcctcagttaatccagtttggaaaagttcgccgtgctggcttgaacgtggacttcgctccagatccaattgcgtatcagcttaacgttcgcaacggagctcttatactcaaggtacctgggggcagcgccgcagccaaagcagggcttgctccgaccagcaggggttttgccggtaacatcgttctcggtgacatcgttgtcgctgtggatggcaagcctgttaaaggcaaatctgacctgctgagggttctagatgactacggtgtcggagaccaggtgagcttgacgatccggcgaggctccgagaccctggaggcgacgctgcctttagaagaggcagacatgtgagcagtttgtggaaaatagaacccacgtataccgagctgtccacgactgtcgtcccattggaaacaattccatttcactaggaaatattgaagtgtccttttcgctctggacattcccttccatgcacgtgtatgagcatgatcatgagcttcacttctcgtgcttgtagttgccttaagatcagacagcctgatgttggagaacaagctgacctgttagttggattctgttgtcatctcattcccgtcagttcatctgcggtgttggctcaagttctatttttctcggctgacaaagatcgtgcgattgctgtgcacgcggtaaaagccaattaggtagtgtttggttgag

SEQ ID NO: 210039 - DNA, 851 bp, Zea Mays
atccgatccgttgaaccagttgtttaaagtcgcgctcgcgccttggctcgtcagtcgtcacgaccatgatttggtaactgaagcaacaggaagccggcggtgtaggcgacccatggcgccacagaggaggagagagagggcggtgggggaggcgcggccgagctcgtcggcgccgacaccggcggggccggggtgggtcgaggtgcagcgccggcgggtgggcggcggttggacaagccgccggatctctatctacgcctcccgagtctacttcctcctcctgatgctccagatcccgctcttcagggttccttgtagagcaggcacatgcacaactcctattcaagtcacatcgtctcagttggtgtcaaacgagatattcccaccagctgttgtgaaggccatgctctaccctggagctatcgtgagcagcctaactaaaagcaaggcatttccgagttggagtgacctgtttgacatgtacaacctgacagaagccaaaaatgcttctgctgtagttgatctccagcgtctagagatacttgcgggaagctacttctgtgttgctggagggcttcttggcatcataaatcctgggaggacgactttgtttggtactcttttggttatctggggtctcgtgaaggaagcactatttgggaagccagtgaacagcgatccgactgaatcaacttatgtctacccaaccattttgattgcacttatatgtgctttcatgtcaataacttacaatgtaaagaagacagcagcaagtagtcctgtttctctcgcgaagccactgaaaagttctgccaagtcaaaactgaaattgaaacgagcaaacgaggaca

SEQ ID NO: 210040 - DNA, 1249 bp, Zea Mays
caaaggcgcggtaaaaataaaaaacgtgtgtgccgtgccgggccaaacgcacaaacagcgcgcgggcggcgtacgacgtcgcgcccaccgcgtgccgctcccagactggatttcatcaagataatcctgaaactggagccaacaagcagacagagaaagaagagcaagaagaccggctcccagccgatacacggatcgatatggtgacagtgagagaggagactcgcaaggggccatggacagagcaggaggacctgcaactgggctcaaccggacaggcaagagctgccggctgcgctgggtcaactacctccaccctggcctcaagcgtgggcgcatgtctccccatgaagagcgactcatcctagagctgcacgctcggtggggaaacaggtggtccaggatagcacgccgcttgccagggcgcactgacaatgagatcaagaactactggaggacacacatgagaaagaaggcacaggagaggaagaggaacatgtctccatcgtcgtcctcgtcttcgctgacttaccagtcaggctacccagatactccatcaaccattggagttgagggacaggagcttcatggtggcagtggctgcatcacaagcatcctgaagggcacccctccggacatggatggctatcccatggaccagatatggatggaaattgaggcgccacagatgccctcggaggagagctttgttggggggaaccataatgtgtgcagcagccttgccaccccgctgccaccaccaactgtctgggaatactacccagatgcctgctggaaggttgacgatgagatcaagatggcaacacaatttcaatttggttatagtgaaggagttgggccctgcttctgatgccataaatattgggtcagattactaagttatacacctacctagcagaagtgaagtgcttttgtagaaacaagctttagcatggatctgaatatttatctccgcgcttagaattgcaggtctatggatctatgcatggttgctatgtatctatctagtgtgcaagacaagattatcttaatttgtccttgatgctatggaatacaagggcaaaggtactatatctgtttactcacagtataattagctaccctttgagacttttctgttggacatgatgccaacaatacatgttatattgatatagatggtcttaacttggaagggtttaaagtttcagtccacagaaaccattgttaaggtgaacattaagccgac

SEQ ID NO: 210041 - DNA, 2453 bp, Zea Mays
gtcaaaaccaggtgaggacccgtttctccttgtgttcattcctcgccagtattaatacccaaaatcaagttattagatgctaatgttatctatatatgtgtgtgtaatgtgcgagatgtgaggaattccatatttgtgtggcgaggcaagccgtgcgacaagtgccagatgtacgatgaaatgattgaatcggagagcgtcaccgtttgtgtggattatcaagtcaggcaaataacggtcacttggtcgtggaagggcttcttattgcagtcatagtgttccagctctccaggaagagttacaaaccaccaaagaagccactcactgaaaaggagattgatgagctatgtgatgagtgggagccattgtggttgttgttgcatgagtaatcctacatatcatttcatatatggattaaccggatggtctcactcttgaaactgtgggagtgttggtgcaattcttatactagtttcacttaacttaatagtgccatgtgtggggacctattaatcttgaacatttactcgctagattatatgacatttaaaccatgtactcgtgaataagcagcaagggacaccttgaaccacatagaatatcatttacccttgctacccaaatgcttacatggctacatgcttcttggattgtattctctcttctctgatatcagtatgatcatcaaagcacctaaaatgtgctgctgtatgtatatagctagtgtaatgttgtttcttaggatgcattgcactaacaaaacaacaatttcatcaatggtatgctctcctagtctgtagttataggaatagctcttgaacttcccttgtgatagcagtgctctatttgaagacactactatatatgtaatattctttttgttgaatatcccctgaaatctgcttcagttatatgtgtatattatttaattcaccagaatttttcttcacgcatttctggttgtgttacaaatattcatgcagtatggattacaattgtttaccatgttaagtagttatgattgcatcatatatgatcttctgaggatcagaattaacccttctatttttcttttatacagtgccgctggaccacatacgattgttgatggtaaagaagttgtgaactttgcatcagcaaactacctcagtttaattggcaacgaaaagattattgattcttgcatcagttcattggagaaatatggtgttggttcttgtggtccatgtggcttttatggaacaactgatgtccatcttgactgtgagtcaaagatagctaaatttttggggactccagactccattctttattcatatgggatttctacaatattcaatgtgatacctgccttctgtaagaaaggagatatcatagtcgctgatgagggtgttcactgggcagtgaaaatggtctccatctatcaagaagcactgtggtgtacttcaagcacaatgatatggcttcacttgcaagcactttggaaaaacttactcgtggaaataaacgtgctgaaaagattagacgctacattgttgtagaatccatttaccagaattctggccaaattgcccccttggatgagattgtcaggttgaaggagaaatatcgattccgtgttattctggaggagagtcattcttttggggtgcttggcaagtctgggcgtggccttgctgaacattatggagttcctgtgagtgtttggcctcagcttttcttaatgtttcaccataatgccccacctgtggtgtctgaccggggtgcgttgttacctagctcccaaacgaggcctaactgtttggtgaaatgcttgggacaaagtggccatcaagaatggagtcatggaacatcagcaggacactacaagaaactgataaatgttcgtgggttttgttaagaacgtgggtaccgacgttcttatggtagttaagttcgtgggtttttttaagaatgtgggtacccacgttcttaaattaagttcgtgggccctggccaaaaccgtcgaatttaacgtattaggaacatgggtacccacgttcttatattaggttcgtcggccaactcgacaccgtcgaacttaaccagaaagacctaattccctatcccgcggcgccgcgagtctccctctcagctcactcgtgcatctaatcgaatctgccacaggagcctttcctagcgggcgatatctccccctctcgtctcagcacctcacgccgccggtgatcgccggtgaccacgggagcattacagcatcgccgagctcctccccggcgccacgttcagacgtccgtcgagcggtcggtgccgccgcgccgaggccgagtgttggatcctgggcggcgagcttctgggcgcggtcaccatggtggagcgagcgccgccagagaaaaaccccaggtacgagaaggtcaaatccatttcaattcctgaactttctgaactagatggct

SEQ ID NO: 210042 - DNA, 1503 bp, Zea Mays
gcggactacacccgatctgtgtagccctgtcgtgacctcgtcaaaaccaggtgaggacccgtttctccttgtgttcattcctcgccagtattaatacccaaaatcaagttattagatgctaatgttatctatatatgtgtgtgtaatgtgcgagatgtgaggaattccatatttgtgtggcgaggcaagccgtgcgacaagtgccagatgtacgatgaaatgattgaatcggagagcgtcaccgtttgtgtggattatcaagtcaggcaaataacggagtactatgtctgatcgctaaatcggctgtggtgcatatgtgttgctctatagcgacgttagggaagggttcctctctttttcctttgtcacttggtcgtggaagggcttcttattgcagtcatagtgttccagctctccaggaagagttacaaaccaccaaagaagccactcactgaaaagtgccgctggaccacatacgattgttgatggtaaagaagttgtgaactttgcatcagcaaactacctcagtttaattggcaacgaaaagattattgattcttgcatcagttcattggagaaatatggtgttggttcttgtggtccatgtggcttttatggaacaactgatgtccatcttgactgtgagtcaaagatagctaaatttttggggactccagactccattctttattcatatgggatttctacaatattcaatgtgatacctgccttctgtaagaaaggagatatcatagtcgctgatgagggtgttcactgggcagtgaaaatggtctccatctatcaagaagcactgtggtgtacttcaagcacaatgatatggcttcacttgcaagcactttggaaaaacttactcgtggaaataaacgtgctgaaaagattagacgctacattgttgtagaatccatttaccaggtgcagtgcttttgattgttttgtgttgatttgtgctgtctttttttatatgtccttatgaaagtttggaaaataaaatgtccatttaacctgagcaatctaggcaattcatgaaacctctcttacagtcgtcatggtttgtgaacacagaattctggccaaattgcccccttggatgagattgtcaggttgaaggagaaatatcgattccgtgttattctggaggagagtcattcttttggggtgcttggcaagtctgggcgtggccttgctgaacattatggagttcctctcccaaacgaggcctaactgtttggtgaaatgcttgggacaaagtggccatcaagaatggagtcatggaacatcagcaggacactacaagaaactgataaatgttcgtgggttttgttaagaacgtgggtaccgacgttcttatggtagttaagttcgtgggtttttttaagaatgtgggtacccacgttcttaaattaagttcgtgggccctggccaaaaccgtcgaatttaacgtattaggaacatgggtacccacgttcttatattaggttcgtc

SEQ ID NO: 210043 - DNA, 3077 bp, Zea Mays
gcggactacacccgatctgtgtagccctgtcgtgacctcgtcaaaaccaggtgaggacccgtttctccttgtgttcattcctcgccagtattaatacccaaaatcaagttattagatgctaatgttatctatatatgtgtgtgtaatgtgcgagatgtgaggaattccatatttgtgtggcgaggcaagccgtgcgacaagtgccagatgtacgatgaaatgattgaatcggagagcgtcaccgtttgtgtggattatcaagtcaggcaaataacggagtactatgtctgatcgctaaatcggctgtggtgcatatgtgttgctctatagcgacgttagggaagggttcctctctttttcctttgtatgatagtatgttgctcatgatgtagtgtgaaaagatatatcctatttgtgtggtggaacaaataatgcgtagaatactgattggaatgccttgctataaggtgctttatttgtcagaatcccaatttaattatgatggtatagttatgctagagagtataaattaggtacattctagttgtattgacatgataaagcttagattgaagtgtagtgtatgtatcaggtgttctagtggatgtataagtctagcgttagtaaattggtttgtgttatgtgaatgaaactattttcatgagtgtcttagaatctacatatgttggggttagttctacgctttagtggtcatagtacttatatatgcgtagtgtcattagagtagttcttcatttgcaatatgaaccttaggacgaagatgcaactcatacgaagtaattgtgtgcatggttatgaagtatactaatctatctatgtgattaactaggtggttttagctctaatttaggatgatgtgtcagaatagttgaagtaccaagcacatggtgattgtagaagccaaataggagctaaattgaatatattgctgtttagagctgtaggtacagttttaattgtgcagctaatttaacaaagtaaaccatgttttctgtggacatgttatatatgaaagttgtagctcacttctttatcttgcttgtgtaaaaatttcatgaccataggcttagcagtttagaagttatgattttcccaagtccagtttcagaatctgtccagattctgttctgatttcgaaaattgttttgtttgactaaattaaacttataataagcccttagtaattatagaagaattgtagtacttttcttaaggtttccaacaaattttggatcaccctttttggtgatctataagttaagttacagctgtttgaagtgcgatatctgaatctgtccaaatttggacagcagagcctttctcatattttctgaccttgatatatattgaattaacctgggatgtttataaattaattgtagacaattttattagctttctaaagagtctaggatcacctgatttggatgcctgaaactctaattatggatttttgaagtaagtagtcgaattctgtccaaatctgggcagaatttatgtttagttctgtttgacctttctaaaggtcgaatcatgttgtggtgataatataaaagttatagaggactttataagctttccaaaaagtcttggtttactatttttggatgaatatcatgtgagttatgaataaaacaactgattgctgtactgctgtccaaaatcggcaaggattaagatgattgcttggagtttcttttctgtgagtatggtgaccttagtaatacaaaggagttttagtagacatgtttacctagcattaaaaagttgattcagtaatattatgtttataaaggtaatgtaaatgtcttatgattaagaacagtgtgatgttccatttgatggcatgctatgcataataacctggcatgcaaatgttgaagcatgttgaaatgcttctattcattgttctaagttggggtccatattgatggtagtccctctttcttcgtatgttcataagatgggtcggcatctttagtgtctcacacgcagtggccacgggatttttcaggtcacttggtcgtggaagggcttcttattgcagtcatagtgttccagctctccaggaagagttacaaaccaccaaagaagccactcactgaaaaggagattgatgagctatgtgatgagtgggagccattgtggttgttgttgcatgatgccgctggaccacatacgattgttgatggtaaagaagttgtgaactttgcatcagcaaactacctcagtttaattggcaacgaaaagattattgattcttgcatcagttcattggagaaatatggtgttggttcttgtggtccatgtggcttttatggaacaactgatgtccatcttgactgtgagtcaaagatagctaaatttttggggactccagactccattctttattcatatgggatttctacaatattcaatgtgatacctgccttctgtaagaaaggagatatcatagtcgctgatgagggtgttcactgggcagtgaaaatggtctccatctatcaagaagcactgtggtgtacttcaagcacaatgatatggcttcacttgcaagcactttggaaaaacttactcgtggaaataaacgtgctgaaaagattagacgctacattgttgtagaatccatttaccagaattctggccaaattgcccccttggatgagattgtcaggttgaaggagaaatatcgattccgtgttattctggaggagagtcattcttttggggtgcttggcaagtctgggcgtggccttgctgaacattatggagttcctctcccaaacgaggcctaactgtttggtgaaatgcttgggacaaagtggccatcaagaatggagtcatggaacatcagcaggacactacaagaaactgataaatgttcgtgggttttgttaagaacgtgggtaccgacgttcttatggtagttaagttcgtgggtttttttaagaatgtgggtacccacgttcttaaattaagttcgtgggccctggccaaaaccgtcgaatttaacgtattaggaacatgggtacccacgttcttatattaggttcgtc

SEQ ID NO: 210044 - DNA, 1320 bp, Zea Mays
cagcggactacacccgatctgtgtagccctgtcgtgacctcgtcaaaaccaggtgaggacccgtttctccttgtgttcattcctcgccagtattaatacccaaaatcaagttattagatgctaatgttatctatatatgtgtgtgtaatgtgcgagatgtgaggaattccatatttgtgtggcgaggcaagccgtgcgacaagtgccagatgtacgatgaaatgattgaatcggagagcgtcaccgtttgtgtggattatcaagtcaggcaaataacggtcacttggtcgtggaagggcttcttattgcagtcatagtgttccagctctccaggaagagttacaaaccaccaaagaagccactcactgaaaaggagattgatgagctatgtgatgagtgggagccattgtggttgttgttgcatgatgccgctggaccacatacgattgttgatggtaaagaagttgtgaactttgcatcagcaaactacctcagtttaattggcaacgaaaagattattgattcttgcatcagttcattggagaaatatggtgttggttcttgtggtccatgtggcttttatggaacaactgatgtccatcttgactgtgagtcaaagatagctaaatttttggggactccagactccattctttattcatatgggatttctacaatattcaatgtgatacctgccttctgtaagaaaggagatatcatagtcgctgatgagggtgttcactgggcagtgaaaatggtctccatctatcaagaagcactgtggtgtacttcaagcacaatgatatggcttcacttgcaagcactttggaaaaacttactcgtggaaataaacgtgctgaaaagattagacgctacattgttgtagaatccatttaccagaattctggccaaattgcccccttggatgagattgtcaggttgaaggagaaatatcgattccgtgttattctggaggagagtcattcttttggggtgcttggcaagtctgggcgtggccttgctgaacattatggagttcctctcccaaacgaggcctaactgtttggtgaaatgcttgggacaaagtggccatcaagaatggagtcatggaacatcagcaggacactacaagaaactgataaatgttcgtgggttttgttaagaacgtgggtaccgacgttcttatggtagttaagttcgtgggtttttttaagaatgtgggtacccacgttcttaaattaagttcgtgggccctggccaaaaccgtcgaatttaacgtattaggaacatgggtacccacgttcttatattaggttcgtc

SEQ ID NO: 210045 - DNA, 1867 bp, Zea Mays
tatcctccaaacctaaccctagcaacacatttcgctccccacagcggcggcggccacagccacacgttctcgcgcgggatctaattccaaacagcactgcccttgcttctaccgttccccaagtgcgctccctctctcgccatccatctcgtgcacgactgggcaaccgttgccgctgtcgaggtgcccaggtcttcatcggtccctcgtcagttcttctccggcccttcgccgccgacaagctcccccaggtacgcccaccattctcttccgtccatgctttgcgatggtgagcacccactacccaaaccctaactggatctgtcaagtgtttacatgtattttgcctactaacttcgttttttttaattatcggtgtacgtctatgccgtttactgcattcaactctgctcgtttgtttgattcagttgagcagtgacatcgtgagcttatatgctagtgtagcttattggtgtttcaagcaatgtatgtcaaatatctagattagcaatttataaaccacgtaaaaccgtgacagtatcataatggcataagaggttcttttattttgtttgaacattctagtcagagtaagttatgtatctgttttctacatgctgaaggttatactcaaaccacttgtgaaatggctctcaccctatatctttctttagtgaatcaatgttggtattttagtagtagacttcagtcgtcagccatacttagcttttttctgctagtactgtactaatgttttgttcctccaagagaccgggaagtaaaatttaattggttcatatctttggtttatcattgtgtttttttggctattgcagtacttatgttaccaaagcaaggctagtaaatcataccggaaagaatggtgatggcgtcttggtcttgggtctgctagatgcatgcctactgccttatcgcaaagctagcttacctggtcatacgaatttgtagtcggttctgatctaattgcaagtgcatctagtaacttggattttttcgcaaaaaaatatcgggtgttcacgcctggcccctgcgcttgcagctactaaagagacaggagcaaagagttaacaggagatgaatgcccctgaccgttatgagcgtttcgtcgtgccagagggcaccaagaaagtgtcctatgagagggatacaaagattgtgaatgctgcatcattcactgtcgaacgcgaggatcacactgtaggcagttgcacagagacccaaatgttctctttgccgggtataagctccctcacccactccagtacaagatcattgttaggatccacacaacgagccagtcctccccgacgcaggcctacacccaggctatcaatgatctagacaaagagcttgagtaccttaagcaagcttttgagacaccaacagaccatcattgaaccttttctactttatgatacaaagatgtgaactatggactacttgatgaactactagatgttcaacacaggaatgcctttggcaaaatttgcatattcactctcccgtcaaactgatacccttaagttcatttgaatctctttttatttcctagaagtatctcgctactttagtcctactaggaaaagttctttgggatctctctttgtaaatgttagtttcgactcttgtttttttccaggttgcatggcatttctttgtgcaattttgtatcgctaaacaacgaaaagttttagttagcattaaccagtggtacatagcaaggcagactgtgtggttctatgggtgtaatgtatttaagaatgttttgtataaagtattgtttctgtaggaaaaagtgcttgatttgacatgaatgtggcagtaattttgatagatttgttgggag

SEQ ID NO: 210046 - DNA, 474 bp, Zea Mays
tatcctccaaacctaaccctagcaacacatttcgctccccacagcggcggcggccacagccacacgttctcgcgcgggatctaattccaaacagcactgcccttgcttctaccgttccccaagtgcgctccctctctcgccatccatctcgtgcacgactgggcaaccgttgccgctgtcgaggtgcccaggtcttcatcggtccctcgtcagttcttctccggcccttcgccgccgacaagctcccccagagtgtcctatgagagggatacaaagattgtgaatgctgcatcattcactgtcgaacgcgaggatcacactgtaggcaatatcctccgcatgaggaaggacgcacatgcccttgcatggcgaatacaaagactacgaagcaatggtttccagcagcatgcacattcagatgtgcatcctctcgcagaggagatgtgcatccgcatggtcgaccgcacattttga

SEQ ID NO: 210047 - DNA, 1458 bp, Zea Mays
ggacgcaaacactgggccgcgttgcttctccgtcccactgaaccatcgccgccggctagccgcaggagaagttcccgccgcgccgacgccgaaaccgccgtcgcgtgttttgaagctctcgaaaaaagggcgcgcagcatgagagcggccgtgaactcgccacctccgcactgctactcgcgccgccgcgccagcgccacgctgctggatgcgcgccatgtgttcgaccacgtgccgcagcagcgcctaccgaacctggccgcgggactccgcgcgcggcctgtcgccgcggccgcctggaggcccgcgcggcgctcggccgcatctgcggctgcccgcacctgtggcaccgtttcaggacattcctgcaaatcccaacatcctcttcttcagcttatcgcgcactagtagcttcgtctgcattcttgccatcaagacggagctttgaaggctacattcctcgtagctgctccagctcatcgctccagatctacagccggtcaccgctgttaaatctatcgccgtcttcagctctcatggtatcctcccagctcacgggctcctccgacgtagcccaacgttcagaggaatggtttgctcttcgcaaggacaagctcaccacaagcaccttcagtactgctttgggtttctgggctggcaacagaagaccagagctgtggaacgagaaagtcttcggagcgacagagatcaagctagcagatgccgctagatctgccatggactgggggacgcatcacgaaagcgtagccatagagcagtacacgagcatcacaggaagaccggtgggcaccctcggcttcgcggtgcacaccgaggccagcttcggatggctcggagcctcgcctgatggggtcctcgggtgcgagccacacgacgggatcctggaagtgaagtgcccgttcaacaagggcaagcctgagctcgctctgccctggcgcgccatgccgtactactacatgccgcaggtgcaggggctgatggaaatcctgggcagggactgggtggacctctactgctggacacccaacgggagcagcctgttccgggtgccgcgggactgcgcgtactgggagctcatccacgaggcgctgcgcgacttctggtggggcaacgtggtgcccgcgcgggagctggcgctcctggggaaggacgacgaggcgaggtccttcgagcctcagcccaagcaccggctcacgaacctcgtgctgtataggagccggaagctggcctccgaagcgaagctactttgtatggatgttggcggccatgtagaattcttccaatgaggagtcctgccgccgtttattgtacactgtattatgactattctttaattaacttatgaattcgttaccttcccagcgccatgttcttttttgttctgttctgttctgtttaacaaagagtgtaagtataatcttccagtttgcgtgttca

SEQ ID NO: 210048 - DNA, 4678 bp, Zea Mays
tggagggcagccgacggcgtctggcgcgatggcggctgtctaggcgcgatagctggagcgcgcgatggttggcgcctggcggctgggtaaaggcccattaaggcccactagtggatatgcgcgcagaacgtccaaataacagcgaaaacgtccagaacggacgttcccgacgtgtaaacggcgtttaaacgtctaggacggacgttctacgcgttttttgtaaaacgtgcggacgttttagccgctaatcacgttttagcgtttaaacgacgcttaatcgtcgtttaaacgacgttttaataaccatggcgagtttcttaaccaagcacaagggttgccgctgagtcgcctctttgggcagcagcatcatcgttcgtcgttgacccccactgttgcatctacatcgtcgtcgactccgtcggtgcgcgtctcctgcgcacggtttgcgagctgttcgacacctgtgagctgcgtcggcacacccgtcgatttgcgctgcacctgcatgctgcgtcgacaccatctgtcgctggtctgcaccacattcgtcatcgagttcttcgccgataagtaccgccatcgcgctccactagcgtcgtcgagtctcttcttcctgtgtgtgtcgtggctctcgccgtcgcgactccaggatcctcgatgcgtaacgcctacctcttcgccttcttctagcacaatcttgttgccattgtcgtcgtctcatcctcgactacgttactccgctctgacaaccgtgagctgcgacgacactcctgccataccgcaccacaaccgtcgttgaggtcttctctactggtcccttcagacgctgacacatggttggggccttctacctagtacgtgcggtaccgacaacaccgacacgtgcattcgtatacgacgcgtttccaggagtggcaaacctggagcacgcctcgtccacgacggtttgacaacatcgtcctcgacatcggctacttcctctacgactgtctcaactgtgttgccgtcttcgtctatggcacccttcttctgcgccaccgtcaccctggcgcctactggcgcgccgcgggccttcccgcgtgttgcgcctgcgcccgcgacttgtgcgccttgtcttcttcggtgtcctcgacagctacatcgaccacaactactcgatgcacgacacctcgacaacggctcggtgcccttgcactcggctatctcgacataatcggcacaaaggtcatctgcatgggctactccagtcgcagcattcgcaccgacgttctaactgtgtgggggggggatatatccattgttctccagcctgtccgtttgtgttgctaacgctatgaccgcggggggatgttagagtatattagacaacttctgatatggttggtttaggattgattgtaatccagggataaccttccttgtatctaggataaccttccttatctctaggatatccttcttgccctccaagtcatgtactcctatatattctccttagaggctcaatgcaatacatccaacacattatacataatccttccttcttacagtttcttcttgtggatggttgctcataacaagtgctggactgctgatcacctagcccgacgtggtttggatcaccttgagagatgtcccttatgtgatcaggagatggaaacagtcaatcacttgctggttagatgtgttttctctaggcaattctggttctgctggttacagcaagctggtctccatgcatttgtgccacagccgcatgagagaagctttgtagcttggtggagacatgccattgaagctacaaccgaacaatctaggaaggggttaaactctctagttattcttggcgcctggattatttggaaacattgcgacttgtgtcactttgatggtcatacccccaacctcaatctggccttagctcaagctgcggagaagaggtggtgttgggagctagctggagccaaaggtaccactcacttaatggctccccaaatgggaaatgaagcggtcgtgtcttaggttgtagcctaagattagtattaatggatgatttcttgtattttcggtattggccgccgtaaagggccttgtattttggtactcatggaccttaaactcccttttcttcttaatatatgagatgcgcagttctcctgcgcgttcgagaaaaaatgaactgcagacgcccacatcatgtaaccgtttcctgtgcatgcgtgtagctcgttacatttattttaagagtcattagtaggttcattcaatagttgcttgcttaatgttgctttagttgcttcagactttgcatattggagatatattttttaggagcgcaaattttttgcctatctgagcgcataaaagacaaatagttgcaaagatatatcttatcgtactttccacctagaaggacttgcacctgaaagttctatatatttagtgtctaatctaaattttggataacatgcagcactacacagccatgcagaaaggtgtgagatagagtcaaaagtgtgtgtcattgatccttctctgcttccagctctagatgatttattgcaggacatctatgaatcattgcaaccacagccagtggactatgaacaccgaaaccttatggttaatgttttcaacaaaattgttggagaaatttttggtaaaaataatgagcttccaattgtggaaccatttggatctttcacaatggatctatttactcctcaaagtgacctggacctctctgtgaacttcaatactgatgcaaatgatcagtatcctcgcaagaacaagatttctgctattaggaagcttgcacatgttctattttctcatcagcatgaagttctgggctaaggtacatgatgtgaactgccccaaagatcgaacaatgagctctatggcaattatttctttagtttcttttcatttacagactcggtgtcctccaatattacctgcattttctgccgtattgaaagatggtacagattttgcaagtattgagaagaatgtatcactattccagggttttgggcacagcaataaagagtctattgctgaactttttgtatcactaatgagtaaactagtgtcagtggagggtttatgggagcaagggctctgtgctagcaattttgaagggacatggatatcgaagacctgggcgaagggtgttggcaacttgaatgttgaggacttcttggaccgatctcagaattttgccagatcggtaggggtgaaggagatgcagaaaatatgtgaatgcctaagggctagcgtttctgatttgagcaagttttctaagggtgaaattgctgcgcccaagctaaaggccctgttgtttaagcctttgaaccaggttaacccagtcattaaaccccatcagaaaactattaagaggaagcgtactaatccaaataagaccagaactaaccctattcagaaaaatgctaagaaaaagaaggcccttgagcaggataaattagccatttctcctggtcagaaagatggtaagaagacccttgatcaagagaagtcagttagttctcccattcagaaaggtgctaagaagaccaaaccccttaaccaggataagttagtcatttctcccggccaggaagatgacaagaagccccttgtgcaggatgagccaatagtagtgtctcccatccagaagaataacaataagtatgttgatcaggagaagtcccttcagcaggagaagcaaatcatctctcccggacagaaagatgataagaagagcagcaaggtgggacctgactcagcatgtaatcatgtgcaacagaagaaagtgaaggctactgtatctaccggccgtgctgctaatactcatgtttctagttccaggcctcgctctgtttttatcccccaagcacattggcccagccagccaattgttgatcggtttgcgcatatacctgagcacctgatcagcccttctgcttttagttatgggttgccacaaccacttatgcatccagcctatcctcatcctcattctcatcagggattggtaggtcaaggacagggtaatttccttcatttcaatcctggtattgagctgcagcatcaaggccaggctttcttcggtcctccagctgtctaccaccccatggtgaatgggtttcacccattcggtatcaatggtgctcagcaagtgcagtacatcgacaataggatggtgcagaggccaccatatggttttggcccaggtttctggggatgatggttgcagcctgaggaaaggttggttgctaactagtgggggtttgaggtgaaagttgtcagttcaaagaaaaaaaagctgttgtgtctaatatactcaaagatttagctttaaataggggccagtggaaaatagctaaccatgtgtctgaaccttgatttgtggtttttgttcggtttcagctctagcttaccttagaagtaaaatgttctgttgatgttggattttaactctagcctatcctgggattaaaaggttttgttgttgttgttgtaagttgtaattgtaactgttaggtttgtactctagtctgatttaaaagtaaaaaggctatattgttgttgttgtatctagacctgtacaaggagaaataatcaaataaggaaaaaaacacaatgtgggaaagaaagctgtaatgtcgtttgatct

SEQ ID NO: 210049 - DNA, 1169 bp, Zea Mays
atgaacaactagctgtctattgactaatttactaactactagctgtcaaaatgtgttgcagccttgcaggagctaggaacatgcaagagtaagctcagctaggaatcagatatgtctactggccttctttttatacttactatgactcatatcgtcatatatagtagttaattagttatatacataatatatatatatatatatatataatttatggctatattgccaaaacgcctagaaaagcgcctagaagcgcctaagaccgagtactcccgactaggcgctaggcaatgggtcaccgcctagattccgcctagcgcctagctgaaccttgctcgctgacacaagagacttctagaggcaacagagacttctagaggcatcacagacagatagggtgagaatgtgaaatacgaagggacccttctgccttctccgtcaacgacggcgaccatggtagcagtctgtgccccatgcccttctcacatactccgctcctccgcaggatctcctcctccccacgccatgcgcttcttctagtgagccctcacgccatggatagggagcaacatgagaagtttggaggtccacgttgacgagagcaacagtggtgagcctcgtcgtgttgtgtcccgtcttcaatccgtgggcttgaagatttcctgttcgactgctgttctcgacagcacagtcattcctcaacgtgcctctaattgatgcaggattatcaacaactagtttggaagtcttgcaagttgtatttaccacaggcttttcaacatcatcaacagctggtttggaaaccttgcaagttcaatctgcgacagttctatctaccaccaactttatcaacatcatcaacaactgctttgaaaaccttgcaagttctatctacgacagcaggttcgttactttccaagaaagggacaaaaagaagactgcaaccaacattttccatcccctttcccctcttcttcttcgctcatttttgttgcatttcctttgggaaacaacctccagatatctgatctgctgggtttgtgttctattcttttcttttcttttcccccttcttttatagtttcctcatattaggttgtgcagacaaagcattagaaaagaatcaatttgtacacttcgtcaggctttggctccaacatgtcttgtga

SEQ ID NO: 210050 - DNA, 1085 bp, Zea Mays
atgaacaactagctgtctattgactaatttactaactactagctgtcaaaatgtgttgcagccttgcaggagctaggaacatgcaagagtaagctcagctaggaatcagatatgtctactggccttctttttatacttactatgactcatatcgtcatatatagtagttaattagttatatacataatatatatatatatatatatataatttatggctatattgccaaaacgcctagaaaagcgcctagaagcgcctaagaccgagtactcccgactaggcgctaggcaatgggtcaccgcctagattccgcctagcgcctagctgaaccttgctcgctgacacaagagacttctagaggcaacagagacttctagaggcatcacagacagatagggatctcctcctccccacgccatgcgcttcttctagtgagccctcacgccatggatagggagcaacatgagaagtttggaggtccacgttgacgagagcaacagtggtgagcctcgtcgtgttgtgtcccgtcttcaatccgtgggcttgaagatttcctgttcgactgctgttctcgacagcacagtcattcctcaacgtgcctctaattgatgcaggattatcaacaactagtttggaagtcttgcaagttgtatttaccacaggcttttcaacatcatcaacagctggtttggaaaccttgcaagttcaatctgcgacagcaattggtttggaaatcttgcaagttctatctaccaccaactttatcaacatcatcaacaactgctttgaaaaccttgcaagttctatctacgacagcaggttcgttactttccaagaaagggacaaaaagaagactgcaaccaacattttccatcccctttcccctcttcttcttcgctcatttttgttgcatttcctttgggaaacaacctccagatatctgatctgctgggtttgtgttctattcttttcttttcttttcccccttcttttatagtttcctcatattaggttgtgcagacaaagcattagaaaagaatcaatttgtacacttcgtcaggctttggctccaacatgtcttgtga

SEQ ID NO: 210051 - DNA, 3398 bp, Zea Mays
ccccacgccatcacgctctctcatacatacccctccagtcctagatcttcgcggccctttcttgtggacacacattttttttgttcaagaaaagcgatgggcttggtggttaatcagcacttgcttctccaatcccaaaggccaaatatagagcaagaagatctcatgcgatcgcgaagcaccataaagaagagagtgatactgatacctccctcagtgtcatcttgtgccctcagtgacagtgagtggcgcttcactaccggagtccgtccttccggtgggcggtggcagtggcacctgcttccactggagtggagggaaagcaccgaaaggcgcggctttttttacctctctctcgctttgcttgccccttcttttcacttccctccctccctccctttcctctcctccccgctccatggcccccgcggcgccagcgggcctggcctccgtcgcggtcgcggtcgcggttgccgtgctcgccgccgcggcgtcggcggccgtcacctacgaccgcaaggccgtcgtggtgaacggccagcgccggatcctgatgtccggctccatccactacccaaggagcgtccccgagatgtggccggatctgatacagaaggccaaggacggcggcctcgacgtcgtgcagacgtacgtcttctggaacggccatgagccctcccgtcgacagtactacttcgagggtcggtatgatctggtgcacttcatcaagctggtgaagcaggccggactctacgtgcacctccgcattggcccctacgtctgcgccgagtggaatttcggtggtttccctgtttggctcaagtatgtcccgggcattagctttaggactgataatgaaccgttcaagaatttcaccacaaagatcgttgacatgatgaagtccgaagggctctttgaatggcagggagggccaataattctttcccagattgagaatgaatttgggcccttggagtgggatcagggagagcccgccaaggcctatgcgtcatgggcagctaacatggcggttgcgctcaacacaagtgttccatgggtcatgtgcaaagaagatgatgccccggatccaattattaatacttgcaatggattttattgtgactggttctccccaaacaaacctcacaagcctacaatgtggactgaggcttggacatcttggtatacaggatttggtattccagttccacatagaccagtagaggatctagcatatggtgtggccaagtttattcagaagggtggctcttttgttaattattacatgtatcatggtggaacaaattttgggcgcacagctggtggtccattcattgcaactagctacgactatgatgctcctattgatgaatatggtttgctgagagaaccgaaatggggtcacttgaaggagttgcataaagctatcaagctttgtgaaccagcattggttgcaggagacccaattgtaacttcacttggcaatgctcagcaggcatctgtttttagatcaagcaccgatgcctgtgtggccttccttgagaacaaggataaagtatcttatgctagggtatcattcaatggaatgcattatgatctacctccctggtccataagtattctcccagactgcaaaacaacagtctacaacaccgccagcgttggaagtcagatttcacaaatgaaaatggaatgggctggaggattcacatggcaatcatacaatgaggatataaactccttgggtgacgaatcatttgcaacagttggattactggaacagataaatgtgacaagggataacacagactacttatggtatacaacatacgttgatattgctcaggatgagcagtttctcagcaatgggaagaatcctatgctaactgttatgtcagctggtcatgctttgcatattttcgttaatggacaactaacagggactgtgtatggaagcgtagaagatccaaaattgacatatagtggaaatgtgaaactttggtcaggcagtaacactatttcatgcttaagtatagcagttggtctcccgaatgtgggagaacattttgagacttggaatgctggaattctaggtcctgtgacactggatggcctaaatgagggaagaagagatctcacatggcagaaatggacctataaggttggtctgaaaggtgaggctttgagtcttcattcacttagtggcagctcttcagtagagtggggagaacctgttcagaagcagcctctgtcatggtacaaggctttcttcaatgcacctgatggtgatgagccattagctttggatatgagtagcatgggtaaaggtcaaatctggataaatggacaaggtattggaaggtactggcctggctacaaagcttctggaacctgtgggatctgtgattaccgtggagagtatgatgaaaagaagtgccaaaccaactgtggtgactcttctcagagatggtaccatgttcctcgttcatggcttaatccgacggggaaccttttggtgatatttgaggagtggggcggtgatcctaccggaatttcgatggtgaaaagaatagcagggagtatctgcgctgatgtctccgaatggcagccatcgatggcaaactggcgaacaaaaggctatgagaaagccaaggtccacctccagtgtgatcatggacggaaaatgactcacataaaatttgccagctttggcacaccacagggctcctgcgggagctactctgaaggcggttgccatgcacacaagtcatacgacatattttggaagagctgcattggtcaagagcgctgtggggtaagcgtggttccagatgcatttggtggagatccatgccctgggactatgaaaagagccgttgttgaggctatatgcggctgagtcatatgatccatataacgtactggtttctacaataatgttaccctatatcaagctggcaagaggtgaaagtggcggcaactgcgacacacggattgccagggtttacaggaattagttgtatgttagatttaagcatcgtatgtgtatgtaacttaggtcacatgagacttgcatggaagaagtggttaggaccctagctgtgagaaactaagtcttgtagctctctacacagtagaattggtctggcaggtgagggtgcagatgagactctgctttattacctgagtccatgtgcgcggtggctcttgggttggagattgccaaaaggccagcaattggctttgcattatctggtcattcatttttttggtcattggagggtgcaatgtaaatgttcagggtcaatcatttatgaatttttctagctagtaatgaaacagtaaagaaaatgttggttcagattataaaacaccagttatcttccatttgcctgagt

SEQ ID NO: 210052 - DNA, 3387 bp, Zea Mays
ccggagtccgtccttccggtgggcggtggcagtggcacctgcttccactggagtggagggaaagcaccgaaaggcgcggctttttttacctctctctcgctttgcttgccccttcttttcacttccctccctccctccctttcctctcctccccgctccatggcccccgcggcgccagcgggcctggcctccgtcgcggtcgcggtcgcggttgccgtgctcgccgccgcggcgtcggcggccgtcacctacgaccgcaaggccgtcgtggtgaacggccagcgccggatcctgatgtccggctccatccactacccaaggagcgtccccgagatgtggccggatctgatacagaaggccaaggacggcggcctcgacgtcgtgcagacgtacgtcttctggaacggccatgagccctcccgtcgacagtactacttcgagggtcggtatgatctggtgcacttcatcaagctggtgaagcaggccggactctacgtgcacctccgcattggcccctacgtctgcgccgagtggaatttcggtggtttccctgtttggctcaagtatgtcccgggcattagctttaggactgataatgaaccgttcaagaatttcaccacaaagatcgttgacatgatgaagtccgaagggctctttgaatggcagggagggccaataattctttcccagattgagaatgaatttgggcccttggagtgggatcagggagagcccgccaaggcctatgcgtcatgggcagctaacatggcggttgcgctcaacacaagtgttccatgggtcatgtgcaaagaagatgatgccccggatccaattattaatacttgcaatggattttattgtgactggttctccccaaacaaacctcacaagcctacaatgtggactgaggcttggacatcttggtatacaggatttggtattccagttccacatagaccagtagaggatctagcatatggtgtggccaagtttattcagaagggtggctcttttgttaattattacatgtatcatggtggaacaaattttgggcgcacagctggtggtccattcattgcaactagctacgactatgatgctcctattgatgaatatggtgagctgaacacattctactttggtaaaaggcatgcattatacagtttgcatcaacctcctctcatgtttgctgagagaaccgaaatggggtcacttgaaggagttgcataaagctatcaagctttgtgaaccagcattggttgcaggagacccaattgtaacttcacttggcaatgctcagcaggcatctgtttttagatcaagcaccgatgcctgtgtggccttccttgagaacaaggataaagtatcttatgctagggtatcattcaatggaatgcattatgatctacctccctggtccataagtattctcccagactgcaaaacaacagtctacaacaccgccagcgtgagattgggcacctgattctttttgttcattctacaacttccttttgttcttattttaattgggttgctttcttaaattgtatggcttccctaatattgagttcatacaacatttccttggtgctattgtactgtataattcttggcaaaaaactttttatactgatatgtttatacaggttggaagtcagatttcacaaatgaaaatggaatgggctggaggattcacatggcaatcatacaatgaggatataaactccttgggtgacgaatcatttgcaacagttggattactggaacagataaatgtgacaagggataacacagactacttatggtatacaacatacgttgatattgctcaggatgagcagtttctcagcaatgggaagaatcctatgctaactgttatgtcagctggtcatgctttgcatattttcgttaatggacaactaacagggactgtgtatggaagcgtagaagatccaaaattgacatatagtggaaatgtgaaactttggtcaggcagtaacactatttcatgcttaagtatagcagttggtctcccgaatgtgggagaacattttgagacttggaatgctggaattctaggtcctgtgacactggatggcctaaatgagggaagaagagatctcacatggcagaaatggacctataaggttggtctgaaaggtgaggctttgagtcttcattcacttagtggcagctcttcagtagagtggggagaacctgttcagaagcagcctctgtcatggtacaaggctttcttcaatgcacctgatggtgatgagccattagctttggatatgagtagcatgggtaaaggtcaaatctggataaatggacaaggtattggaaggtactggcctggctacaaagcttctggaacctgtgggatctgtgattaccgtggagagtatgatgaaaagaagtgccaaaccaactgtggtgactcttctcagagatggtaccatgttcctcgttcatggcttaatccgacggggaaccttttggtgatatttgaggagtggggcggtgatcctaccggaatttcgatggtgaaaagaatagcagggagtatctgcgctgatgtctccgaatggcagccatcgatggcaaactggcgaacaaaaggctatgagaaagccaaggtccacctccagtgtgatcatggacggaaaatgactcacataaaatttgccagctttggcacaccacagggctcctgcgggagctactctgaaggcggttgccatgcacacaagtcatacgacatattttggaagagctgcattggtcaagagcgctgtggggtaagcgtggttccagatgcatttggtggagatccatgccctgggactatgaaaagagccgttgttgaggctatatgcggctgagtcatatgatccatataacgtactggtttctacaataatgttaccctatatcaagctggcaagaggtgaaagtggcggcaactgcgacacacggattgccagggtttacaggaattagttgtatgttagatttaagcatcgtatgtgtatgtaacttaggtcacatgagacttgcatggaagaagtggttaggaccctagctgtgagaaactaagtcttgtagctctctacacagtagaattggtctggcaggtgagggtgcagatgagactctgctttattacctgagtccatgtgcgcggtggctcttgggttggagattgccaaaaggccagcaattggctttgcattatctggtcattcatttttttggtcattggagggtgcaatgtaaatgttcagggtcaatcatttatgaatttttctagctagtaatgaaacagtaaagaaaatgttggttcagattataaaacaccagttatcttccatttgcctgagt

SEQ ID NO: 210053 - DNA, 3393 bp, Zea Mays
cagtctagcttatttgctcagattatataatctaaccccttggattatgataatccataagcaagtgaggaggtgcttatttcagattatttttttctcacttcctcactaccctttcaagtttcctagaaattacccaccattgccattataatctaccgaatcgtttttgcgcctatcggatcggagaagcccgccgcccaacagaaacacgccagataatctgggtaaacaaacaggactactcagattatataatccaaattatataatccagattatataatcatccaaaaataatccagattatataatctattggggtaaacaaacaggcctttagttgtctctcgtatttggaatcgtttcaatgctcagggttatacatgacttaagtggtctaagctcctcaagttgagtccgacttcacatgagagcgaatttcagtctgttgaagcgcggggcagggttcagcagttttctcgttcgccgagcaccagatccacgctcctccatgccagatctgtggctatcagggatctggtacccccagcccttcctgggccccgctgtcctcgatgtggcccacggtggtggtgctgtgctgctgcttccgtgtgcgcgttcgcgggctccttgacgtgggctgctctcgtgtctggtgggcactgggcggcggctgcactgtcactagcgcttcggcaggcacgcggccatgcggctcctccctttgggggctggttctttgtggtgcagtggctcccaatcaggttcccgcgtctgccgcgcagctgtgggacacctccacattggctggtggctgcggccgctgttcctggcccacagtcgctgctttggtttgcggatctgaggctggtgttcggctcctgaatggctatgggtggcttgggcgggcctgtctagctgctgctggcgacgatggcatccttgacattatgttcctcccctcgggggcagatgtgcagatgccttaccgcctagatcacatccttgtggcagatggtttgccgccgtggttgtttggggctcgccttcggcaaatactttgccaccaatgcttgtggatgctcgtgtcatctccggttggattcttcatgtctttttatttttttttcacatgcttagcatattttttgggcgtcttggttgatgaccccctccccaactttttcttagtgttctaggttactttgggttgtctaccactgttttggtggtttgtaacctgcgctaattctattctaaatgaaacacatgccaaggcatgttcatgaaaaaatgtttttgcaatcaaaagcaaatgcatctagcacaatttcattactttgacggaatacattggggcatttggtttgctgagagaaccgaaatggggtcacttgaaggagttgcataaagctatcaagctttgtgaaccagcattggttgcaggagacccaattgtaacttcacttggcaatgctcagcaggcatctgtttttagatcaagcaccgatgcctgtgtggccttccttgagaacaaggataaagtatcttatgctagggtatcattcaatggaatgcattatgatctacctccctggtccataagtattctcccagactgcaaaacaacagtctacaacaccgccagcgttggaagtcagatttcacaaatgaaaatggaatgggctggaggattcacatggcaatcatacaatgaggatataaactccttgggtgacgaatcatttgcaacagttggattactggaacagataaatgtgacaagggataacacagactacttatggtatacaacatacgttgatattgctcaggatgagcagtttctcagcaatgggaagaatcctatgctaactgttatgtcagctggtcatgctttgcatattttcgttaatggacaactaacagggactgtgtatggaagcgtagaagatccaaaattgacatatagtggaaatgtgaaactttggtcaggcagtaacactatttcatgcttaagtatagcagttggtctcccgaatgtgggagaacattttgagacttggaatgctggaattctaggtcctgtgacactggatggcctaaatgagggaagaagagatctcacatggcagaaatggacctataaggttggtctgaaaggtgaggctttgagtcttcattcacttagtggcagctcttcagtagagtggggagaacctgttcagaagcagcctctgtcatggtacaaggctttcttcaatgcacctgatggtgatgagccattagctttggatatgagtagcatgggtaaaggtcaaatctggataaatggacaaggtattggaaggtactggcctggctacaaagcttctggaacctgtgggatctgtgattaccgtggagagtatgatgaaaagaagtgccaaaccaactgtggtgactcttctcagagatggtaccatgttcctcgttcatggcttaatccgacggggaaccttttggtgatatttgaggagtggggcggtgatcctaccggaatttcgatggtgaaaagaatagcagggagtatctgcgctgatgtctccgaatggcagccatcgatggcaaactggcgaacaaaaggctatgagaaagccaaggtccacctccagtgtgatcatggacggaaaatgactcacataaaatttgccagctttggcacaccacagggctcctgcgggagctactctgaaggcggttgccatgcacacaagtcatacgacatattttggaagagctgcattggtcaagagcgctgtggggtaagcgtggttccagatgcatttggtggagatccatgccctgggactatgaaaagagccgttgttgaggctatatgcggctgagtcatatgatccatataacgtactggtttctacaataatgttaccctatatcaagctggcaagaggtgaaagtggcggcaactgcgacacacggattgccagggtttacaggaattagttgtatgttagatttaagcatcgtatgtgtatgtaacttaggtcacatgagacttgcatggaagaagtggttaggaccctagctgtgagaaactaagtcttgtagctctctacacagtagaattggtctggcaggtgagggtgcagatgagactctgctttattacctgagtccatgtgcgcggtggctcttgggttggagattgccaaaaggccagcaattggctttgcattatctggtcattcatttttttggtcattggagggtgcaatgtaaatgttcagggtcaatcatttatgaatttttctagctagtaatgaaacagtaaagaaaatgttggttcagattataaaacaccagttatcttccatttgcctgagt

SEQ ID NO: 210054 - DNA, 3125 bp, Zea Mays
cagtctagcttatttgctcagattatataatctaaccccttggattatgataatccataagcaagtgaggaggtgcttatttcagattatttttttctcacttcctcactaccctttcaagtttcctagaaattacccaccattgccattataatctaccgaatcgtttttgcgcctatcggatcggagaagcccgccgcccaacagaaacacgccagataatctgggtaaacaaacaggactactcagattatataatccaaattatataatccagattatataatcatccaaaaataatccagattatataatctattggggtaaacaaacaggcctttagttgtctctcgtatttggaatcgtttcaatgctcagggttatacatgacttaagtggtctaagctcctcaagttgagtccgacttcacatgagagcgaatttcagtctgttgaagcgcggggcagggttcagcagttttctcgttcgccgagcaccagatccacgctcctccatgccagatctgtggctatcagggatctggtacccccagcccttcctgggccccgctgtcctcgatgtggcccacggtggtggtgctgtgctgctgcttccgtgtgcgcgttcgcgggctccttgacgtgggctgctctcgtgtctggtgggcactgggcggcggctgcactgtcactagcgcttcggcaggcacgcggccatgcggctcctccctttgggggctggttctttgtggtgcagtggctcccaatcaggttcccgcgtctgccgcgcagctgtgggacacctccacattggctggtggctgcggccgctgttcctggcccacagtcgctgctttggtttgcggatctgaggctggtgttcggctcctgaatggctatgggtggcttgggcgggcctgtctagctgctgctggcgacgatggcatccttgacattatgttcctcccctcgggggcagatgtgcagatgccttaccgcctagatcacatccttgtggcagatggtttgccgccgtggttgtttggggctcgccttcggcaaatactttgccaccaatgcttgtggatgctcgtgtcatctccggtttgctgagagaaccgaaatggggtcacttgaaggagttgcataaagctatcaagctttgtgaaccagcattggttgcaggagacccaattgtaacttcacttggcaatgctcagcaggcatctgtttttagatcaagcaccgatgcctgtgtggccttccttgagaacaaggataaagtatcttatgctagggtatcattcaatggaatgcattatgatctacctccctggtccataagtattctcccagactgcaaaacaacagtctacaacaccgccagcgttggaagtcagatttcacaaatgaaaatggaatgggctggaggattcacatggcaatcatacaatgaggatataaactccttgggtgacgaatcatttgcaacagttggattactggaacagataaatgtgacaagggataacacagactacttatggtatacaacatacgttgatattgctcaggatgagcagtttctcagcaatgggaagaatcctatgctaactgttatgtcagctggtcatgctttgcatattttcgttaatggacaactaacagggactgtgtatggaagcgtagaagatccaaaattgacatatagtggaaatgtgaaactttggtcaggcagtaacactatttcatgcttaagtatagcagttggtctcccgaatgtgggagaacattttgagacttggaatgctggaattctaggtcctgtgacactggatggcctaaatgagggaagaagagatctcacatggcagaaatggacctataaggttggtctgaaaggtgaggctttgagtcttcattcacttagtggcagctcttcagtagagtggggagaacctgttcagaagcagcctctgtcatggtacaaggctttcttcaatgcacctgatggtgatgagccattagctttggatatgagtagcatgggtaaaggtcaaatctggataaatggacaaggtattggaaggtactggcctggctacaaagcttctggaacctgtgggatctgtgattaccgtggagagtatgatgaaaagaagtgccaaaccaactgtggtgactcttctcagagatggtaccatgttcctcgttcatggcttaatccgacggggaaccttttggtgatatttgaggagtggggcggtgatcctaccggaatttcgatggtgaaaagaatagcagggagtatctgcgctgatgtctccgaatggcagccatcgatggcaaactggcgaacaaaaggctatgagaaagccaaggtccacctccagtgtgatcatggacggaaaatgactcacataaaatttgccagctttggcacaccacagggctcctgcgggagctactctgaaggcggttgccatgcacacaagtcatacgacatattttggaagagctgcattggtcaagagcgctgtggggtaagcgtggttccagatgcatttggtggagatccatgccctgggactatgaaaagagccgttgttgaggctatatgcggctgagtcatatgatccatataacgtactggtttctacaataatgttaccctatatcaagctggcaagaggtgaaagtggcggcaactgcgacacacggattgccagggtttacaggaattagttgtatgttagatttaagcatcgtatgtgtatgtaacttaggtcacatgagacttgcatggaagaagtggttaggaccctagctgtgagaaactaagtcttgtagctctctacacagtagaattggtctggcaggtgagggtgcagatgagactctgctttattacctgagtccatgtgcgcggtggctcttgggttggagattgccaaaaggccagcaattggctttgcattatctggtcattcatttttttggtcattggagggtgcaatgtaaatgttcagggtcaatcatttatgaatttttctagctagtaatgaaacagtaaagaaaatgttggttcagattataaaacaccagttatcttccatttgcctgagt

SEQ ID NO: 210055 - DNA, 1060 bp, Zea Mays
cccacatgggccgccaaaggcctaagcctgggcatgcgcctgggctggccgcactgtgcccctgccacactccgtccctcttccctggacttgatctactactcactagcggtgtagaggtgaagataagaacttgaccatgagcagcataggcacaggttatgatttgtctgtcacgaccttctccccagatggtcgtgtcttccaggtcgagtatgccaccaaggccgtcgacaacagcgggactattgttgggatcaagtgcaaagatggcattgtcctgggtgtcgagaagctggtaacctcaaagatgatgctggaaggatcaaaccgaaggatccattcggtgcaccgtcactctggcttggctgttgctggtttagcagcagatggcaggcaaattgtttcaaggaccaaatcagaagctgccagttatgaaaaggtctatggagaacccatttctgtgaaggaattggctgatcgtgtggcaagttatgttcatctttgcacgctgtactggtggctcaggccttttggttgtggtgttattcttggaggttatgatagggatgggccacagctctacatgatagaaccctcaggagtttcctacaaatacttcggtgctgcattggggaagggaagacaggctgcaaagactgagatagaaaagttgaaactttcggagcttacctgccgggaaggcattgttgaagttgcaaagataatttatggagtgcatgacgaagcgaaggacaaagcttttgagttggagttgagctggatctgtgatgaatcgaaccgccagcatcagaaggttccaaatgaactgttggagcaggccaaagctgctgctcaggcagctcttgaggagatggatgctgactaagaaacaggacgatttgcccagacttggtgtttttgataaagagctgtttcttgatttgatgcaagtaggcttggtactcttcatgtttgtggcatatggttagcaggcatgaatgtgacatcaaacgaagtagtattattgatcaaccaatgcgaagagaaggcatgtagg

SEQ ID NO: 210056 - DNA, 774 bp, Zea Mays
tgaagggagggaaaatcctttttggaggatctgccattgaatcagaaggaaactttgtgcaaccaacaattgtggaaattacaccttctgcaccagttgtgaaagaagaactctttggtcctgtcctttatgttatgaaatttcagtccttgaaggaagcaattgaaatcaataactctgttcctcaaggattgagcagttctatatttacaaagaggccagatattatttttaagtggctcgggccccatggtagtgattgtggtatagtgaatgtgaacatacctactaatggtgctgaaattggtggagcatttggtggagaaaaagcaactggtggtggacgagaagcagggagtgattcctggaagcagtacatgaggagggcgacttgtacaatcaactatgggagcgagctacctctagcccagggaatcaattttggttaatcctgcagaaatgttgcgcgtggatctcagtgttttctgcagacgtggatgccgtatggaaagaactgatgcaaccgcatttgagatctcagcagacttgagcagcatttattggcgtcagttgtgaaacttaaactgcaggagcatcttgtacataaataaaataagatgtttgttgctcgtgggccgtggcacgttttggtaccggtgtccagtctactaataaaatctaatgcaaaacggtcataactacattctcatgcagtatgattttccggccttttgatctggaattgaaatgagcgttgttcgttttgaacaagca

SEQ ID NO: 210057 - DNA, 1898 bp, Zea Mays
acaaatacacctcagtctcagtcccccaccacatccgctccccgccttccgcttccctaccccccgcatcacctaccaacgccgacaccatgggggccttcgcgaaggaggagcaccagttcctagccgagctcggcctcgcgcagcgcaacccaggcgcgttcgcatgcggtgcgtggggcggctcaggtcccaccgtcacctccacgagcccgaccaacaatcaggtcatcgcagaggtcgtggaggcgtccgtgcacgactacgaggagggcatgcgcgcctgcttcgatgccgccaagacatggatggcgattcctgctccaaagcgaggagagatcgttaggcaaatcggtgatgcactgagagcaaagctccatcaccttggcaggcttgtgtcacttgagatggggaaaattcttcctgaagggatcggtgaggttcaggaaatcatcgacatgtgtgattatgctgtggggctaagtcgccaactaaatggatccattataccatctgaacgaccaaaccatatgatgatggaggtgtggaatccccttggagttgtgggtgttataacggcatttaatttcccttgtgctgtgcttggaaaggtgctccaacaactccactgatcactattgcaatgacaaaaatagtggctagtgtattggagaagaacaacttgccaggcgcaatttttacatctttttgtgggggcactgaaattggtcaagcaattgcccttgacattaggatacctttggtttcattcactggaagtacaagggctggtctaatggttcagcaacaagttagtgcaagatttggtaaatgccttcttgaacttagcggaaacaatgccatcattgttatggatgatgcagatatccagctagctgtgcgatctgtcttgttcgctgctgttggtacagcaggacaacgctgcactacatgtcgtaggctgattcttcatgagaacatatatcaaaccttccttgatcagcttgttgaggtatacaaacaagtccgaattggggatccgttggagaaaggcaccttactgggaccactgcacactcctgcttcaaaagagaactttttgaaaggcattcagactatcaaatctcagggagggaaaatcctttttggaggatctgccattgaatcagaaggaaactttgtgcaaccaacaattgtggaaattacaccttctgcaccagttgtgaaagaagaactctttggtcctgtcctttatgttatgaaatttcagtccttgaaggaagcaattgaaatcaataactctgttcctcaaggattgagcagttctatatttacaaagaggccagatattatttttaagtggctcgggccccatggtagtgattgtggtatagtgaatgtgaacatacctactaatggtgctgaaattggtggagcatttggtggagaaaaagcaactggtggtggacgagaagcagggagtgattcctggaagcagtacatgaggagggcgacttgtacaatcaactatgggagcgagctacctctagcccagggaatcaattttggttaatcctgcagaaatgttgcgcgtggatctcagtgttttctgcagacgtggatgccgtatggaaagaactgatgcaaccgcatttgagatctcagcagacttgagcagcatttattggcgtcagttgtgaaacttaaactgcaggagcatcttgtacataaataaaataagatgtttgttgctcgtgggccgtggcacgttttggtaccggtgtccagtctactaataaaatctaatgcaaaacggtcataactacattctcatgcagtatgattttccggccttttgatctggaattgaaatgagcgttgttcgttttgaacaagca

SEQ ID NO: 210058 - DNA, 3008 bp, Zea Mays
cagctagctcgcaataactccttcctccccacctccacattctcccatccgccctgctttcccctccaaccatgccgtcttcttcctccccgagatctcgccatgcctgctctcccgcctcctgctagctagcctagcctagccagctgcgtgcgtgcgtgcgtgatcgtttcctgcatgcgatatcaccaacgcttcgctggaagaaggcgtcgtcacagacagggatcgaaggctgacctcctagacagccatcagctgcagcaagcgttccagcagcagctcttcgatcagatcccgaccaccaccacagtggacgatagcagcgacaacctcatccatggccgctctgacacgctggtagatgagttcgagagcaagtcctgcagcgagaatcccgacggaacctctggtgacgatggcctggaggaagaccccaatcagcggccgaacaagaagaagcgataccaccgccacacccagcaccagatccaagagatggaggcgttcttcaaggagtgcccgcacccggacgacaagcagcggaaggagctgagccgggagctcggcctcgagccgctgcagaaccagcacgagcggcacgagaacgcgcagctgcgcgcggagaacgacaagctgcgagccgagaacatgcggtacaaggaggcgctgggcacggcctcgtgccccagctgcggcggcccggctgccctcggcgagatgtccttcgacgagcaccacctccgcctcgagaacgctcgcctccgtgacgagatcgaccggatctcgggcatcgccgccaagcacgtgggaaagcccatggtgtccttccccgtgctctccagcccgctcgccgccgccgccgccgccgcccggtccccactcgacctcgccggcgcctacggcgtccagtcagctgctgcgggcctcggcgccgaccacgtgctgttcggcgccggtgccggcgatctgctgaggagcgtgtcggccgggcagctcgacgcggacaagcccatgatcgtggagctggccgtcgcggccatggacgagctcctccggatggcgcggcctgacgcgctgctgtggggtggcggcgcgtcggcaggggcgcagcagcagcagctggacgaggaggagtacgtccggacgttccccgctgggctcgggccgaggcagtacgggctccgtccggaggcgtctcgggacagcgccgtcgtgatcatgacctgcgacagcctcatcgagatactcatggacgcgaaccgattcgcggcagtgttctcgagcatcgtgtcgagggcttccacgcacgaggtgctgtcaactggtgtggcagggagctacaatggtgcattacaagtgatgtcgatggagtttcaggtgccgtcgccgctggtgccgacgcgcgagagctacttcgtgaggtactgcaagaacaacccggacgggacatgggccgtcgtcgacgtctcgctcgacagcctccgccctagcccggtcatcaaatgccggcgcaggccgtcaggttgcctcatccaagagatgcccaatggctactcaaaggtgacctgggtggagcatgttgaggtcgacgacagatcagtgcacaacctctacaggcctttggtcaattcaggcctcgcgtttggcgcgaagaggtgggttggcacactggaccggcagtgcgagcggctcgccagcgccatggccagcaacatccccaacggcgacctcggtgtgatcacaagcatagaggggaggaagagcatgctgaagctggcggagaggatggtggcgagcttctgcggcggcgtgacggcgtctgcggcgcaccagtggacgacgctgtcgggaagcggcgcggaggacgtccgtgttatgaccaggaagagcgtggacgacccgggcaggccgccgggcatcgtcctcaatgctgccacctccttctggctgcccgtcccacccaagagggtcttcgatttcctccgcgatgagacctctcgcagcgagtgggacatcctctcgaacggtggtgctgtccaagaaatggctcacattgccaacggccgggaccatggcaactgtgtctccctccttcgtgtcaatagtgcaaactcgaaccagagcaacatgctgatcctccaggagagctgcaccgacgcctcgggctcgtacgtggtgtacgcgccggtggacgtggtggcgatgaacgtggtgctcaacggcggcgacccggactacgtggccctgctgccgtcgggcttcgccatcctccccgacggaccaccgccggccggtgcggctccgtcccacggagagggcttggacactggcggcggcgggtccctcctgacggtggcgttccagatcttggtggactccgtccccaccgccaagctctccctcggctccgtagccaccgtgaacagcctcatcgcctgcaccgtcgagcgcatcaaggccgccgtctgtgcggaagccggcaacccgcagtagccatccatgcgatatagaggagggagaagggggacatgcagcaaggttttgtggaaatgttagtggggagtcaagaacgcacctcagactctccttgccgtgtggtgctcatactgaaaggaaaaagaaggcgtcaccactatgcaaggggggatggttcgggtattgacttcgccgtccaatcaaactactacagaaaggacgtacgggtgctgtggagaagatggatcgatgctgtttctagggtttacttcctcattgttcgtggtgctgccgtagttcaggctaaggtgcctgtgcctgctcgcagtcgtagctagagaacacagagatttgttgcctctgatctttcctttttggatttgcaaagatttgtagatcagtcatttcgtaaaccgatgcgccttggctaaaacgcgcccgttcgttgttgttcgatcgtagctgccttttgctattcataaaacgatgcaatttcaaccactgagtttcttctagcttcttgttttcag

SEQ ID NO: 210059 - DNA, 3047 bp, Zea Mays
cagctagctcgcaataactccttcctccccacctccacattctcccatccgccctgctttcccctccaaccatgccgtcttcttcctccccgagatctcgccatgcctgctctcccgcctcctgctagctagcctagcctagccagctgcgtgcgtgcgtgcgtgatcgtttcctgcatgcgatatcaccaacgcttcgctggaagaaggcgtcgtcacagacagggatcgaaggctgacctcctagacagccatcagctgcagcaagcgttccagcagcagctcttcgatcagatcccgaccaccaccacagtggacgatagcagcgacaacctcatccatggccgctctgacacgctggtagatgagttcgagagcaagtcctgcagcgagaatcccgacggaacctctggtgacgatggcctggaggaagaccccaatcagcggccgaacaagaagaagcgataccaccgccacacccagcaccagatccaagagatggaggcgttcttcaaggagtgcccgcacccggacgacaagcagcggaaggagctgagccgggagctcggcctcgagccgctgcaggtcaagttttggttccagaacaagcgcacacagatgaagaaccagcacgagcggcacgagaacgcgcagctgcgcgcggagaacgacaagctgcgagccgagaacatgcggtacaaggaggcgctgggcacggcctcgtgccccagctgcggcggcccggctgccctcggcgagatgtccttcgacgagcaccacctccgcctcgagaacgctcgcctccgtgacgagatcgaccggatctcgggcatcgccgccaagcacgtgggaaagcccatggtgtccttccccgtgctctccagcccgctcgccgccgccgccgccgccgcccggtccccactcgacctcgccggcgcctacggcgtccagtcagctgctgcgggcctcggcgccgaccacgtgctgttcggcgccggtgccggcgatctgctgaggagcgtgtcggccgggcagctcgacgcggacaagcccatgatcgtggagctggccgtcgcggccatggacgagctcctccggatggcgcggcctgacgcgctgctgtggggtggcggcgcgtcggcaggggcgcagcagcagcagctggacgaggaggagtacgtccggacgttccccgctgggctcgggccgaggcagtacgggctccgtccggaggcgtctcgggacagcgccgtcgtgatcatgacctgcgacagcctcatcgagatactcatggacgcgaaccgattcgcggcagtgttctcgagcatcgtgtcgagggcttccacgcacgaggtgctgtcaactggtgtggcagggagctacaatggtgcattacaagtgatgtcgatggagtttcaggtgccgtcgccgctggtgccgacgcgcgagagctacttcgtgaggtactgcaagaacaacccggacgggacatgggccgtcgtcgacgtctcgctcgacagcctccgccctagcccggtcatcaaatgccggcgcaggccgtcaggttgcctcatccaagagatgcccaatggctactcaaaggtgacctgggtggagcatgttgaggtcgacgacagatcagtgcacaacctctacaggcctttggtcaattcaggcctcgcgtttggcgcgaagaggtgggttggcacactggaccggcagtgcgagcggctcgccagcgccatggccagcaacatccccaacggcgacctcggtgtgatcacaagcatagaggggaggaagagcatgctgaagctggcggagaggatggtggcgagcttctgcggcggcgtgacggcgtctgcggcgcaccagtggacgacgctgtcgggaagcggcgcggaggacgtccgtgttatgaccaggaagagcgtggacgacccgggcaggccgccgggcatcgtcctcaatgctgccacctccttctggctgcccgtcccacccaagagggtcttcgatttcctccgcgatgagacctctcgcagcgagtgggacatcctctcgaacggtggtgctgtccaagaaatggctcacattgccaacggccgggaccatggcaactgtgtctccctccttcgtgtcaatagtgcaaactcgaaccagagcaacatgctgatcctccaggagagctgcaccgacgcctcgggctcgtacgtggtgtacgcgccggtggacgtggtggcgatgaacgtggtgctcaacggcggcgacccggactacgtggccctgctgccgtcgggcttcgccatcctccccgacggaccaccgccggccggtgcggctccgtcccacggagagggcttggacactggcggcggcgggtccctcctgacggtggcgttccagatcttggtggactccgtccccaccgccaagctctccctcggctccgtagccaccgtgaacagcctcatcgcctgcaccgtcgagcgcatcaaggccgccgtctgtgcggaagccggcaacccgcagtagccatccatgcgatatagaggagggagaagggggacatgcagcaaggttttgtggaaatgttagtggggagtcaagaacgcacctcagactctccttgccgtgtggtgctcatactgaaaggaaaaagaaggcgtcaccactatgcaaggggggatggttcgggtattgacttcgccgtccaatcaaactactacagaaaggacgtacgggtgctgtggagaagatggatcgatgctgtttctagggtttacttcctcattgttcgtggtgctgccgtagttcaggctaaggtgcctgtgcctgctcgcagtcgtagctagagaacacagagatttgttgcctctgatctttcctttttggatttgcaaagatttgtagatcagtcatttcgtaaaccgatgcgccttggctaaaacgcgcccgttcgttgttgttcgatcgtagctgccttttgctattcataaaacgatgcaatttcaaccactgagtttcttctagcttcttgttttcag

SEQ ID NO: 210060 - DNA, 3241 bp, Zea Mays
ctagctctccgctccccagctagctcgcaataactccttcctccccacctccacattctcccatccgccctgctttcccctccaaccatgccgtcttcttcctccccgagatctcgccatgcctgctctcccgcctcctgctagctagcctagcctagccagctgcgtgcgtgcgtgcgtgatcgtttcctgcatgcgatatcaccaacgcttcgctggaagaaggcgtcgtcacagacagggatcgaagaataaaagttgatcgatggtagagagcaagagctagctagggtttgggagctgaggctaggaccgaacgtacgtacgtgctgccattgttcatgacgccggcaaggcgcgtgccgccggcggcgatgatcggccggaatggcttcgcgtttgggtcctcgtcggcgctgtctttaagccaggctgacctcctagacagccatcagctgcagcaagcgttccagcagcagctcttcgatcagatcccgaccaccaccacagtggacgatagcagcgacaacctcatccatggccgctctgacacgctggtagatgagttcgagagcaagtcctgcagcgagaatcccgacggaacctctggtgacgatggcctggaggaagaccccaatcagcggccgaacaagaagaagcgataccaccgccacacccagcaccagatccaagagatggaggcgttcttcaaggagtgcccgcacccggacgacaagcagcggaaggagctgagccgggagctcggcctcgagccgctgcaggtcaagttttggttccagaacaagcgcacacagatgaagaaccagcacgagcggcacgagaacgcgcagctgcgcgcggagaacgacaagctgcgagccgagaacatgcggtacaaggaggcgctgggcacggcctcgtgccccagctgcggcggcccggctgccctcggcgagatgtccttcgacgagcaccacctccgcctcgagaacgctcgcctccgtgacgagatcgaccggatctcgggcatcgccgccaagcacgtgggaaagcccatggtgtccttccccgtgctctccagcccgctcgccgccgccgccgccgccgcccggtccccactcgacctcgccggcgcctacggcgtccagtcagctgctgcgggcctcggcgccgaccacgtgctgttcggcgccggtgccggcgatctgctgaggagcgtgtcggccgggcagctcgacgcggacaagcccatgatcgtggagctggccgtcgcggccatggacgagctcctccggatggcgcggcctgacgcgctgctgtggggtggcggcgcgtcggcaggggcgcagcagcagcagctggacgaggaggagtacgtccggacgttccccgctgggctcgggccgaggcagtacgggctccgtccggaggcgtctcgggacagcgccgtcgtgatcatgacctgcgacagcctcatcgagatactcatggacgcgaaccgattcgcggcagtgttctcgagcatcgtgtcgagggcttccacgcacgaggtgctgtcaactggtgtggcagggagctacaatggtgcattacaagtgatgtcgatggagtttcaggtgccgtcgccgctggtgccgacgcgcgagagctacttcgtgaggtactgcaagaacaacccggacgggacatgggccgtcgtcgacgtctcgctcgacagcctccgccctagcccggtcatcaaatgccggcgcaggccgtcaggttgcctcatccaagagatgcccaatggctactcaaaggtgacctgggtggagcatgttgaggtcgacgacagatcagtgcacaacctctacaggcctttggtcaattcaggcctcgcgtttggcgcgaagaggtgggttggcacactggaccggcagtgcgagcggctcgccagcgccatggccagcaacatccccaacggcgacctcggtgtgatcacaagcatagaggggaggaagagcatgctgaagctggcggagaggatggtggcgagcttctgcggcggcgtgacggcgtctgcggcgcaccagtggacgacgctgtcgggaagcggcgcggaggacgtccgtgttatgaccaggaagagcgtggacgacccgggcaggccgccgggcatcgtcctcaatgctgccacctccttctggctgcccgtcccacccaagagggtcttcgatttcctccgcgatgagacctctcgcagcgagtgggacatcctctcgaacggtggtgctgtccaagaaatggctcacattgccaacggccgggaccatggcaactgtgtctccctccttcgtgtcaatagtgcaaactcgaaccagagcaacatgctgatcctccaggagagctgcaccgacgcctcgggctcgtacgtggtgtacgcgccggtggacgtggtggcgatgaacgtggtgctcaacggcggcgacccggactacgtggccctgctgccgtcgggcttcgccatcctccccgacggaccaccgccggccggtgcggctccgtcccacggagagggcttggacactggcggcggcgggtccctcctgacggtggcgttccagatcttggtggactccgtccccaccgccaagctctccctcggctccgtagccaccgtgaacagcctcatcgcctgcaccgtcgagcgcatcaaggccgccgtctgtgcggaagccggcaacccgcagtagccatccatgcgatatagagggagaagggggacatgcagcaaggttttgtggaaatgttagtggggagtcaagaacgcacctcagactctccttgccgtgtggtgctcatactgaaaggaaaaagaaggcgtcaccactatgcaaggggggatggttcgggtattgacttcgccgtccaatcaaactactacagaaaggacgtacgggtgctgtggagaagatggatcgatgctgtttctagggtttacttcctcattgttcgtggtgctgccgtagttcaggctaaggtgcctgtgcctgctcgcagtcgtagctagagaacacagagatttgttgcctctgatctttcctttttggatttgcaaagatttgtagatcagtcatttcgtaaaccgatgcgccttggctaaaacgcgcccgttcgttgttgttcgatcgtagctgccttttgctattcataaaacgatgcaatttcaaccactgagtttcttctagcttcttgttttcag

SEQ ID NO: 210061 - DNA, 1957 bp, Zea Mays
acgtccccagcagcagtagccccagcccccagtgccgcagttgcgctcagctatctctgctgagccgattagataaatccggcggaggaagagggaagaattatcgtgcgatatttcccccctcccactccctctctctctctctcgatttgcccgagaaatttttttggttgtttcccgcatcactctccactaggccgccgtctcccccgctggtgctcgtcgcttcctgcccaattcggcgccattcgcccggcgcactccctattaattccctgcctcggtagtcactggccgattgccacgtgaaatttcctgttccgttgcctttcgggtgcgcctgaagtacccacacgctactagggttcaatcgtcgtcagcaggcttacctctcaatcactgcggggcggcggctcgagagtttgtggacagttggcgaagagatagttaggttttttttttgtctcccgtgtccgatggaggaatcggacttgggaggtaatctgggtaagcaaacggaagaggataaggctgcgggagaatcaggggatgagggtaagatcgagaggagccaatctatcaatctgaatagagtgccagcagttgctgtagaggcgatgagcacccagggaaactgtgagacgcacggtgcagcagtgccaggaactaaggatgcaggcacaggaaaggcagggcaatccagtggcgatcgacaggaggagaagttacccaagtgtgagcaggtcgactatggaagtgaagttgaaggctgcgcagatgatgagaaccctggcaagagggctgctttagttactttggttggaaatgaatactgcggcgacgaggatgagagagttcaagtgctcaccattgtcaagaaggacgagcatgcagatgacattgtcgaccgtattaatcctggcacagttgcagggtacagtgaagtgaagggtgctgtaggtgcttctgccgccacttctgcggtgcgacctgctggctcccgatcgtcaagtttccatggtgtgactaggcatagatggagtgggaaatatgaagctcatttgtgggacagttcttgcagagtagagggacgtagaaggaaagggaaacaagtttatctaggaagttatgataccgaggaaaaagcggccagggcttatgatgttgctgctattaaatactggggcgaaaataccagactgaactttccgatttcacaatacggcaaggagttggaggacataagggatttgtctcgagaggaatgtgtgacatacttgagaaggaggagcagctgcttttcaagaggagcttctatttatagaggagtgacaagaaggcagaaagacgggagatggcaagcacgcataggactggttgctggaactagagacatttacctgggaacattcaaggaagaagctgcagaggcttatgatattgctgccattgagatacgtggcaaaaacgctgtgaccaattttgaccgaagcaactatgtcgataagggtatgcactgtatagaaggcgaaggcttgaggctgcttgcatccaagccagaagaatgacttccaagttcaatgcagtgattgtcgatcgagcagatttggccagacgtatatgcagcttagttggtacatatacagataggagaaccggttgcagtttgtcaatattcctgctttacatgacttgggattacagttaaatcgacccgctagcaaaaaaaagtgtgcaaatgttagtagatttggccagacatatatgaagattttggggttgtatcataaggcctcgtaggatagatctttctgcaaatgttagcgaagccagtgtttatgttctgtttgctagattagcgttatcagtttgcacgttccccttttttttctgaataattgtccttgtatgatcttgagggaatgcgtttacctggtcgtttgccattctttttacc

SEQ ID NO: 210062 - DNA, 1974 bp, Zea Mays
ctttaattacctattcccttacgtccccagcagcagtagccccagcccccagtgccgcagttgcgctcagctatctctgctgagccgattagataaatccggcggaggaagagggaagaattatcgtgcgatatttcccccctcccactccctctctctctctctcgatttgcccgagaaatttttttggttgtttcccgcatcactctccactaggccgccgtctcccccgctggtgctcgtcgcttcctgcccaattcggcgccattcgcccggcgcactccctattaattccctgcctcggtagtcactggccgattgccacgtgaaatttcctgttccgttgcctttcgggtgcgcctgaagtacccacacgctactagggttcaatcgtcgtcagcaggcttacctctcaatcactgcggggcggcggctcgagagtttgtggacagttggcgaagagatagttaggttttttttttgtctcccgtgtccgatggaggaatcggacttgggaggtaatctgggtaagcaaacggaagaggataaggctgcgggagaatcaggggatgagggtaagatcgagaggagccaatctatcaatctgaatagagtgccagcagttgctgtagaggcgatgagcacccagggaaactgtgagacgcacggtgcagcagtgccaggaactaaggatgcaggcacaggaaaggcagggcaatccagtggcgatcgacaggaggagaagttacccaagtgtgagcaggtcgactatggaagtgaagttgaaggctgcgcagatgatgagaaccctggcaagagggctgctttagttactttggttggaaatgaatactgcggcgacgaggatgagagagttcaagtgctcaccattgtcaagaaggacgagcatgcagatgacattgtcgaccgtattaatcctggcacagttgcagggtacagtgaagtgaagggtgctgtaggtgcttctgccgccacttctgcggtgcgacctgctggctcccgatcgtcaagtttccatggtgtgactaggcatagatggagtgggaaatatgaagctcatttgtgggacagttcttgcagagtagagggacgtagaaggaaagggaaacaaggaagttatgataccgaggaaaaagcggccagggcttatgatgttgctgctattaaatactggggcgaaaataccagactgaactttccgatttcacaatacggcaaggagttggaggacataagggatttgtctcgagaggaatgtgtgacatacttgagaaggaggagcagctgcttttcaagaggagcttctatttatagaggagtgacaagaaggcagaaagacgggagatggcaagcacgcataggactggttgctggaactagagacatttacctgggaacattcaaaacagaggaagaagctgcagaggcttatgatattgctgccattgagatacgtggcaaaaacgctgtgaccaattttgaccgaagcaactatgtcgataagggtatgcactgtatagaaggcgaaggcttgaggctgcttgcatccaagccagaagaatgacttccaagttcaatgcagtgattgtcgatcgagcagatttggccagacgtatatgcagcttagttggtacatatacagataggagaaccggttgcagtttgtcaatattcctgctttacatgacttgggattacagttaaatcgacccgctagcaaaaaaaagtgtgcaaatgttagtagatttggccagacatatatgaagattttggggttgtatcataaggcctcgtaggatagatctttctgcaaatgttagcgaagccagtgtttatgttctgtttgctagattagcgttatcagtttgcacgttccccttttttttctgaataattgtccttgtatgatcttgagggaatgcgtttacctggtcgtttgccattctttttacc

SEQ ID NO: 210063 - DNA, 594 bp, Zea Mays
atgtccggatacttcaacgaagtatccacagttgctttccagcttgggaatcgaatcaaagagagaggtggccgactgattgatgttgatgctttacatgaaaaacttctccaggttatcaaattatatttgatgcactatgcactggcatctgtttatgagaatcaggttgctgaaacagaggctgtaccaaaagggagggtgtcaagctcagagagtcaggattcattctatcaggttgctgaacatgcttgtagaaaagatgctgagaaagctgatcattctatcagcaggcatcctgaatttcgctacaaaactgagtttcaaagccacgaaccagagtttgattatcttaagagcttggaaattgaagagaagattaaccaaataaaatggtgtcaagcagcaaatggtgcattgtatcttctatccacaaatgacaaaacgataaagttttggaaggtccaagaaaagaaggtaaaaaagctatctgagatgaatttggaccgttcagctgctcctgcaaatggtagtcctggtggcgtgggatatctgagcccatctctctcaaatggttacaagccaagaaacaag

SEQ ID NO: 210064 - DNA, 1444 bp, Zea Mays
gccacgccacgcacttggtccacacgtcgtattcggatgaagcatgagagagaagagcaagaaagacttcgtcacgtcaggtcgacggcgaaagacgcggaggttggtgaaggagtgaaggaagaaagagaacgaaaggcggcctctcactcgcagtcgcagtagcaggttctagaccaccaaacccagcggctcccgctcatctcagttcggcttcggccttcgcattcctctacagatttcgcagttttgctgggggtaactacggaatggggggcggatccggatctttcctcaaggtcttggtcaacaacatggatgtcctcgcggggcctttggtttcacttgcgtatcctctgtatgcctctgttagagcaattgaaacaaaatctgctgtggatgatcagcaatggctcacgtactgggtgctgtactcatttatcactctattcgagctcacctttgctccggtactcgaatggcttcctttctggtcttatgcaaagctgttcttcaattgctgctgcacagaggtacattgagcaaaatggatcaaaagcgtttgagaatcttgttaacaagtttaagagttcgaacccaaggcgctcaattctggaggaggtagaggttgaaaggagggccaggattcaactagaatctgaagcgagggaagtgaaccctttcttcaatccagaatatcagtactaggcaaccattttcccttcacttgccaggaatgtgctaggatcggtttggaggaagatgtctggatattaggattgcgttttgcacctactgaatcgatgatattgtgtagatggacaaccataattgttgtagatatgttgtggcgatggaactcatgtaatggtcatgtcgcgaatgtttcatgctgctggaaattatgtattcacactggactctagttatgtgcctcactagtttcttgaaggtagttgttgaactaggtactagtaacgggtgcgcgctttgcgcgcatggtaaacaatatgcaatattgtttttaagttaattattaatgcttgttataattcatatattgccagacgaataaagcaagaataaagcgagagagttttttttaagatgatacagagcatgaaagacagtatagagcacaacagatttatataaaataaaatagagttaagtgagttgtggccgaaggtaatatgtttgttgcgatatttaaagctaccttgttatatttatatgaaatgtctttagaagagttgaacagttatatataattatagaggacattctacaaacttaaaggttgctaataatctgagaaaatcttcggttcttggaagatctggtgtccaacttttctttgatgcgcaggggtccatatttgaacctgtatagttgggaaacaaagaattttaatatcttcgtttatggaagtagaagagaaagg

SEQ ID NO: 210065 - DNA, 1029 bp, Zea Mays
acctgaactattgcgctcgtatcttcttccttgtgcgcgtgcagccgccgtgcttgcgggttgcggccctgcctctctcctctccggctctcccaccggccaccggccaccggccgccaccgtcgccgccatgccttttcgattccagttcccatggctcaagaacccaactacaaacggcggcacctccaacatagacactaaccctagcccccgcttccccaaccccttcctccctatccaagcccatgtcacctccttcctctcctccttcccccgggcgctcccgccgccgccgccctgggcgcgcatcacctcgccagcctccacctccggggccctacctacctctgagatcgaggagcggctcgccggggtgcccgtgtacgcgctcgccaacgccgcccaggagttcgtgcttgtgtcgtccacacgcgtgggagggcaagggggcgagagcgtgagtccaacgcaggcgctcgggctgctctgcttccggaaggaagatgctgacgcgctgctggagcagatggatggcgatatgcgcgccggctctggtgtcgttcctgtcgcgctgaacaaggttatccaaatgaagtcggatggtgtggcgtttagattcctccctgattcatctcaggtggctaatgcaattaagttgatgcaagatgaaggactgtatgccggagagggatttccaggagtgccagtttttcagtcaaggagcctggtcttgatgagtgacaacaagagatatcgtccagtttttttcagaaaggaggacttggataactcactgcaccggacctcccgtgatcagcaaaaacctaatcctgctgttaggtttggtgacactcaggtttcttctttggaagatatcattaaatctatgaaggatagctcctcctcaaaatgggatgatgttgtatttattcctcctggatttgaccttgctactggctcgacaccatcacagctccgcaagtagttcattctttagaaggaaaacaacctacacatcactcttca

SEQ ID NO: 210066 - DNA, 960 bp, Zea Mays
acggcgacggtgtggaaccgtgcaaaccgaggggtaatcgatcgtgggaaagttgaagcgtcgagagcacttttcccttcagtgagtttgccgcgcgcgctgttcctcactccccgcccctcatccacgagaccacgacgaacttgtgctatcgccgccgccctacgcaggttccgaggccttgactggtctcttgtttggccgcgagcatcaccagtaaaatagtcaatgtatgcaaagttggaaccatatatatttctgtagagtaaatgatatagtactagatgaatagtatggataaggatgggatattgtctgatgaaaacttggcaaagatggaatctgctcaaccaaacggacagcgggtagatataataatcattgactctcaaagtgatgaaaataaaattggtgtggaaactagcataagagagagttccttgaaggagcataaggagcctccacgcacaacagtggacaacaatgtgaatgaagaaacatccactactgatgatgattcagaggccaattcatacgagttctttgttcgagaatcagataatgaacaagcttcagcatctgaggaaggcactgaggtacctctgactgaggaagaagttgaagaattggttgttgaattccttgaagtcgagagcaaagcagctcaagcacaaagagtcacttgaaaaaagagtcactggacaaaattgaaactgaagtaagattggagttatctgaaaggctttcaaggggatgagtgtgcactgatatattgctttaatttaaatagttagaatcagctgtgtcaactgagatggagcaattccagatgcaatgggaaaatgaacttgatgatctagagatccgtagttctattcttctggtaatgttttcccccgtaatttatgtgtgtccatgttacatttactaactgccatttccccttgtttctcagatcga

SEQ ID NO: 210067 - DNA, 2090 bp, Zea Mays
caccgaatcgaaggccaacacggcaactctcgcacagagaagaggcaaggagagagagagagagagagagcagccagtcgtcgaaggctcgtagccctagaagctccaatggcggactccgaagacgcgccgccagccgtgcaccgccgcccaccgcgccccgctcgcggtgctgctgcagcccagggcttcgcggccgcgttgcgccgccggctgagatccggcgctgcggtggcggcacgcgccagctttgccgcagactccggggacgagtctggccccggcgagccctcttcgtctcgccgccgcgacaacagcgggggcgcctcgtccgccgccggcggccgggccggggcaggggacttctccgcgttcaccttccgcgccgcggcgcctgtccaccggaaagccaaggagagccctctgagctccgacgccatcttcaagcagagtcatgcaggccttttcaacctatgtattgttgttctggttgcggtgaatagcaggctcattattgagaacctgatgaagtatggcttattaataagatctggcttttggtttaatgctacatcattgcgagactggccactgctaatgtgttgccttagtctacccatatttccccttggtgcatttgcagtcgaaaagttggcattcaacaatctcattagtgatcctgctactacctgttttcacatcctttttacaacatttgaaattgtatatccagtgctcgtgattcttaagtgtgattctgcagttttatcaggctttgtgttgatgtttattgcctgcattgtttggctgaagcttgtatcttttgcacatacaaaccatgatataagaaaactgatcacaagcggcaagaaggttgataatgaactgaccgcggctggcatagataatttacaagctccaactcttgggagtctaacatacttcatgatggctccgacactctgttatcagccaagttatcctcgaacaccttatgttagaaaaggttggctggtccgtcaagttattctatacttgatatttactggtctccaaggattcattattgagcaatacataaatcctattgttgtgaactctcaacatccattgatgggaggattactgaatgctgtagagactgttttgaagctctcattaccaaatgtctacctgtggctttgcatgttttattgccttttccatctgtggttaaacatacttgctgagattcttcgatttggtgaccgagaattctacaaagactggtggaatgcaaagacaattgatgagcctgtgcataaatggattgttcgtcatatatatttcccttgcatgcgaaatggtatatcaaaggaagttgctgtttttatatcgttctttgtttctgctgtacttcatgagttatgtgttgctgttccctgccacatactcaagttctgggctttcttaggaatcatgcttcagattcccctcatcatattgacatcatacctcaaaaataaattcagtgacacaatggttggcaatatgatcttttggttttttttctgcatatacgggcagccaatgtgtgttctattgtattaccatgatgtgatgaaccggactgagaaggcaaaataaccatctgtagatcttttttggtgtttcatttcttccatcatggaaactgaaagcaataatctgtgcacacagtaaaccagcatcgtgtcttccagttttttttgttgttgttggaatctatcctagatctttatcatgtgtatggtggataacctcatgtcaccatcgtatctgtatacaataagcctaaatcagctgacgttctatatgtaaattagtaaatgtaatgactaattagtgcccccctttctgcactaccagatctacttttctcgtaatatttaatattaaaacaatcacaccacacattctactgcctggtgatgatgttatataacatttggtatcacgagcggaatctaagcatgtctgtaatctgatatgtagtagacctgtgatgccctcactctgtttgattttgaatataaggattcgtttggatgcaattttgagttttatgagag

SEQ ID NO: 210068 - DNA, 2127 bp, Zea Mays
taaaaagctcacgatacgtaacacatcacccgccaccgtcgcctcgccgtcgcctcgtccacaccgaatcgaaggccaacacggcaactctcgcacagagaagaggcaaggagagagagagagagagagagcagccagtcgtcgaaggctcgtagccctagaagctccaatggcggactccgaagacgcgccgccagccgtgcaccgccgcccaccgcgccccgctcgcggtgctgctgcagcccagggcttcgcggccgcgttgcgccgccggctgagatccggcgctgcggtggcggcacgcgccagctttgccgcagactccggggacgagtctggccccggcgagccctcttcgtctcgccgccgcgacaacagcgggggcgcctcgtccgccgccggcggccgggccggggcaggggacttctccgcgttcaccttccgcgccgcggcgcctgtccaccggaaagccaaggagagccctctgagctccgacgccatcttcaagcagagtcatgcaggccttttcaacctatgtattgttgttctggttgcggtgaatagcaggctcattattgagaacctgatgaagtatggcttattaataagatctggcttttggtttaatgctacatcattgcgagactggccactgctaatgtgttgccttagtctacccatatttccccttggtgcatttgcagtcgaaaagttggcattcaacaatctcattagtgatcctgctactacctgttttcacatcctttttacaacatttgaaattgtatatccagtgctcgtgattcttaagtgtgattctgcagttttatcaggctttgtgttgatgtttattgcctgcattgtttggctgaagcttgtatcttttgcacatacaaaccatgatataagaaaactgatcacaagcggcaagaaggttgataatgaactgaccgcggctggcatagataatttacaagctccaactcttgggagtctaacatacttcatgatggctccgacactctgttatcagccaagttatcctcgaacaccttatgttagaaaaggttggctggtccgtcaagttattctatacttgatatttactggtctccaaggattcattattgagcaatacataaatcctattgttgtgaactctcaacatccattgatgggaggattactgaatgctgtagagactgttttgaagctctcattaccaaatgtctacctgtggctttgcatgttttattgccttttccatctgtggttaaacatacttgctgagattcttcgatttggtgaccgagaattctacaaagactggtggaatgcaaagacaattgatgagtactggagaaaatggaacatgcctgtgcataaatggattgttcgtcatatatatttcccttgcatgcgaaatggtatatcaaaggaagttgctgtttttatatcgttctttgtttctgctgtacttcatgagttatgtgttgctgttccctgccacatactcaagttctgggctttcttaggaatcatgcttcagattcccctcatcatattgacatcatacctcaaaaataaattcagtgacacaatgccaatgtgtgttctattgtattaccatgatgtgatgaaccggactgagaaggcaaaataaccatctgtagatcttttttggtgtttcatttcttccatcatggaaactgaaagcaataatctgtgcacacagtaaaccagcatcgtgtcttccagttttttttgttgttgttggaatctatcctagatctttatcatgtgtatggtggataacctcatgtcaccatcgtatctgtatacaataagcctaaatcagctgacgttctatatgtaaattagtaaatgtaatgactaattagtgcccccctttctgcactaccagatctacttttctcgtaatatttaatattaaaacaatcacaccacacattctactgcctggtgatgatgttatataacatttggtatcacgagcggaatctaagcatgtctgtaatctgatatgtagtagacctgtgatgccctcactctgtttgattttgaatataaggattcgtttggatgcaattttgagttttatgagag

SEQ ID NO: 210069 - DNA, 955 bp, Zea Mays
cgacggaagaataaaatcggaagaacagattgtggatcttgtaaggaaagctatgccccttgcactgacacctgagaatgatccggggaaggaagagctcaagcagctccaggtgcagttggaagacatcaacaagcttgcacacaagcaggtccggcgcatcctctggtctggtctgggtttcttgatcacccaggtgggcctcttcttcaggctcacgttctgggagttctcctgggacgtcatggagcccatcacgttcttcacgaccacgacaggcctggttgtgggatacgcatacttcctcatcacatcaagggacccgacctaccgagacttcatggagaggatgtttgagtctcggcagaggaagctgatccagaggcagaacttcaacctggacaagtaccttgagctccagaggcgctgcaaggatcccctggagaaggcctgcggcacgaccaaccctgacacggctcatcttcatgagctctccgttcacaaatgacaaagaattcaccattgcttcactactcattccattctatgggagaaatggtccctgctagcaatagtaagcggtgtttcagataccttttccacggtcttctcctatgcaaatgtgtaggtcagtataatttttttgggggtaaatttgtagcgatgctgaaacacaagctagttaaaagccaaactcatccgcatggctggatgcttactcactacccagaaccgcgcgattctgtggtctctactaatatactgtttcattgtgcctaattagctttattatgaaaactcatttgttggtggctaatattgtcctaattagagacttgtatttgatcacgatcacgtgcctttagaaatgtatacttggaagcggatatgagggttcatagctaatttgagatgcactaaggggctgtttggatgcaacaggctaaaattgttg

SEQ ID NO: 210070 - DNA, 1782 bp, Zea Mays
gtctgcttctaattggtgccttttctttctttttttcctgctttgctctgtcctctcgtacacgacgggtcattggctcgttgcagacttgcagtggtgaggccaaggccattgtccctttgcactgcctctatcctagtatcctgtttccattatgtcgtgtggcttgaggcacaggatgcattgtccattacctttgggcagaactaccaataaaaaaactcggttgggagggaaatggaaagactgaccacctgatattatattaagaagagaccgaaacatattttcgatcgagaaaaccctcaaactctggccatccatcactaacgggcagatcattgcccactctgcaacggccagtaggcgggtggcgcgcaggatatcgatccccgagagcgggcggagcacaacaggttttttttaaccaaacctgaaattcgtcagagagggtgatcgacctgggacccggaggtactgctcggaaaccttaaccattatgttagaggccctttcgcaccgaactaccagtctaccggacaccttctataatgcggtagcaaaatttaaatagtgagtgtctggttggaaggacaactaacttcaacgttggttgcttttcaccatgcttgtcctttgttttttttaatagtctcataatagttatgtgttactctcactttattcagtacgtgatgttcaatttggagccttattgcaagctgaactatggggaataccagcaaattttgtaactaccattcctaattggagttgatggtgctggatgtaaattagctattgtctactgaatatttggaacaaaagcatgaaacttcacatagaataagccacattgtggatcttgtaaggaaagctatgccccttgcactgacacctgagaatgatccggggaaggaagagctcaagcagctccaggtgcagttggaagacatcaacaagcttgcacacaagcaggtccggcgcatcctctggtctggtctgggtttcttgatcacccaggtgggcctcttcttcaggctcacgttctgggagttctcctgggacgtcatggagcccatcacgttcttcacgaccacgacaggcctggttgtgggatacgcatacttcctcatcacatcaagggacccgacctaccgagacttcatggagaggatgtttgagtctcggcagaggaagctgatccagaggcagaacttcaacctggacaagtaccttgagctccagaggcgctgcaaggatcccctggagaaggcctgcggcacgaccaaccctgacacggctcatcttcatgagctctccgttcacaaatgacaaagaattcaccattgcttcactactcattccattctatgggagaaatggtccctgctagcaatagtaagcggtgtttcagataccttttccacggtcttctcctatgcaaatgtgtaggtcagtataatttttttgggggtaaatttgtagcgatgctgaaacacaagctagttaaaagccaaactcatccgcatggctggatgcttactcactacccagaaccgcgcgattctgtggtctctactaatatactgtttcattgtgcctaattagctttattatgaaaactcatttgttggtggctaatattgtcctaattagagacttgtatttgatcacgatcacgtgcctttagaaatgtatacttggaagcggatatgagggttcatagctaatttgagatgcactaaggggctgtttggatgcaacaggctaaaattgttg

SEQ ID NO: 210071 - DNA, 687 bp, Zea Mays
aagcatgaaacttcacatagaataagccacattgtggatcttgtaaggaaagctatgccccttgcactgacacctgagaatgatccggggaaggaagagctcaagcagctccagaggcagaacttcaacctggacaagtaccttgagctccagaggcgctgcaaggatcccctggagaaggcctgcggcacgaccaaccctgacacggctcatcttcatgagctctccgttcacaaatgacaaagaattcaccattgcttcactactcattccattctatgggagaaatggtccctgctagcaatagtaagcggtgtttcagataccttttccacggtcttctcctatgcaaatgtgtaggtcagtataatttttttgggggtaaatttgtagcgatgctgaaacacaagctagttaaaagccaaactcatccgcatggctggatgcttactcactacccagaaccgcgcgattctgtggtctctactaatatactgtttcattgtgcctaattagctttattatgaaaactcatttgttggtggctaatattgtcctaattagagacttgtatttgatcacgatcacgtgcctttagaaatgtatacttggaagcggatatgagggttcatagctaatttgagatgcactaaggggctgtttggatgcaacaggctaaaattgttg

SEQ ID NO: 210072 - DNA, 2077 bp, Zea Mays
aataaataaaaccccaaaaagaaatatccaaggccgcgccgtgcgcgcaatccccctcgctcgcaccatggcgctgcagctccagctgccgcggccgctcgccgccgcacggccctctatcctcctcccttccccagcccatggtgcctccgcttccgcgaccccccttcacgcccgcgcaggcggcgttgcgttttcgctccagaccaacgtgcgcctcctcaagcccaaccgccgcgtccgccgctctcgggacccctactacgatctcgacgaggacgacgaggaggaggcggagttcgacgaggacgatgaagacgacgaggagggctacgagagcgatgatgacttgtcgggtttggaatatcctggtgtactttattcaaacagccctcgtgcttcaagcaagaaaccaggtatcttaagtgttatgctaaatctatttagaaacagtggtcacttcgtgcttaaactctaatactccaggactccaaactccagtggtaaaagaaaactgggaaggaagacaaaccaaaacccatgacaaatacggtagtccaggaagaagtaagtccatgcatcctaggagtaaagtgggacgatcatcaacagatcttaagaacatggacagagaagttgagttgaaaaatgcaagtatctctcgaagtctgttccagaaactacaagaagaatatgacttcgatgacaaatggttaccactgattgattacttgtgcacctttggactaaaagagtctcattttacttacatctatgagagacacatggcctgctttcaaatcagtcaggcttcagcagaagaaaggttggatttcctgctaaatgctggggttaaaagcaaagatatgaaaaggatactggtgaggcagccacagattctggaatacacccttggcaatctgaaatctcatgttgattttctcgtgagcattggagttccaaatagacgaatagggcaaattatttctgctgctccttcgatgttctcttacagtgtggagcagtctctgaagccaacagtaaggtatctgattgaggaagtaggtattgaggagagtgatgtggggaaagtagtgcagctaagcccacagattctggtgcagaaaattgatagtgcatggaaatctcgatcgcttttcctgtcaaaagaactggatgctcccaaacatagcattgttaagatggtcacaaaacaccctcagctgcttcactacagcattgaagatggaatcttacctcgactaaatttcctgagaagcattggtatgagaaactctgacattctcaaagtattgacaagtcttactcaggtgttatctttgtcattggaggacaatctcaagccaaagtatctttacttggtcaatgacctcaagaatgaggtccaatccttaacgaaatatcctatgtacctgagtttgtctcttgatcaaagaatccgtccccgccatcgttttctggtttccttgaagaaagctccaaagggcccatttcctctgagctcctttgtgcccacagatgagcgtttttgccagaggtgggctgggactagcttggaggcataccatacattcagacagaggttgctgctaacaagtttcgcagagaagtctggaaggaaaacactagtctcaagacggtagatgcctaggtggtgggagtttgtttctcttgagcccacgctcctaacaggtttatactgcatcattaactatagcatatacttatcgtccatatcacctccctaatggtgaaaagtcttcaccgaattccctcaatcagctgcaaatggatgacaatctaagagaaatgcattattgccagtcgccagaatggttggatggacacttggttacctagctctaggagtacctcgccttgacggctaaaactgttgtgcagtcaagctttcggtggaatcgccatgcaaccaaactaccaagtcataaaaagtttccaaaaaaaatatagagggaggttccagttactgaagttatatgaccagtagggaggtcgagcctcgtctactgccttcgtgcctggttgtagagacaaa

SEQ ID NO: 210073 - DNA, 2273 bp, Zea Mays
aaaaccccaaaaagaaatatccaaggccgcgccgtgcgcgcaatccccctcgctcgcaccatggcgctgcagctccagctgccgcggccgctcgccgccgcacggccctctatcctcctcccttccccagcccatggtgcctccgcttccgcgaccccccttcacgcccgcgcaggcggcgttgcgttttcgctccagaccaacgtgcgcctcctcaagcccaaccgccgcgtccgccgctctcgggacccctactacgatctcgacgaggacgacgaggaggaggcggagttcgacgaggacgatgaagacgacgaggagggctacgagagcgatgatgacttgtcgggtttggaatatcctggtgtactttattcaaacagccctcgtgcttcaagcaagaaaccagtggtaaaagaaaactgggaaggaagacaaaccaaaacccatgacaaatacggtagtccaggaagaagtaagtccatgcatcctaggagtaaagtgggacgatcatcaacagatcttaagaacatggacagagaagttgagttgaaaaatgcaagtatctctcgaagtctgttccagaaactacaagaagaatatgacttcgatgacaaatggttaccactgattgattacttgtgcacctttggactaaaagagtctcattttacttacatctatgagagacacatggcctgctttcaaatcagtcaggcttcagcagaagaaaggttggatttcctgctaaatgctggggttaaaagcaaagatatgaaaaggatactggtgaggcagccacagattctggaatacacccttggcaatctgaaatctcatgttgattttctcgtgagcattggagttccaaatagacgaatagggcaaattatttctgctgctccttcgatgttctcttacagtgtggagcagtctctgaagccaacagtaaggtatctgattgaggaagtaggtattgaggagagtgatgtggggaaagtagtgcagctaagcccacagattctggtgcagaaaattgatagtgcatggaaatctcgatcgcttttcctgtcaaaagaactggatgctcccaaacatagcattgttaagatggtcacaaaacaccctcagctgcttcactacagcattgaagatggaatcttacctcgactaaatttcctgagaagcattggtatgagaaactctgacattctcaaagtattgacaagtcttactcaggtgttatctttgtcattggaggacaatctcaagccaaagtatctttacttggtcaatgacctcaagaatgaggtccaatccttaacgaaatatcctatgtacctgagtttgtctcttgatcaaagaatccgtccccgccatcgttttctggtttccttgaagaaagctccaaagggcccatttcctctgagctcctttgtgcccacagatgagcgtttttgccagaggtgggctgggactagcttggaggcataccatacattcagacagaggttgctgctaacaagtttcgcagagaagtctggaaggaaaacactagtctcaagacggtagatgcctaggtggtgggagtttgtttctcttgagcccacgctcctaacaggtttatactgcatcattaactatagcatatacttatcgtccatatcacctccctaatggtgaaaagtcttcaccgaattccctcaatcagctgcaaatggatgacaatctaagagaaatgcattattgccagtcgccagaatggttggatggacacttggttacctagctctaggagtacctcgccttgacggctaaaactgttgtgcagtcaagctttcggtggaatcgccatgcaaccaaactaccaagtcataaaaagtttccaaaaaaaatatagaggtgaagcttgattgcacaacgaattttcccagcagttttttcccgtcttgattgctagttttactattaagtacagcttctgaacaaaatgctacgctagaaacatgtagcctaactgtaagagtgccatcacaggcagccttgtgtactgctgtaattctgcaatgccttttgacattgggggtttcctttttttgtgaaggcttgctatcatgaatcatacacggcttgtacgtcctaccatttcatggtggttgggttagaactctctgtgatggactgcaagtttttttttcttgtcgttttgtggcctaatcatacgcaatagcgtagttgggatctatcgattaaaaccagtccttggccatctg

SEQ ID NO: 210074 - DNA, 2521 bp, Zea Mays
aaaaccccaaaaagaaatatccaaggccgcgccgtgcgcgcaatccccctcgctcgcaccatggcgctgcagctccagctgccgcggccgctcgccgccgcacggccctctatcctcctcccttccccagcccatggtgcctccgcttccgcgaccccccttcacgcccgcgcaggcggcgttgcgttttcgctccagaccaacgtgcgcctcctcaagcccaaccgccgcgtccgccgctctcgggacccctactacgatctcgacgaggacgacgaggaggaggcggagttcgacgaggacgatgaagacgacgaggagggctacgagagcgatgatgacttgtcgggtttggaatatcctggtgtactttattcaaacagccctcgtgcttcaagcaagaaaccagtggtaaaagaaaactgggaaggaagacaaaccaaaacccatgacaaatacggtagtccaggaagaagtaagtccatgcatcctaggagtaaagtgggacgatcatcaacagatcttaagaacatggacagagaagttgagttgaaaaatgcaagtatctctcgaagtctgttccagaaactacaagaagaatatgacttcgatgacaaatggttaccactgattgattacttgtgcacctttggactaaaagagtctcattttacttacatctatgagagacacatggcctgctttcaaatcagtcaggcttcagcagaagaaaggttggatttcctgctaaatgctggggttaaaagcaaagatatgaaaaggatactggtgaggcagccacagattctggaatacacccttggcaatctgaaatctcatgttgattttctcgtgagcattggagttccaaatagacgaatagggcaaattatttctgctgctccttcgatgttctcttacagtgtggagcagtctctgaagccaacagtaaggtatctgattgaggaagtaggtattgaggagagtgatgtggggaaagtagtgcagctaagcccacagattctggtgcagaaaattgatagtgcatggaaatctcgatcgcttttcctgtcaaaagaactggatgctcccaaacatagcattgttaagatggtcacaaaacaccctcagctgcttcactacagcattgaagatggaatcttacctcgactaaatttcctgagaagcattggtatgagaaactctgacattctcaaagtattgacaagtcttactcaggtgttatctttgtcattggaggacaatctcaagccaaagtatctttacttggtcaatgacctcaagaatgaggtccaatccttaacgaaatatcctatgtacctgagtttgtctcttgatcaaagaatccgtccccgccatcgttttctggtttccttgaagaaagctccaaagggcccatttcctctgagctcctttgtgcccacagatgagcgtttttgccagaggtgggctgggactagcttggaggcataccatacattcagacagaggttgctgctaacaagtttcgcagagaagtctggaaggaaaacactagtctcaagacggtagatgcctaggtggtgggagtttgtttctcttgagcccacgctcctaacaggtttatactgcatcattaactatagcatatacttatcgtccatatcacctccctaatggtgaaaagtcttcaccgaattccctcaatcagctgcaaatggatgacaatctaagagaaatgcattattgccagtcgccagaatggttggatggacacttggttacctagctctaggagtacctcgccttgacggctaaaactgttgtgcagtcaagctttcggtggaatcgccatgcaaccaaactaccaagtcataaaaagtttccaaaaaaaatatagaggtactttattatttattctatcaatatactagattttaagttctaattcatcatatgttaagagattaaaaaagagaaaatttatcattttttaatcctttatattggatataatttttctcttttttatttcccttgacgaggataagttagaatttaaattttgatatattggtagagcagataataaaatatctatatctatggtttttttagatttttcatgacttttggtagtttaattgcacaggaagcttgattgcacaacgaattttcccagcagttttttcccgtcttgattgctagttttactattaagtacagcttctgaacaaaatgctacgctagaaacatgtagcctaactgtaagagtgccatcacaggcagccttgtgtactgctgtaattctgcaatgccttttgacattgggggtttcctttttttgtgaaggcttgctatcatgaatcatacacggcttgtacgtcctaccatttcatggtggttgggttagaactctctgtgatggactgcaagtttttttttcttgtcgttttgtggcctaatcatacgcaatagcgtagttgggatctatcgattaaaaccagtccttggccatctg

SEQ ID NO: 210075 - DNA, 3754 bp, Zea Mays
aaaaccccaaaaagaaatatccaaggccgcgccgtgcgcgcaatccccctcgctcgcaccatggcgctgcagctccagctgccgcggccgctcgccgccgcacggccctctatcctcctcccttccccagcccatggtgcctccgcttccgcgaccccccttcacgcccgcgcaggcggcgttgcgttttcgctccagaccaacgtgcgcctcctcaagcccaaccgccgcgtccgccgctctcgggacccctactacgatctcgacgaggacgacgaggaggaggcggagttcgacgaggacgatgaagacgacgaggagggctacgagagcgatgatgacttgtcgggtttggaatatcctggtgtactttattcaaacagccctcgtgcttcaagcaagaaaccagtggtaaaagaaaactgggaaggaagacaaaccaaaacccatgacaaatacggtagtccaggaagaagtaagtccatgcatcctaggagtaaagtgggacgatcatcaacagatcttaagaacatggacagagaagttgagttgaaaaatgcaagtatctctcgaagtctgttccagaaactacaagaagaatatgacttcgatgacaaatggttaccactgattgattacttgtgcacctttggactaaaagagtctcattttacttacatctatgagagacacatggcctgctttcaaatcagtcaggcttcagcagaagaaaggttggatttcctgctaaatgctggggttaaaagcaaagatatgaaaaggatactggtgaggcagccacagattctggaatacacccttggcaatctgaaatctcatgttgattttctcgtgagcattggagttccaaatagacgaatagggcaaattatttctgctgctccttcgatgttctcttacagtgtggagcagtctctgaagccaacagtaaggtatctgattgaggaagtaggtattgaggagagtgatgtggggaaagtagtgcagctaagcccacagattctggtgcagaaaattgatagtgcatggaaatctcgatcgcttttcctgtcaaaagaactggatgctcccaaacatagcattgttaagatggtcacaaaacaccctcagctgcttcactacagcattgaagatggaatcttacctcgactaaatttcctgagaagcattggtatgagaaactctgacattctcaaagtattgacaagtcttactcaggtgttatctttgtcattggaggacaatctcaagccaaagtatctttacttggtcaatgacctcaagaatgaggtccaatccttaacgaaatatcctatgtacctgagtttgtctcttgatcaaagaatccgtccccgccatcgttttctggtttccttgaagaaagctccaaagggcccatttcctctgagctcctttgtgcccacagatgagcgtttttgccagaggtgggctgggactagcttggaggcataccatacattcagacagaggttgctgctaacaagtttcgcagagaagtctggaaggaaaacactagtctcaagacggtagatgcctaggtggtgggagtttgtttctcttgagcccacgctcctaacagttctgtttggtcttcataaagtagagcactagctagaagacatattcacacgcatcagctatcaaattgcaagcttagaattgacctcaaagttgggacatgcttgtcttaccacaagcaactgatagcttggagttgtagtccggactgtctgcgctggaccagtatggctgacactccaacgtcccgcatggtgcacccctttggcgacgccccaaggcagactcccaagcaattcctgtattctggtaacccgcagcacctctgccatccgtaccagtcagctccggacacccatgtcgtgctccagcgccgttacaccgtgaggtctcagtctcactcaccaaataatgctggttctgaagaccatgagactcacaagcagtacacgctggagtcctcagcggcttctggttgttcaaggcatggttctccctccagccaaagcgtccatgccgggagtggcagccctgtgtctcacgacgacagccactccggctccacgaatggccatggatcacctgtgagcgcgtcgtgtgtcaccggcgaggaccctactgatctcaagcagaaactgaaggatcttgaggctgtaatgctggggacgtctgagactgaccccgagatagtcaacagtctcgagatctccgcggcaaaccaactctcgttggagcccgaggagtgggagcacatggtgagcatgcccagagggaacctgaaggagctgctgattgcctgcgctagggcagtggaacgtaacaacagctacgccattgatctgatgatcacagagctgaggaagatggtttcggtgtccggcgagccgcttgagaggctgggagcctacatggtggaaggtcttgttgccaggctcgcggcctccggcagctcaatctacaaggctttgaagtgtaaggagcccaggagctctgatctcctctcctacatgcacttcctgtatgaggcctgcccctacttcaagttcggctacatgtcagccaacggcgcgatcgcggaggccatcaagggagaggacaggatccatatcatcgacttccacatcgcgcaaggggctcagtgggtctctctcctccaagcccttgcagccaggcctggcgggccaccgttcgtgagggtcaccggcattgatgattcagtctcagcttacgctcgaggcggcggtctggagttggttggcaggaggttgacacatattgctggcctctacaaggtgccctttcagttcgacgcagtcgctatctcaggcagtgaggtggaggaggagcatctgggcgtcgtcccaggcgaagccgtcgccgtcaacttcacccttgagctgcaccacatccccgacgagaccgtgagcacggcgaaccaccgggaccggatcctgaggctggtgaagggcctgtcgcccaaggtgctcacgctggtggagcaggagtccaacaccaacacggcccccttcgcgcagcggttcgcagagacgctggactactacacggccatcttcgagtccatcgacctggcgctgccgagggacgacagggagcggatcaacatcgagcagcactgcctggcccgggagatcgtgaacctggtggcctgcgagggcgaggagcgggtggagcggcacgaggtgttcggcaagtggaaggcgcggctgatgatggccgggttcagcccgtccccgctcagcgcgctggtgaacgccaccatcaagacgctgctgcagagctactcgccggactacaagctcgccgagagggacggcgtgctctacctcggctggaagaacaggcccctgatcgtctcatcggcatggcactagtgttgacttcagagaatgttgacctgatggagaatgtttcttgtaaccttcgaagtacctcttagtggtttagatatgtttggctggtcactggaactatctataggaagcctatggtgatagatactgagttgtagtagaacacatatagcctaaatgcctaatgctgtgatggcagtcactaccagcctagcctagaacaggttgatgatgtgtagtagtaagtttgggtatatgtttcagttaatcagttttgcttgggtgcattctgaagggtggcctcttcaaaaaggacatcaaac

SEQ ID NO: 210076 - DNA, 3023 bp, Zea Mays
gacctattcccccttgtcctagcgcatccgccgcacacgccccgagcggtcaagcctcgctctcgctgccacgtccctgggacgtaacgcgcgtggcagaggcacacacacaaagcagagagcgagacgccgagcagagcttcgttccggtgaccgcctgaccggcgaggagccgccaagatggacgccacgccgatcaccgaagagctgccgcccaacatcacggagcagatgcgcaacgcgacgacgctgcccaaggcgtccagcaccgtggtgtgctactcgcccatgatgataaccaccaacggcatctggcaagggttcaacccgctcgagttctccctcccgctcttcatcctccagacggccgtcatcgtcgtcaccacccgcttgctcgtccttgtgctcaggcccttccgccagccccgcgtcatcgctgagatcctcatagagacctgggcgaccatggtgttcccgatgcgcagcctgctcacgctggagacggtggcgcacctcggcctcctctatttcctcttcctggtcggcctggagatggacatcgacgtgatccggcggtcgggcaagaaggcgctgttcgtcgccttagcgggcatggcgctgccgttctgcatgggcatcgccacgtccttcatcttccggcaccaggtgtcgcggaacgtgcaccaggcgtccttcctcctcttcctcggcgtcgcgctctccgtcacggcgttcccggtgctcgcccgaatcctcgccgagatcaagctgctcggcaccgacctcggccagatcgccatgtccgccgccatcgtcaacgacatgtgcgcgtggatcctgctcgccatcgccatcgccatctcggaggtgagcagcgccgcgctgtcgtccacgtgggtgctcctctccggggcgctcttcgtcctcttctgcttctacgtcgtgcgccccggcatgtggtggctcatccgccgcacccccgagggcgagggcatcagcgacatgcaggtctccctcatcctcaccggcgtcatgctcgccggcgtgtgcaccgacgccatcggcatacactctgtcttcggcgccttcgtgtacgggctggtcattccgaccgggccgctcggcgtggtgctgatcgagaagatcgaggacttcgtcaccggcctgctcctgccgctcttcttcgccatcagcggcctgcgcaccaacgtccggaagattagggaccccgtcactgttggccttctcgtgctcgtgttcgtcatggccagctttgcaaagatcatgggcaccatcatcatcgccgcgctctacaccatgccgtttcgcgagggcatcgccctcggcttcctcatgaacaccaggggcctcgtggaaatgatcgtgctcaacattggaagagacaaagaggtgttggatgacgagtcgtttgcggtgatggtgctggtgtcggtggccatgacaaccctggtgacgccggtggtgaccagcgtgtaccggccgtcccggcgcctcgtcggctacaagcggcggaacctgcagcgcatccggcacgacagcgagctccgcatgctggcctgcgtgcacaccacccgcaacgtgccgtccgtgctgtcgctgctcgagctctcgaacccaaacaagcgctcaccgatcttcatctacgcgctccacctcgtcgagctcacgggacgtgcgtccaacatgctcgccgccgccgcggcctccgcctccaagcagagccggggcggatcgggatcctccctgccccccgtgacggagcacatcttcaacgccttcgagaactacgagaggctcactggaggcgtgtccatccagacgctcgcggcggtgtccccgtaccaaagcatgcacgaggacgtgtccgtgctcgccgaggacaagcacgtctcgctaatcgtggtcccgttccacaagcagcagacggtggacggcggcatggagccgatcaacccgcacgtccgcggcttcaacgagagcctcctctccacgtccccgtgctccgtcgccatcctcgtcgaccgcgggctcagcgccgcggcggcgcggatggccaccgagcaccacgtagcgctcttcttcttcggcgggcccgacgaccgcgaggcgctcgcgtacgcgtggaggatggtcgagcaccccggcgtcaccctcagcatcgtgcggttcgtcccgccggactaccgggcgcggaccgtctcttgctcggcttaccgcccgccggccgactcggactcgcgcgccatcaccatcaacacggagggcaagagcgagctggagatggacgaggactacctcagcgagttccgggcgcgcaaccacggcaacatcgccatcacctacgccaccaggacggtggccaacagcgaggaaacggtggcggccatacgggccatggacaacaacctgcaagagctgtacatcgtgggccggcgccccggcgaggtcaggtcgccgatgacggcggcgctggaggagtggatggagaacccggagctggggcccatcggcgacatgctcgtgtcgtccgacttctccatgtcagtgtcggtgctggtggtgcagcagtacgtggtggccgcagcgcccgcccccgtccccgcgccggcagcgagcagcgaccccgtgcgccagtacgtgagcaacgctaaccaacgggcggcggcggcggcgtccggggcataccggacgagtgcggcgtcagcagccaatagcaggtggtctggctctggtggcaccgtaggcttctgaggatcgtgtacttcctagcttgttaaggcatgtaggtacttcatcgttttgattcaggaggttgtttttcattgtttctgtagtctatgtatactgctgtattcgattttcgatctggcaggcttatatgaccagtgccatgtatggggttcgtgtctgttttgttgcactgccatggactgatatgtgacaaccaaaaggacagctaacttctctccgttttggcaatgatattctcttatataacaaga

SEQ ID NO: 210077 - DNA, 2018 bp, Zea Mays
ggattttgggatcttctcctgcaataaggttgaaccgtctcccacaactggtactctaagcatggctgcaatcatcaacaagagcactcatatggacataatgccttcacctagggataattcagctggtagtggccaggaagatggaggttctcgggattttgaattcaagcctcatctcaattctcatttggcggctccttcagtcaacaatcaaaaccatcatgacactatgcaaaaatatagctcaaatcataccacaccatctagcaatttgaagactgaaaataaacctctctgttcacgggaatcgagtcacacagcacatgcttcaattgctccaaaccaaactgtttcgatagtttgtccgtctgacaacatgcctgctgaagttggtacaatggagatgcaccagatcaatagttctgaaaatgctacccaggagacacaaattgaaaatgtagctgaaaaatcagcagaggatggctacaattggcgtaaatatggacagaagcatgtcaagggaagtgaaaatcctagaagttattacaagtgcacgcatcctaattgtgaagttaaaaagctattagagcgttcgcttaatggccaagttactgaagttgtttataaagggcgtcataatcattctaagccccaaccaaatagaaggttagctgctggtgcagttccttcaagccagggtgaagaaagatacgatggtgtggcaactattgaagacaagccttcaaatatttattccaacctctgtaaccaagtacattcagctggcatgattgacactgttccgggtccagctagtgatgatgatgttgatgctggaggtggaagatcctaccctggggatgatgctaatgatgatgatttggactcgaaacgcaggaaaatggaatctactggtatcgacgccgctttgatgggtaaaccaaatcgtgagcctcgtgttgttgtacaaactgttagtgaagttgatatcttggacgatgggtatcgttggcgcaaatatgggcagaaagtagtgaaaggaaatcccaacccacggagttactacaagtgcacaaatacaggatgcccggtcaggaagcatgttgagagagcatcacatgacccgaagtcggtgatcacaacatatgaaggaaaacataaccatgaagtccctgtttccaggaatgcaagccatgagatgtccacagctcccatgaagcctgctgtgcatcctattaagagcaacatgccaggccttggtggcatgatgagagcatgtgatgccagggccttcaccaatcaatattctcaggcagctgaaagtgacaccatcagtcttgaccttggtgtaggcatcagccctacccacagcgatgcaacaaaccaaatgcagccttcagttccagaatctatgcagtatcaaatgcaacacatggctcctgtatatggtagcatgggacttccaggaatgcctgtgacagcagtacctggaaattcggctagcagcatatacggttctagagaagaaaacggaaatgaagggtttactttcaaagccgcaccattggaccgatcaactaacttatgttacagtagtgctggtaacttagtgatgggtccatgagtgtctctgctgatggtcatacctccatgaagcacatattaccgtaatcatgaagattgcttcagaaggtgctctactgtgtatcgtcatccacacataattgaatcggaggtggtcaaggtatacctgggagctgcagcgttgacacatgagccttttgctgtttggatgtacacttgctgtatgtgacgctgcagctcaacattcgttgtacagcaaaccagttatgattaattagattctgataatttggttatgtaaacttctttctgtactggaatatgggatagaaccaaagatccgtctggtggcaaagctttgttatgccctgcatatgaacgatgccagtttgatatccatatgaaatgaaatatatcatttcagcaaactg

SEQ ID NO: 210078 - DNA, 2044 bp, Zea Mays
cgcaggcactagtggcgtggcgcgccgcgacagtgtcactagtagcggtggaccggtggtctctcccctccccggctccccctcgtccgtctccctcccacccttccgcgctcccgccgtttcccaggggccagggccgacccacaccgcgccgggatccctagatgcggccggggcggcgccgcgagccgtgagcgcggttcctgccgtggcgatgggtttccgcgccgcctccgccgccgccgctgccgcggtggccgtgtttgcggcggcggggctggcggtcaccgccgcttcctccggtgactcgctcgccgacctcggaggcgcggcgagggagatcgaaagcgcaccagaggtcaagaatctgggaccatgggcaaaggggctgctgaaaggcatgccgcaggcagcggcgggaccggcagccatggcgcctgttgcgaagtatccgctggttctggcagaggaccggacgcggcggccggatgttctcaggcatctcaaagtgtatgaaggagggtggaacgtcaccaataagcactactgggcgagctgggtgcattctccttctgtatgggcagagtaaattccatgaagaagctacgcggaccgtcgattttgttgtgaaccaatctgatttcactattcagacactaaggaatgttacagaatacttgtcatttgcacagacgatcactgtggcagcactctatcttccatcagaagttcaaggtcaaattgacagtttgaaaggggatttgaacaaagcagctgacacaatatctgtgaagacagcagaaaattacaaaatgataagaaaagttctccatatcatgtcagttgtattgatttgcatagccgtggtgctgcttgttcttgtgttccttggatacggcctagagaagtatggaccgagatatacagtttacatatttgttaccttatgctggaaagctgtggcggctctctttatccttctagggattttcctgatactaaacagcgctgcgcaggatacctgcgaagcaatggaccagtgggcccagcaccctcaggcagagacagctctgagcagcatccttccgtgtgtggatgagagcacgaccaaccgaacgctgtaccagagcaaagaggtggtggtgaggcttgtggggatagtgaacagagctatctccgctctttcaaatcgaaggccgcatcacaagcacccaggacagttcatgccttacctgtgctcgccctacgactcaaacctcaacgaccgaccgtgcaagtatagggaggccacgtttgaaaacgcgacgacagcatggttgaactacacgtgcatggctcaagacacggacttgtgctcaggcaacaagaccttaacctacgacatctacggccaactcgtgctggctgcaaacgtgagctacgcgctgtaccactacgcccccttcctgctgaacctccaggactgcaagttcgtccgggccaccttcagcgccatcgcctcgcggtactgccctcctctggggcacgacctcgtgctggtctccgcgggtctggcgctcattgcctcggcctttgttctctgcctcgtctggatgctcttcgcggaccgcccccgaagggaggaggtgtccgatctggcgtcggggtcgaggatcgcgccggtagacagctctccgtcgtagaagcaagcaagcaagcaagcggcgcaacgggatgtctatgactatgagtgaggctgcttggtcgcatggtgaccagagtttagtacagttcccttccatggctatgtaaaatagtttcggtatagcgagttccgggagacgtcgttgaagtgcggagaggagggggagaaaccggaagcacttcgggtgggggacaaaaggccccattttgcagtggagagagttaggtggaaacgagtgctctgcttccttctatcgtatgtcagatcgatgcacccatggtgtatgttgctgcaaggacaaacggaataatcgatcagggttcccatgaccaatcacgcggcgaaagacagccgtgttcg

SEQ ID NO: 210079 - DNA, 1961 bp, Zea Mays
cgcaggcactagtggcgtggcgcgccgcgacagtgtcactagtagcggtggaccggtggtctctcccctccccggctccccctcgtccgtctccctcccacccttccgcgctcccgccgtttcccaggggccagggccgacccacaccgcgccgggatccctagatgcggccggggcggcgccgcgagccgtgagcgcggttcctgccgtggcgatgggtttccgcgccgcctccgccgccgccgctgccgcggtggccgtgtttgcggcggcggggctggcggtcaccgccgcttcctccggtgactcgctcgccgacctcggaggcgcggcgagggagatcgaaagcgcaccagtctgtttcattcacaggtgtttctggatttcttctcggtgctttgtggttcatatttttcgggatagctgtggctggacgatgctattttggaacaagaatgtccaaaagaaaggtttcttatgcagatgtagtaggtcctgtgttgcttggggtcttcacacttgctataatagctgggtgcattctccttctgtatgggcagagtaaattccatgaagaagctacgcggaccgtcgattttgttgtgaaccaatctgatttcactattcagacactaaggaatgttacagaatacttgtcatttgcacagacgatcactgtggcagcactctatcttccatcagaagttcaaggtcaaattgacagtttgaaaggggatttgaacaaagcagctgacacaatatctgtgaagacagcagaaaattacaaaatgataagaaaagttctccatatcatgcctagagaagtatggaccgagatatacagtttacatatttgttaccttatgctggaaagctgtggcggctctctttatccttctagggattttcctgatactaaacagcgctgcgcaggatacctgcgaagcaatggaccagtgggcccagcaccctcaggcagagacagctctgagcagcatccttccgtgtgtggatgagagcacgaccaaccgaacgctgtaccagagcaaagaggtggtggtgaggcttgtggggatagtgaacagagctatctccgctctttcaaatcgaaggccgcatcacaagcacccaggacagttcatgccttacctgtgctcgccctacgactcaaacctcaacgaccgaccgtgcaagtatagggaggccacgtttgaaaacgcgacgacagcatggttgaactacacgtgcatggctcaagacacggacttgtgctcaggcaacaagaccttaacctacgacatctacggccaactcgtgctggctgcaaacgtgagctacgcgctgtaccactacgcccccttcctgctgaacctccaggactgcaagttcgtccgggccaccttcagcgccatcgcctcgcggtactgccctcctctggggcacgacctcgtgctggtctccgcgggtctggcgctcattgcctcggcctttgttctctgcctcgtctggatgctcttcgcggaccgcccccgaagggaggaggtgtccgatctggcgtcggggtcgaggatcgcgccggtagacagctctccgtcgtagaagcaagcaagcaagcaagcggcgcaacgggatgtctatgactatgagtgaggctgcttggtcgcatggtgaccagagtttagtacagttcccttccatggctatgtaaaatagtttcggtatagcgagttccgggagacgtcgttgaagtgcggagaggagggggagaaaccggaagcacttcgggtgggggacaaaaggccccattttgcagtggagagagttaggtggaaacgagtgctctgcttccttctatcgtatgtcagatcgatgcacccatggtgtatgttgctgcaaggacaaacggaataatcgatcagggttcccatgaccaatcacgcggcgaaagacagccgtgttcg

SEQ ID NO: 210080 - DNA, 1904 bp, Zea Mays
ggcgatcccggccgtcagccagctcattcgatggataggcgtgaggtcaagaatctgggaccatgggcaaaggggctgctgaaaggcatgccgcaggcagcggcgggaccggcagccatggcgcctgttgcgaagtatccgctggttctggcagaggaccggacgcggcggccggatgttctcaggcatctcaaagtgtatgaaggagggtggaacgtcaccaataagcactactgggcgtctgtttcattcacaggtgtttctggatttcttctcggtgctttgtggttcatatttttcgggatagctgtggctggacgatgctattttggaacaagaatgtccaaaagaaaggtttcttatgcagatgtagtaggtcctgtgttgcttggggtcttcacacttgctataatagctgggtgcattctccttctgtatgggcagagtaaattccatgaagaagctacgcggaccgtcgattttgttgtgaaccaatctgatttcactattcagacactaaggaatgttacagaatacttgtcatttgcacagacgatcactgtggcagcactctatcttccatcagaagttcaaggtcaaattgacagtttgaaaggggatttgaacaaagcagctgacacaatatctgtgaagacagcagaaaattacaaaatgataagaaaagttctccatatcatgtcagttgtattgatttgcatagccgtggtgctgcttgttcttgtgttccttggatacggcctagagaagtatggaccgagatatacagtttacatatttgttaccttatgctggaaagctgtggcggctctctttatccttctagggattttcctgatactaaacagcgctgcgcaggatacctgcgaagcaatggaccagtgggcccagcaccctcaggcagagacagctctgagcagcatccttccgtgtgtggatgagagcacgaccaaccgaacgctgtaccagagcaaagaggtggtggtgaggcttgtggggatagtgaacagagctatctccgctctttcaaatcgaaggccgcatcacaagcacccaggacagttcatgccttacctgtgctcgccctacgactcaaacctcaacgaccgaccgtgcaagtatagggaggccacgtttgaaaacgcgacgacagcatggttgaactacacgtgcatggctcaagacacggacttgtgctcaggcaacaagaccttaacctacgacatctacggccaactcgtgctggctgcaaacgtgagctacgcgctgtaccactacgcccccttcctgctgaacctccaggactgcaagttcgtccgggccaccttcagcgccatcgcctcgcggtactgccctcctctggggcacgacctcgtgctggtctccgcgggtctggcgctcattgcctcggcctttgttctctgcctcgtctggatgctcttcgcggaccgcccccgaagggaggaggtgtccgatctggcgtcggggtcgaggatcgcgccggtagacagctctccgtcgtagaagcaagcaagcaagcaagcggcgcaacgggatgtctatgactatgagtgaggctgcttggtcgcatggtgaccagagtttagtacagttcccttccatggctatgtaaaatagtttcggtatagcgagttccgggagacgtcgttgaagtgcggagaggagggggagaaaccggaagcacttcgggtgggggacaaaaggccccattttgcagtggagagagttaggtggaaacgagtgctctgcttccttctatcgtatgtcagatcgatgcacccatggtgtatgttgctgcaaggacaaacggaataatcgatcagggttcccatgaccaatcacgcggcgaaagacagccgtgttcg

SEQ ID NO: 210081 - DNA, 1843 bp, Zea Mays
cgatcccggccgtcagccagctcattcgatggataggcgtgaggtcaagaatctgggaccatgggcaaaggggctgctgaaaggcatgccgcaggcagcggcgggaccggcagccatggcgcctgttgcgaagtatccgctggttctggcagaggaccggacgcggcggccggatgttctcaggcatctcaaagtgtatgaaggagggtggaacgtcaccaataagcactactgggcgtctgtttcattcacaggtgtttctggatttcttctcggtgctttgtggttcatatttttcgggatagctgtggctggacgatgctattttggaacaagaatgtccaaaagaaaggtttcttatgcagatgtagtaggtcctgtgttgcttggggtcttcacacttgctataatagctgggtgcattctccttctgtatgggcagagtaaattccatgaagaagctacgcggaccgtcgattttgttgtgaaccaatctgatttcactattcagacactaaggaatgttacagaatacttgtcatttgcacagacgatcactgtggcagcactctatcttccatcagaagttcaaggtcaaattgacagtttgaaaggggatttgaacaaagcagctgacacaatatctgtgaagacagcagaaaattacaaaatgataagaaaagttctccatatcatgcctagagaagtatggaccgagatatacagtttacatatttgttaccttatgctggaaagctgtggcggctctctttatccttctagggattttcctgatactaaacagcgctgcgcaggatacctgcgaagcaatggaccagtgggcccagcaccctcaggcagagacagctctgagcagcatccttccgtgtgtggatgagagcacgaccaaccgaacgctgtaccagagcaaagaggtggtggtgaggcttgtggggatagtgaacagagctatctccgctctttcaaatcgaaggccgcatcacaagcacccaggacagttcatgccttacctgtgctcgccctacgactcaaacctcaacgaccgaccgtgcaagtatagggaggccacgtttgaaaacgcgacgacagcatggttgaactacacgtgcatggctcaagacacggacttgtgctcaggcaacaagaccttaacctacgacatctacggccaactcgtgctggctgcaaacgtgagctacgcgctgtaccactacgcccccttcctgctgaacctccaggactgcaagttcgtccgggccaccttcagcgccatcgcctcgcggtactgccctcctctggggcacgacctcgtgctggtctccgcgggtctggcgctcattgcctcggcctttgttctctgcctcgtctggatgctcttcgcggaccgcccccgaagggaggaggtgtccgatctggcgtcggggtcgaggatcgcgccggtagacagctctccgtcgtagaagcaagcaagcaagcaagcggcgcaacgggatgtctatgactatgagtgaggctgcttggtcgcatggtgaccagagtttagtacagttcccttccatggctatgtaaaatagtttcggtatagcgagttccgggagacgtcgttgaagtgcggagaggagggggagaaaccggaagcacttcgggtgggggacaaaaggccccattttgcagtggagagagttaggtggaaacgagtgctctgcttccttctatcgtatgtcagatcgatgcacccatggtgtatgttgctgcaaggacaaacggaataatcgatcagggttcccatgaccaatcacgcggcgaaagacagccgtgttcg

SEQ ID NO: 210082 - DNA, 953 bp, Zea Mays
cagattttctgtaacattgacaaagtttctggtgattcaaacatggttattcagtacaaaaagaagcattgcatagatgaaagattctgtttcttccagggttgctgtgtctacttgcataatgcgcccttagtgaatgcggactacaatgtaatatctgatcttgcactgaagagggtgaagcaggatctaacaatgcatggtggtcaagtctgcagcagtattgctccagctactcatttggtagtagtttcggttttacaggtctataactttgataacctgtacaagaggtgaacactggtgaaaaagacaacatgatgcagagtttcttcctggcagagacgctgaagtacctgtacctacttttctcccctccatcagtcatatccttcgacgagtgggttttcaatactgaagctcacccattgagaattgttccagtaagtgataacaaaggcattggaacaccggtccgacaattcgggagaaaacagggaaagcctgagtaaccttggatatagagcagtggatttttgaatctgccgtctgattctgacctccctgttgatgtgttctgacacgagggaactttctgcctgaagcagtaagggttagaaattacggcgatagattgtttagagcaaaaatcataggtagaggatgatgttatatgcggggcagtgacctccgtgaggtcaagagccccatagaagcttttatctttggatttgcttacgcaccctgaggtgcattgttgatgtgtagcatacatctaactcactgtccatatgttgttgctttcctgggggctctgcgagctgtattgtcattatgtaccccctagttattacttcttttcagatatgattcatataaatataaaacgtaaagtatctatgttattagttgggttttcgtattaatattaacaatagattattatggttaat

SEQ ID NO: 210083 - DNA, 1610 bp, Zea Mays
ctaagtgtcagtttttcctctggttggtcttacataacaaatgttggacgactgaccggctcactaagaagggtcttccccatcctagtacttgccccttatgtgaccaggttcctttcgttttgccgagttggtactggcctctctgatgaagagcgtgatgctcttgtcaccaaactgaacccttatttcaggaaaaatgagtaccccaaaaaaccaccaaaattctatgaagttacaaataactcaaaggagagaccagatgtttggattgaaagtcctgataagtcagtcataatatctgtaacaagtgacattcgtacaatcaagtctgaggtatttgctgctccatactgtttgaggttcccccgtattcagcgagtgagatatgacaagccatggcatgagtgccttgatgtgcaggcttctacgaatatttgctcaaggtctggatccaggggaataaaactgagcatgtaaaacactacagacaaatgtgggagacatcaatggaaggtctattaagtttaaccaagaaaactacaccatctaattactactacatttgtgaaaagaatggtggctcgttgtctgacaagatggatgaacttgcttgctttgctcctggtatgctggccttaggagcctctggttacgggccagaaaaatcagagcaaattatgaatcttgcaaaagagcttgctaggacctgctataatttctaccaaaccactcccacgaagttggctggagaaaattattttttccatactggacaggacatgggtgtgggcacgtcgtggaacatcttgagaccggagactgttgaatcactgatgtacctgtggcgcttgacggggaataaaacataccaagattgggggtgggacatattccaggcatttgagaagaactcccgcatagaatctggatatgtgggactgagagatgtgaacactggtgaaaaagacaacatgatgcagagtttcttcctggcagagacgctgaagtacctgtacctacttttctcccctccatcagtcatatccttcgacgagtgggttttcaatactgaagctcacccattgagaattgttccagtaagtgataacaaaggcattggaacaccggtccgacaattcgggagaaaacagggaaagcctgagtaaccttggatatagagcagtggatttttgaatctgccgtctgattctgacctccctgttgatgtgttctgacacgagggaactttctgcctgaagcagtaagggttagaaattacggcgatagattgtttagagcaaaaatcataggtagaggatgatgttatatgcggggcagtgacctccgtgaggtcaagagccccatagaagcttttatctttggatttgcttacgcaccctgaggtgcattgttgatgtgtagcatacatctaactcactgtccatatgttgttgctttcctgggggctctgcgagctgtattgtcattatgtaccccctagttattacttcttttcagatatgattcatataaatataaaacgtaaagtatctatgttattagttgggttttcgtattaatattaacaatagattattatggttaat

SEQ ID NO: 210084 - DNA, 3295 bp, Zea Mays
ctgttgtcctcgctcggtccgtactcccaagtccaagtgcctcctcgatccttgtccggtcgtccctctcgaactcgagcacgcagccggcagggaagagacaagcgccggagccagagaagcctgcggccaggccactaggccagggtactccggggaggcgagggagcgcttgagggcaacaggtaggagaagtgaggtgactgctatgaatcctatttattttccaaatattcatttgttttgacacctttcatttttttcctttctgaaaggaaattgcattttcgttttgaccttgggcccctgctgtcccaccgccggtaatggcggcgaaggtgcggttcggcctactggtggcgatgttccaggccatgtcgggcgacaagagttcggcgaagaagcgcggccgcctgcgcgcgttcctcgaccgcgcctacgtgccctgtggcggtagggatgactacttcagcgcgctccgcctcgtgctgccggggctcgaccgtgagcgcggctcctacggtctcaaggaggcggccctcgccgccgtgcttgtggacgcccttggcatcgccaaggactctaccgacgccgtccggctcaccaactggcgccgcggtgggggtggccgcaacgccggcaacttttcgcttgtggccgctgagatcttgcaacggaggcaaggtataacttctggcggattgacgataaaggaggtcaatgatgcacttgatcgtctagctacaactgagaacaggtctgagaaggctttaatactttccaatctgatcaagaaaaccaatgcccttgaaatgaagtggcttctgatgataattcttaaagatttgaaattagggataagcgagaagagcatattcgaagaatttcatcctgatgcgcaagacttgttcaatgtcacttgtgacttgaaatttgtctgtgagaagctcaatgatcgaagccaaaggcataaacgccaggatatagaaattgggaaggctgtcaggcctcagctagctttgagagttcgtgattcttcagttgcttggaagaagcttcatggaaaacaagtagttgctgagtgcaaatttgatggtgaccgtattcaaatccacaaaaatggggaagagattcatttcttctctaggagctttcttgatcacactgaatacgcacctgggatgtcaaagattattaaagaaaatatcttggttgacagatgtatattggacggagaaatgcttgtctgggacactgtacttaaccgttttgctgaatttggctcaaaccaggaaatagctaaggctgcaagagagggattggagactgatcgacagttgtgttatgttgtttttgacatcctttatgctggagacaccagtgttatccaccaaagtttgacggagcggcatcaaattctgcagaaggttgtgaaacagttaaagggtcatcttgagattttgatcccaagacgtggtttaaatgtccctcgcccttcagatgaaccatgctggtcgattattgcacataatgctgaagacgttgataaattcttcaaagagactatcgagaacagagatgagggcattgtactgaaggaccttgattccaaatgggaacctggtgatcgaaatggaaagtggcttaaactaaagcctgattatatacacgcgggtgccgatctggatgttattattatagggggatactatggatcaggacgtcaaggtggagaggtcgcacagtttttagttggccttgcagtcccttcagatgataatagttatcccaaaaggttcctttcgttttgccgagttggtactggcctctctgatgaagagcgtgatgctcttgtcaccaaactgaacccttatttcaggaaaaatgagtaccccaaaaaaccaccaaaattctatgaagttacaaataactcaaaggagagaccagatgtttggattgaaagtcctgataagtcagtcataatatctgtaacaagtgacattcgtacaatcaagtctgaggtatttgctgctccatactgtttgaggttcccccgtattcagcgagtgagatatgacaagccatggcatgagtgccttgatgtgcaggcttctacgaatatttgctcaaggtctggatccaggggaataaaactgagcatgtaaaacactacagacaaatgtgggagacatcaatggaaggtctattaagtttaaccaagaaaactacaccatctaattactactacatttgtgaaaagaatggtggctcgttgtctgacaagatggatgaacttgcttgctttgctcctggtatgctggccttaggagcctctggttacgggccagaaaaatcagagcaaattatgaatcttgcaaaagagcttgctaggacctgctataatttctaccaaaccactcccacgaagttggctggagaaaattattttttccatactggacaggacatgggtgtgggcacgtcgtggaacatcttgagaccggagactgttgaatcactgatgtacctgtggcgcttgacggggaataaaacataccaagattgggggtgggacatattccaggcatttgagaagaactcccgcatagaatctggatatgtgggactgagagatgtgaacactggtgaaaaagacaacatgatgcagagtttcttcctggcagagacgctgaagtacctgtacctacttttctcccctccatcagtcatatccttcgacgagtgggttttcaatactgaagctcacccattgagaattgttccagtaagtgataacaaaggcattggaacaccggtccgacaattcgggagaaaacagggaaagcctgagtaaccttggatatagagcagtggatttttgaatctgccgtctgattctgacctccctgttgatgtgttctgacacgagggaactttctgcctgaagcagtaagggttagaaattacggcgatagattgtttagagcaaaaatcataggtagaggatgatgttatatgcggggcagtgacctccgtgaggtcaagagccccatagaagcttttatctttggatttgcttacgcaccctgaggtgcattgttgatgtgtagcatacatctaactcactgtccatatgttgttgctttcctgggggctctgcgagctgtattgtcattatgtaccccctagttattacttcttttcagatatgattcatataaatataaaacgtaaagtatctatgttattagttgggttttcgtattaatattaacaatagattattatggttaat

SEQ ID NO: 210085 - DNA, 3475 bp, Zea Mays
ctgttgtcctcgctcggtccgtactcccaagtccaagtgcctcctcgatccttgtccggtcgtccctctcgaactcgagcacgcagccggcagggaagagacaagcgccggagccagagaagcctgcggccaggccactaggccagggtactccggggaggcgagggagcgcttgagggcaacaggtaggagaagtgaggtgactgctatgaatcctatttattttccaaatattcatttgttttgacacctttcatttttttcctttctgaaaggaaattgcattttcgttttgaccttgggcccctgctgtcccaccgccggtaatggcggcgaaggtgcggttcggcctactggtggcgatgttccaggccatgtcgggcgacaagagttcggcgaagaagcgcggccgcctgcgcgcgttcctcgaccgcgcctacgtgccctgtggcggtagggatgactacttcagcgcgctccgcctcgtgctgccggggctcgaccgtgagcgcggctcctacggtctcaaggaggcggccctcgccgccgtgcttgtggacgcccttggcatcgccaaggactctaccgacgccgtccggctcaccaactggcgccgcggtgggggtggccgcaacgccggcaacttttcgcttgtggccgctgagatcttgcaacggaggcaaggtataacttctggcggattgacgataaaggaggtcaatgatgcacttgatcgtctagctacaactgagaacaggtctgagaaggctttaatactttccaatctgatcaagaaaaccaatgcccttgaaatgaagtggcttctgatgataattcttaaagatttgaaattagggataagcgagaagagcatattcgaagaatttcatcctgatgcgcaagacttgttcaatgtcacttgtgacttgaaatttgtctgtgagaagctcaatgatcgaagccaaaggcataaacgccaggatatagaaattgggaaggctgtcaggcctcagctagctttgagagttcgtgattcttcagttgcttggaagaagcttcatggaaaacaagtagttgctgagtgcaaatttgatggtgaccgtattcaaatccacaaaaatggggaagagattcatttcttctctaggagctttcttgatcacactgaatacgcacctgggatgtcaaagattattaaagaaaatatcttggttgacagatgtatattggacggagaaatgcttgtctgggacactgtacttaaccgttttgctgaatttggctcaaaccaggaaataggtttttggatattccattgaaaatcagaaagttttatttctccaggatatttttatagtggattaatgttactatttttgcagctaaggctgcaagagagggattggagactgatcgacaggttgttttcacaaaactttttttccgtgtttcagagcgatccttctataaaatttcctatctaacttaatttactctgtgcctgcagttgtgttcgatgcatagatgttgtttttgacatcctttatgctggagacaccagtgttatccaccaaagtttgacggagcggcatcaaattctgcagaaggttgtgaaacagttaaagggtcatcttgagattttgatcccaagacgtggtttaaatgtccctcgcccttcagatgaaccatgctggtcgattattgcacataatgctgaagacgttgataaattcttcaaagagactatcgagaacagagatgagggcattgtactgaaggaccttgattccaaatgggaacctggtgatcgaaatggaaagtggcttaaactaaagcctgattatatacacgcgggtgccgatctggatgttattattatagggggatactatggatcaggacgtcaaggtggagaggtcgcacagtttttagttggccttgcagtcccttcagatgataatagttatcccaaaaggttcctttcgttttgccgagttggtactggcctctctgatgaagagcgtgatgctcttgtcaccaaactgaacccttatttcaggaaaaatgagtaccccaaaaaaccaccaaaattctatgaagttacaaataactcaaaggagagaccagatgtttggattgaaagtcctgataagtcagtcataatatctgtaacaagtgacattcgtacaatcaagtctgaggtatttgctgctccatactgtttgaggttcccccgtattcagcgagtgagatatgacaagccatggcatgagtgccttgatgtgcaggcttctacgaatatttgctcaaggtctggatccaggggaataaaactgagcatgtaaaacactacagacaaatgtgggagacatcaatggaaggtctattaagtttaaccaagaaaactacaccatctaattactactacatttgtgaaaagaatggtggctcgttgtctgacaagatggatgaacttgcttgctttgctcctggtatgctggccttaggagcctctggttacgggccagaaaaatcagagcaaattatgaatcttgcaaaagagcttgctaggacctgctataatttctaccaaaccactcccacgaagttggctggagaaaattattttttccatactggacaggacatgggtgtgggcacgtcgtggaacatcttgagaccggagactgttgaatcactgatgtacctgtggcgcttgacggggaataaaacataccaagattgggggtgggacatattccaggcatttgagaagaactcccgcatagaatctggatatgtgggactgagagatgtgaacactggtgaaaaagacaacatgatgcagagtttcttcctggcagagacgctgaagtacctgtacctacttttctcccctccatcagtcatatccttcgacgagtgggttttcaatactgaagctcacccattgagaattgttccagtaagtgataacaaaggcattggaacaccggtccgacaattcgggagaaaacagggaaagcctgagtaaccttggatatagagcagtggatttttgaatctgccgtctgattctgacctccctgttgatgtgttctgacacgagggaactttctgcctgaagcagtaagggttagaaattacggcgatagattgtttagagcaaaaatcataggtagaggatgatgttatatgcggggcagtgacctccgtgaggtcaagagccccatagaagcttttatctttggatttgcttacgcaccctgaggtgcattgttgatgtgtagcatacatctaactcactgtccatatgttgttgctttcctgggggctctgcgagctgtattgtcattatgtaccccctagttattacttcttttcagatatgattcatataaatataaaacgtaaagtatctatgttattagttgggttttcgtattaatattaacaatagattattatggttaat

SEQ ID NO: 210086 - DNA, 2799 bp, Zea Mays
ccgcctgctcacgccccaccgcgcgccatcttctccccccgctccgctctccgtcgatggaagggtcgctactgccgttgccctctcccttgcagtccatgtccgtcgatggaagggtcgctacagcccctgccctcgcctccgcaatccatggacgcccccgccccgagacgtgcccacctagagagccgctcgctcaccttgctacccggcccacacccgtctcgttctcctcctcatcccggcgctcctactactcccctccatggcgcgcaggtacacctcctcgttcccccacctgcctccctgttccacttttgttgcctccttacaggcaaaagctctgtggggtccctttgctacgtgggggacgaatcagcgagggcgcttagcgtcggcgaggagctcatggccaagagaccatgccgttgggtgtacaggatcgacggactgccctatctgtgtggtacgaaatcaagatctgttgggggacaggctctgttggtgttcaatttgctatcttgttttagttcttgcttgtttcgatagccatattaattttcgtacagatctggtagggttttgtttcccctgcgaggcgatttcctttttctctgttgtggttggggttgggtggggttaggtttggttaaacaattccccttttggattagaggggacagggcaatgaactaatttgccaactcaagcccttgctgtacacatgatttaatcatgggttacggcacatgtaccttttagatcgcttgcaaaaggttgtttagctatcctattagacatgtgtagttctttacttattcgtcggatgaagatgaagtaatggaggagattaggttggggccaaaaggcggtctcatgtactgcatggagtatcctattatttttgcagtgtctttgttcattctataggctgccatataagcccattgtttcctttggctttttccatacgtgattagtcgtacctgattttgccacctaatttttcattatatttttcttttttgttttgttgtcatgtgaattgtctccattcatgtttgtggttcgctttattacttaactattttctgaggtatatttttttttgtaaaaaacggattatcgatctgtcatccttgtataaccatctggtgtctacataagtttgatatctaacaccaaggccagacaatgattgtataaccatctggtgtccgtataagctttgaaaatgtcatccttttgcaagcgatcaaatatcttctagcattattattcagttggcaagactggtcgccagaagctactcaagcagaaaggatgtgttgtttgcatcacgggcctttagtgcttcaggtaaccaaaccttgctttctctcaaactggtttgttgtgttatagaacaaaaggaagaaaattacagattgttacagtattcctggaagaaatacttccattgctggaccatgggttacttaataagtagaatttctgggctcctaataaagtaccataatgttctgttaggactatgtttttatgcagcataatcaggttatgaagcacgaattgtacatcagctttcaggtgccaagttcagttaccttgaatattttaagtaatggtatgttgattccacttttattagttctttgagttccatttccagcgctgatcttgatgcctaatcaactattgagagcagacagccatgagcctgagacaaatggaaagtacaaattattgcatggattattaatcatcacatgccatagataaaaattcctgttgttatagccataacatcgtaaggttagttgataattacgcacatacgagaagtaaaaaaatagaagtttgacgttaatagaaatggggatacttctcttttcagaaaaagagcttaagaaggtcatcagaaagggaatcaacaacacgtgtctggcgacctaggtctcttggcttgcccgtagcccgccggtcagtaatggcgcaggatgatccggttgtttctgctcagtggatgcacgagcacctagtgatgcctgatgttaaggctaggcaaatagttggttcagctgtacttgtgaaagctcgagatagaccagaaattgaggatgatgaattctattcacttgacctttattgtcaaggatacaggcaagctcgtaggaacagttggtcagggtttcaatttcggaggtggagatcttctacaggtgataatgggctcttctgagggtactactgttgatccagattcagaaaatcaagattcaatctcatcacgtgagcatgtgtggactccatttgctgaagatattgtacctgatgttgatatgggaagcagagaaatgcggattacacctccgaaggggttacttgagctcaattctcgttctgacaagagatcgaagaaagaaaggcatgcgatggttaggtctgcatcatccttttctagcatccatgctcgcatctacagccatgatttgcatcttaaaagaaataaagaatgtgtcaggtccatagtactgaaatgttgatagcagcagatgtcctggctgaagattgtagatattatcttgcatgtattataacaaatgactcctcccctcacgatgactttgcggacagatgtctcaattctagtggtggagctacgaacaacaatctgatgtcctgatcgagagcgatggagctaatatttgaacttgtgtgtttgaacttgtgaactaaaaatgtgaactatggatgtgaacttgtgtgaatttgtgaacttatttatttggacttatg

SEQ ID NO: 210087 - DNA, 2312 bp, Zea Mays
ccgcctgctcacgccccaccgcgcgccatcttctccccccgctccgctctccgtcgatggaagggtcgctactgccgttgccctctcccttgcagtccatgtccgtcgatggaagggtcgctacagcccctgccctcgcctccgcaatccatggacgcccccgccccgagacgtgcccacctagagagccgctcgctcaccttgctacccggcccacacccgtctcgttctcctcctcatcccggcgctcctactactcccctccatggcgcgcaggtacacctcctcgttcccccacctgcctccctgttccacttttgttgcctccttacaggcaaaagctctgtggggtccctttgctacgtgggggacgaatcagcgagggcgcttagcgtcggcgaggagctcatggccaagagaccatgccgttgggtgtacaggatcgacggactgccctatctgtgtggtacgaaatcaagatctgttgggggacaggctctgttggtgttcaatttgctatcttgttttagttcttgcttgtttcgatagccatattaattttcgtacagatctggtagggttttgtttcccctgcgaggcgatttcctttttctctgttgtggttggggttgggtggggttaggtttggttaaacaattccccttttggattagaggggacagggcaatgaactaatttgccaactcaagcccttgctgtacacatgatttaatcatgggttacggcacatgtaccttttagatcgcttgcaaaaggttgtttagctatcctattagacatgtgtagttctttacttattcgtcggatgaagatgaagtaatggaggagattaggttggggccaaaaggcggtctcatgtactgcatggagtatcctattatttttgcagtgtctttgttcattctataggctgccatataagcccattgtttcctttggctttttccatacgtgattagtcgtacctgattttgccacctaatttttcattatatttttcttttttgttttgttgtcatgtgaattgtctccattcatgtttgtggttcgctttattacttaactattttctgaggtatatttttttttgtaaaaaacggattatcgatctgtcatccttgtataaccatctggtgtctacataagtttgatatctaacaccaaggccagacaatgattgtataaccatctggtgtccgtataagctttgaaaatgtcatccttttgcaagcgatcaaatatcttctagcattattattcagttggcaagactggtcgccagaagctactcaagcagaaaggatgtgttgtttgcatcacgggcctttagtgcttcaggactatgtttttatgcagcataatcaggttatgaagcacgaattgtacatcagctttcaggtgccaagttcagttaccttgaatattttaagtaatgtctggcgacctaggtctcttggcttgcccgtagcccgccggtcagtaatggcgcaggatgatccggttgtttctgctcagtggatgcacgagcacctagtgatgcctgatgttaaggctaggcaaatagttggttcagctgtacttgtgaaagctcgagatagaccagaaattgaggatgatgaattctattcacttgacctttattgtcaaggatacaggcaagctcgtaggaacagttggtcagggtttcaatttcggaggtggagatcttctacaggtgataatgggctcttctgagggtactactgttgatccagattcagaaaatcaagattcaatctcatcacgtgagcatgtgtggactccatttgctgaagatattgtacctgatgttgatatgggaagcagagaaatgcggattacacctccgaaggggttacttgagctcaattctcgttctgacaagagatcgaagaaagaaaggcatgcgatggttaggtctgcatcatccttttctagcatccatgctcgcatctacagccatgatttgcatcttaaaagaaataaagaatgtgtcaggtccatagtactgaaatgttgatagcagcagatgtcctggctgaagattgtagatattatcttgcatgtattataacaaatgactcctcccctcacgatgactttgcggacagatgtctcaattctagtggtggagctacgaacaacaatctgatgtcctgatcgagagcgatggagctaatatttgaacttgtgtgtttgaacttgtgaactaaaaatgtgaactatggatgtgaacttgtgtgaatttgtgaacttatttatttggacttatg

SEQ ID NO: 210088 - DNA, 2851 bp, Zea Mays
ccgcctgctcacgccccaccgcgcgccatcttctccccccgctccgctctccgtcgatggaagggtcgctactgccgttgccctctcccttgcagtccatgtccgtcgatggaagggtcgctacagcccctgccctcgcctccgcaatccatggacgcccccgccccgagacgtgcccacctagagagccgctcgctcaccttgctacccggcccacacccgtctcgttctcctcctcatcccggcgctcctactactcccctccatggcgcgcaggtacacctcctcgttcccccacctgcctccctgttccacttttgttgcctccttacaggcaaaagctctgtggggtccctttgctacgtgggggacgaatcagcgagggcgcttagcgtcggcgaggagctcatggccaagagaccatgccgttgggtgtacaggatcgacggactgccctatctgtgtggtacgaaatcaagatctgttgggggacaggctctgttggtgttcaatttgctatcttgttttagttcttgcttgtttcgatagccatattaattttcgtacagatctggtagggttttgtttcccctgcgaggcgatttcctttttctctgttgtggttggggttgggtggggttaggtttggttaaacaattccccttttggattagaggggacagggcaatgaactaatttgccaactcaagcccttgctgtacacatgatttaatcatgggttacggcacatgtaccttttagatcgcttgcaaaaggttgtttagctatcctattagacatgtgtagttctttacttattcgtcggatgaagatgaagtaatggaggagattaggttggggccaaaaggcggtctcatgtactgcatggagtatcctattatttttgcagtgtctttgttcattctataggctgccatataagcccattgtttcctttggctttttccatacgtgattagtcgtacctgattttgccacctaatttttcattatatttttcttttttgttttgttgtcatgtgaattgtctccattcatgtttgtggttcgctttattacttaactattttctgaggtatatttttttttgtaaaaaacggattatcgatctgtcatccttgtataaccatctggtgtctacataagtttgatatctaacaccaaggccagacaatgattgtataaccatctggtgtccgtataagctttgaaaatgtcatccttttgcaagcgatcaaatatcttctagcattattattcagttggcaagactggtcgccagaagctactcaagcagaaaggatgtgttgtttgcatcacgggcctttagtgcttcaggtaaccaaaccttgctttctctcaaactggtttgttgtgttatagaacaaaaggaagaaaattacagattgttacagtattcctggaagaaatacttccattgctggaccatgggttacttaataagtagaatttctgggctcctaataaagtaccataatgttctgttaggactatgtttttatgcagcataatcaggttatgaagcacgaattgtacatcagctttcaggtgccaagttcagttaccttgaatattttaagtaatgtctggcgacctaggtctcttggcttgcccgtagcccgccggtcagtaatggcgcaggatgatccggttgtttctgctcagtggatgcacgagcacctagtgatgcctgatgttaaggtaaaaaatcatctagtttgcgtgttcatattcacttcagagacacttcaataatgcttccttcatcgaagaagaaagttcagagatatacttctatcccctgcgttagtggtatgtgagaatataacagtttggttgtctatcaatttgatcttcctttttatgcgttgtgttcttattactcccagaaataattagagggttagggacatatgtgctttgtggcagttatcagcttgttttaggttttggatgcttcctggtacatgccggtagagaacagggaatcatggaaagaatatcaggtggcacacatccccggtgcgctattcttcgacttagatggcatagttgatcggacaactgatgctaggcaaatagttggttcagctgtacttgtgaaagctcgagatagaccagaaattgaggatgatgaattctattcacttgacctttattgtcaaggatacaggcaagctcgtaggaacagttggtcagggtttcaatttcggaggtggagatcttctacaggtgataatgggctcttctgagggtactactgttgatccagattcagaaaatcaagattcaatctcatcacgtgagcatgtgtggactccatttgctgaagatattgtacctgatgttgatatgggaagcagagaaatgcggattacacctccgaaggggttacttgagctcaattctcgttctgacaagagatcgaagaaagaaaggcatgcgatggttaggtctgcatcatccttttctagcatccatgctcgcatctacagccatgatttgcatcttaaaagaaataaagaatgtgtcaggtccatagtactgaaatgttgatagcagcagatgtcctggctgaagattgtagatattatcttgcatgtattataacaaatgactcctcccctcacgatgactttgcggacagatgtctcaattctagtggtggagctacgaacaacaatctgatgtcctgatcgagagcgatggagctaatatttgaacttgtgtgtttgaacttgtgaactaaaaatgtgaactatggatgtgaacttgtgtgaatttgtgaacttatttatttggacttatg

SEQ ID NO: 210089 - DNA, 3427 bp, Zea Mays
ccgcctgctcacgccccaccgcgcgccatcttctccccccgctccgctctccgtcgatggaagggtcgctactgccgttgccctctcccttgcagtccatgtccgtcgatggaagggtcgctacagcccctgccctcgcctccgcaatccatggacgcccccgccccgagacgtgcccacctagagagccgctcgctcaccttgctacccggcccacacccgtctcgttctcctcctcatcccggcgctcctactactcccctccatggcgcgcaggtacacctcctcgttcccccacctgcctccctgttccacttttgttgcctccttacaggcaaaagctctgtggggtccctttgctacgtgggggacgaatcagcgagggcgcttagcgtcggcgaggagctcatggccaagagaccatgccgttgggtgtacaggatcgacggactgccctatctgtgtggtacgaaatcaagatctgttgggggacaggctctgttggtgttcaatttgctatcttgttttagttcttgcttgtttcgatagccatattaattttcgtacagatctggtagggttttgtttcccctgcgaggcgatttcctttttctctgttgtggttggggttgggtggggttaggtttggttaaacaattccccttttggattagaggggacagggcaatgaactaatttgccaactcaagcccttgctgtacacatgatttaatcatgggttacggcacatgtaccttttagatcgcttgcaaaaggttgtttagctatcctattagacatgtgtagttctttacttattcgtcggatgaagatgaagtaatggaggagattaggttggggccaaaaggcggtctcatgtactgcatggagtatcctattatttttgcagtgtctttgttcattctataggctgccatataagcccattgtttcctttggctttttccatacgtgattagtcgtacctgattttgccacctaatttttcattatatttttcttttttgttttgttgtcatgtgaattgtctccattcatgtttgtggttcgctttattacttaactattttctgaggtatatttttttttgtaaaaaacggattatcgatctgtcatccttgtataaccatctggtgtctacataagtttgatatctaacaccaaggccagacaatgattgtataaccatctggtgtccgtataagctttgaaaatgtcatccttttgcaagcgatcaaatatcttctagcattattattcagttggcaagactggtcgccagaagctactcaagcagaaaggatgtgttgtttgcatcacgggcctttagtgcttcaggtaaccaaaccttgctttctctcaaactggtttgttgtgttatagaacaaaaggaagaaaattacagattgttacagtattcctggaagaaatacttccattgctggaccatgggttacttaataagtagaatttctgggctcctaataaagtaccataatgttctgttaggactatgtttttatgcagcataatcaggttatgaagcacgaattgtacatcagctttcaggtgccaagttcagttaccttgaatattttaagtaatggtatgttgattccacttttattagttctttgagttccatttccagcgctgatcttgatgcctaatcaactattgagagcagacagccatgagcctgagacaaatggaaagtacaaattattgcatggattattaatcatcacatgccatagataaaaattcctgttgttatagccataacatcgtaaggttagttgataattacgcacatacgagaagtaaaaaaatagaagtttgacgttaatagaaatggggatacttctcttttcagaaaaagagcttaagaaggtcatcagaaagggaatcaacaacacgtggtgggcaacaaaaacaacttcaatgtcctaagaaatctagaaattctttctctgagtttttcttttctgttctagagtcaatagctgactgtttctgttaactgaaaatgtatttgtcacacaatgcttatataaaccacttgattaagttatattatgttaggacattttggcagtccactatttatatctggtttgatgttgttataaagtgatctctgctatctaatctattttggtggtcgtaaagttttgcttgcttgaaatttgatcacattagttgaattttgtctataatcacatcagatgagaaattatacagccttcttgcttaaatgtacagaccactgtttaattttttgaactttatttcccaccgcgagaaactgatttatttccaccgagagaaactggtttatttccatcttttcttctttttagaaccggaggctatcctctagcttgataatctcacctgcaagattcgtttttttggctaatccagtctggcgacctaggtctcttggcttgcccgtagcccgccggtcagtaatggcgcaggatgatccggttgtttctgctcagtggatgcacgagcacctagtgatgcctgatgttaaggttttggatgcttcctggtacatgccggtagagaacagggaatcatggaaagaatatcaggtggcacacatccccggtgcgctattcttcgacttagatggcatagttgatcggacaactgatgctaggcaaatagttggttcagctgtacttgtgaaagctcgagatagaccagaaattgaggatgatgaattctattcacttgacctttattgtcaaggatacaggcaagctcgtaggaacagttggtcagggtttcaatttcggaggtggagatcttctacaggtgataatgggctcttctgagggtactactgttgatccagattcagaaaatcaagattcaatctcatcacgtgagcatgtgtggactccatttgctgaagatattgtacctgatgttgatatgggaagcagagaaatgcggattacacctccgaaggggttacttgagctcaattctcgttctgacaagagatcgaagaaagaaaggcatgcgatggttaggtctgcatcatccttttctagcatccatgctcgcatctacagccatgatttgcatcttaaaagaaataaagaatgtgtcaggtccatagtactgaaatgttgatagcagcagatgtcctggctgaagattgtagatattatcttgcatgtattataacaaatgactcctcccctcacgatgactttgcggacagatgtctcaattctagtggtggagctacgaacaacaatctgatgtcctgatcgagagcgatggagctaatatttgaacttgtgtgtttgaacttgtgaactaaaaatgtgaactatggatgtgaacttgtgtgaatttgtgaacttatttatttggacttatg

SEQ ID NO: 210090 - DNA, 3223 bp, Zea Mays
ccgcctgctcacgccccaccgcgcgccatcttctccccccgctccgctctccgtcgatggaagggtcgctactgccgttgccctctcccttgcagtccatgtccgtcgatggaagggtcgctacagcccctgccctcgcctccgcaatccatggacgcccccgccccgagacgtgcccacctagagagccgctcgctcaccttgctacccggcccacacccgtctcgttctcctcctcatcccggcgctcctactactcccctccatggcgcgcaggtacacctcctcgttcccccacctgcctccctgttccacttttgttgcctccttacaggcaaaagctctgtggggtccctttgctacgtgggggacgaatcagcgagggcgcttagcgtcggcgaggagctcatggccaagagaccatgccgttgggtgtacaggatcgacggactgccctatctgtgtggtacgaaatcaagatctgttgggggacaggctctgttggtgttcaatttgctatcttgttttagttcttgcttgtttcgatagccatattaattttcgtacagatctggtagggttttgtttcccctgcgaggcgatttcctttttctctgttgtggttggggttgggtggggttaggtttggttaaacaattccccttttggattagaggggacagggcaatgaactaatttgccaactcaagcccttgctgtacacatgatttaatcatgggttacggcacatgtaccttttagatcgcttgcaaaaggttgtttagctatcctattagacatgtgtagttctttacttattcgtcggatgaagatgaagtaatggaggagattaggttggggccaaaaggcggtctcatgtactgcatggagtatcctattatttttgcagtgtctttgttcattctataggctgccatataagcccattgtttcctttggctttttccatacgtgattagtcgtacctgattttgccacctaatttttcattatatttttcttttttgttttgttgtcatgtgaattgtctccattcatgtttgtggttcgctttattacttaactattttctgaggtatatttttttttgtaaaaaacggattatcgatctgtcatccttgtataaccatctggtgtctacataagtttgatatctaacaccaaggccagacaatgattgtataaccatctggtgtccgtataagctttgaaaatgtcatccttttgcaagcgatcaaatatcttctagcattattattcagttggcaagactggtcgccagaagctactcaagcagaaaggatgtgttgtttgcatcacgggcctttagtgcttcaggtaaccaaaccttgctttctctcaaactggtttgttgtgttatagaacaaaaggaagaaaattacagattgttacagtattcctggaagaaatacttccattgctggaccatgggttacttaataagtagaatttctgggctcctaataaagtaccataatgttctgttaggactatgtttttatgcagcataatcaggttatgaagcacgaattgtacatcagctttcaggtgccaagttcagttaccttgaatattttaagtaatgacagccatgagcctgagacaaatggaaagtacaaattattgcatggattattaatcatcacatgccatagataaaaattcctgttgttatagccataacatcgtaaggttagttgataattacgcacatacgagaagtaaaaaaatagaagtttgacgttaatagaaatggggatacttctcttttcagaaaaagagcttaagaaggtcatcagaaagggaatcaacaacacgtggtgggcaacaaaaacaacttcaatgtcctaagaaatctagaaattctttctctgagtttttcttttctgttctagagtcaatagctgactgtttctgttaactgaaaatgtatttgtcacacaatgcttatataaaccacttgattaagttatattatgttaggacattttggcagtccactatttatatctggtttgatgttgttataaagtgatctctgctatctaatctattttggtggtcgtaaagttttgcttgcttgaaatttgatcacattagttgaattttgtctataatcacatcagatgagaaattatacagccttcttgcttaaatgtacagaccactgtttaattttttgaactttatttcccaccgcgagaaactgatttatttccaccgagagaaactggtttatttccatcttttcttctttttagaaccggaggctatcctctagcttgataatctcacctgcaagattcgtttttttggctaatccagtctggcgacctaggtctcttggcttgcccgtagcccgccggtcagtaatggcgcaggatgatccggttgtttctgctcagtggatgcacgagcacctagtgatgcctgatgttaaggctaggcaaatagttggttcagctgtacttgtgaaagctcgagatagaccagaaattgaggatgatgaattctattcacttgacctttattgtcaaggatacaggcaagctcgtaggaacagttggtcagggtttcaatttcggaggtggagatcttctacaggtgataatgggctcttctgagggtactactgttgatccagattcagaaaatcaagattcaatctcatcacgtgagcatgtgtggactccatttgctgaagatattgtacctgatgttgatatgggaagcagagaaatgcggattacacctccgaaggggttacttgagctcaattctcgttctgacaagagatcgaagaaagaaaggcatgcgatggttaggtctgcatcatccttttctagcatccatgctcgcatctacagccatgatttgcatcttaaaagaaataaagaatgtgtcaggtccatagtactgaaatgttgatagcagcagatgtcctggctgaagattgtagatattatcttgcatgtattataacaaatgactcctcccctcacgatgactttgcggacagatgtctcaattctagtggtggagctacgaacaacaatctgatgtcctgatcgagagcgatggagctaatatttgaacttgtgtgtttgaacttgtgaactaaaaatgtgaactatggatgtgaacttgtgtgaatttgtgaacttatttatttggacttatg

SEQ ID NO: 210091 - DNA, 1666 bp, Zea Mays
ccgcctgctcacgccccaccgcgcgccatcttctccccccgctccgctctccgtcgatggaagggtcgctactgccgttgccctctcccttgcagtccatgtccgtcgatggaagggtcgctacagcccctgccctcgcctccgcaatccatggacgcccccgccccgagacgtgcccacctagagagccgctcgctcaccttgctacccggcccacacccgtctcgttctcctcctcatcccggcgctcctactactcccctccatggcgcgcaggtacacctcctcgttcccccacctgcctccctgttccacttttgttgcctccttacaggcaaaagctctgtggggtccctttgctacgtgggggacgaatcagcgagggcgcttagcgtcggcgaggagctcatggccaagagaccatgccgttgggtgtacaggatcgacggactgccctatctgtgtgttggcaagactggtcgccagaagctactcaagcagaaaggatgtgttgtttgcatcacgggcctttagtgcttcaggtaaccaaaccttgctttctctcaaactggtttgttgtgttatagaacaaaaggaagaaaattacagattgttacagtattcctggaagaaatacttccattgctggaccatgggttacttaataagtagaatttctgggctcctaataaagtaccataatgttctgttaggactatgtttttatgcagcataatcaggttatgaagcacgaattgtacatcagctttcaggtgccaagttcagttaccttgaatattttaagtaatgtctggcgacctaggtctcttggcttgcccgtagcccgccggtcagtaatggcgcaggatgatccggttgtttctgctcagtggatgcacgagcacctagtgatgcctgatgttaaggctaggcaaatagttggttcagctgtacttgtgaaagctcgagatagaccagaaattgaggatgatgaattctattcacttgacctttattgtcaaggatacaggcaagctcgtaggaacagttggtcagggtttcaatttcggaggtggagatcttctacaggtgataatgggctcttctgagggtactactgttgatccagattcagaaaatcaagattcaatctcatcacgtgagcatgtgtggactccatttgctgaagatattgtacctgatgttgatatgggaagcagagaaatgcggattacacctccgaaggggttacttgagctcaattctcgttctgacaagagatcgaagaaagaaaggcatgcgatggttaggtctgcatcatccttttctagcatccatgctcgcatctacagccatgatttgcatcttaaaagaaataaagaatgtgtcaggtccatagtactgaaatgttgatagcagcagatgtcctggctgaagattgtagatattatcttgcatgtattataacaaatgactcctcccctcacgatgactttgcggacagatgtctcaattctagtggtggagctacgaacaacaatctgatgtcctgatcgagagcgatggagctaatatttgaacttgtgtgtttgaacttgtgaactaaaaatgtgaactatggatgtgaacttgtgtgaatttgtgaacttatttatttggacttatg

SEQ ID NO: 210092 - DNA, 1342 bp, Zea Mays
catcccggcgctcctactactcccctccatggcgcgcagcataatcaggttatgaagcacgaattgtacatcagctttcaggtgccaagttcagttaccttgaatattttaagtaatgtctggcgacctaggtctcttggcttgcccgtagcccgccggtcagtaatggcgcaggatgatccggttgtttctgctcagtggatgcacgagcacctagtgatgcctgatgttaaggtaaaaaatcatctagtttgcgtgttcatattcacttcagagacacttcaataatgcttccttcatcgaagaagaaagttcagagatatacttctatcccctgcgttagtggtatgtgagaatataacagtttggttgtctatcaatttgatcttcctttttatgcgttgtgttcttattactcccagaaataattagagggttagggacatatgtgctttgtggcagttatcagcttgttttaggttttggatgcttcctggtacatgccggtagagaacagggaatcatggaaagaatatcaggtggcacacatccccggtgcgctattcttcgacttagatggcatagttgatcggacaactgatgctaggcaaatagttggttcagctgtacttgtgaaagctcgagatagaccagaaattgaggatgatgaattctattcacttgacctttattgtcaaggatacaggcaagctcgtaggaacagttggtcagggtttcaatttcggaggtggagatcttctacaggtgataatgggctcttctgagggtactactgttgatccagattcagaaaatcaagattcaatctcatcacgtgagcatgtgtggactccatttgctgaagatattgtacctgatgttgatatgggaagcagagaaatgcggattacacctccgaaggggttacttgagctcaattctcgttctgacaagagatcgaagaaagaaaggcatgcgatggttaggtctgcatcatccttttctagcatccatgctcgcatctacagccatgatttgcatcttaaaagaaataaagaatgtgtcaggtccatagtactgaaatgttgatagcagcagatgtcctggctgaagattgtagatattatcttgcatgtattataacaaatgactcctcccctcacgatgactttgcggacagatgtctcaattctagtggtggagctacgaacaacaatctgatgtcctgatcgagagcgatggagctaatatttgaacttgtgtgtttgaacttgtgaactaaaaatgtgaactatggatgtgaacttgtgtgaatttgtgaacttatttatttggacttatg

SEQ ID NO: 210093 - DNA, 2086 bp, Zea Mays
catcccggcgctcctactactcccctccatggcgcgcagcataatcaggttatgaagcacgaattgtacatcagctttcaggtgccaagttcagttaccttgaatattttaagtaatggtatgttgattccacttttattagttctttgagttccatttccagcgctgatcttgatgcctaatcaactattgagagcagacagccatgagcctgagacaaatggaaagtacaaattattgcatggattattaatcatcacatgccatagataaaaattcctgttgttatagccataacatcgtaaggttagttgataattacgcacatacgagaagtaaaaaaatagaagtttgacgttaatagaaatggggatacttctcttttcagaaaaagagcttaagaaggtcatcagaaagggaatcaacaacacgtggtgggcaacaaaaacaacttcaatgtcctaagaaatctagaaattctttctctgagtttttcttttctgttctagagtcaatagctgactgtttctgttaactgaaaatgtatttgtcacacaatgcttatataaaccacttgattaagttatattatgttaggacattttggcagtccactatttatatctggtttgatgttgttataaagtgatctctgctatctaatctattttggtggtcgtaaagttttgcttgcttgaaatttgatcacattagttgaattttgtctataatcacatcagatgagaaattatacagccttcttgcttaaatgtacagaccactgtttaattttttgaactttatttcccaccgcgagaaactgatttatttccaccgagagaaactggtttatttccatcttttcttctttttagaaccggaggctatcctctagcttgataatctcacctgcaagattcgtttttttggctaatccagtctggcgacctaggtctcttggcttgcccgtagcccgccggtcagtaatggcgcaggatgatccggttgtttctgctcagtggatgcacgagcacctagtgatgcctgatgttaaggtaaaaaatcatctagtttgcgtgttcatattcacttcagagacacttcaataatgcttccttcatcgaagaagaaagttcagagatatacttctatcccctgcgttagtgaaataattagagggttagggacatatgtgctttgtggcagttatcagcttgttttaggttttggatgcttcctggtacatgccggtagagaacagggaatcatggaaagaatatcaggtggcacacatccccggtgcgctattcttcgacttagatggcatagttgatcggacaactgatgctaggcaaatagttggttcagctgtacttgtgaaagctcgagatagaccagaaattgaggatgatgaattctattcacttgacctttattgtcaaggatacaggcaagctcgtaggaacagttggtcagggtttcaatttcggaggtggagatcttctacaggtgataatgggctcttctgagggtactactgttgatccagattcagaaaatcaagattcaatctcatcacgtgagcatgtgtggactccatttgctgaagatattgtacctgatgttgatatgggaagcagagaaatgcggattacacctccgaaggggttacttgagctcaattctcgttctgacaagagatcgaagaaagaaaggcatgcgatggttaggtctgcatcatccttttctagcatccatgctcgcatctacagccatgatttgcatcttaaaagaaataaagaatgtgtcaggtccatagtactgaaatgttgatagcagcagatgtcctggctgaagattgtagatattatcttgcatgtattataacaaatgactcctcccctcacgatgactttgcggacagatgtctcaattctagtggtggagctacgaacaacaatctgatgtcctgatcgagagcgatggagctaatatttgaacttgtgtgtttgaacttgtgaactaaaaatgtgaactatggatgtgaacttgtgtgaatttgtgaacttatttatttggacttatg

SEQ ID NO: 210094 - DNA, 1311 bp, Zea Mays
tccgcgcgctccaggacaagttcttctcccacttcaccatcattcgccgacgacgagaggaagctggtggacgcggtgaacgggacggagtacgtgcccacgtacgaggacaaggatggcgactggatgctcgtcggcgacgtcccctggaagtgagctccttcgctctgtctcttttactttccctgatctaattagctggttatctacgcagtttggctgtgctgagtagatttgcaaaaaaaaaaaacatgactgagttgattgagacttaaaagaggtgctgttggagtgttggtgttgccggataggaaggattgttaggaagccccctttccccattggattatgacaccctccctttgctgctcccttactccacttgttagcgcactgccgtcattactgcgacaatgcagtcacactgatcaaattgaactccgtttgatgcttctcgcaccgaatgtctcgctgctgctgctactggttcttctagctttttaacgtatccatgtacagaatcccttggtttgaaaagaattggctttggataagggctgtcttcctagctctattccccacttatagataggttgatccttctagaaaaatattctgtctcgatcaatgagacgagccgggcctgtccgagtttattttcatttataattttcttccttggtcatactgtgttttttttttgttttttgcaggatgttcgtggagacctgccggcgccttcgcctgatgaaaggttcagaggccgttaacttggcaccaagagccgcccgatgaggcgcaagcgcaactccagcgtcaccagtacgcactggcttttagtggcttggcttgttggaggaacgagggaacgtacttcgtcgctgttttgaggatcttcacttgacatatatatagcaatgtgtacagctgtcacctgctgcttttgcctgaggaaagtttgtagttccattactttacttatctgtagtgtctatctatctatctatagatccgaagctttgatatacacatggcggctacaatgtatttttgatgaataagaccagaccagagtaccagacacaccgaaccgaacccgttcttccgcagctccacgcgcggttggcattttgagggttatgtggtggtgttttgcaatttgcagtaggcgtgaaggctgatgtcgtagctgccaattatttatacatcttgatctgtgttgagctatggttttttgtttaatcgatcttggtttaaatcgcgacatgcatgtcaaacgaaagaggtcctccttttctgctgatacggtgg

SEQ ID NO: 210095 - DNA, 1823 bp, Zea Mays
gtgaccgcggtccgcggcccactataaactcaaccacctccggagtccggacctcccccgttggccttctccttccccttcgccctgcctccctctctcagtctctctccggcctccctcgcccacagagacagagcggaagccgccgagctcggagcccagcactttgcacgccgccgccggccatgtcggtggatacggagcggagctccaccgagtcgtccgcggcctccgggctcggctacgaggacaccgcgctcgccctcaccctccgcctcccgggctccgaccccggccgttcctccccgctcgccgcgccctccgacgccgcgccgtctcccaagacgcgggtggtggggtggccgccggtgaggtcgtaccgcaagaacgcgctcgccgactccagcaaggccaaccggtcagccagtttcgtgaaggtggccgtcgacggcgcggcctacctgcggaaggtggacctccaggcgtacggcggctacgaccagctcctccgcgcgctccaggacaagttcttctcccacttcaccatcaggaagttcgccgacgacgagaggaagctggtggacgcggtgaacgggacggagtacgtgcccacgtacgaggacaaggatggcgactggatgctcgtcggcgacgtcccctggaagtgagctccttcgctctgtctcttttactttccctgatctaattagctggttatctacgcagtttggctgtgctgagtagatttgcaaaaaaaaaaaacatgactgagttgattgagacttaaaagaggtgctgttggagtgttggtgttgccggataggaaggattgttaggaagccccctttccccattggattatgacaccctccctttgctgctcccttactccacttgttagcgcactgccgtcattactgcgacaatgcagtcacactgatcaaattgaactccgtttgatgcttctcgcaccgaatgtctcgctgctgctgctactggttcttctagctttttaacgtatccatgtacagaatcccttggtttgaaaagaattggctttggataagggctgtcttcctagctctattccccacttatagataggttgatccttctagaaaaatattctgtctcgatcaatgagacgagccgggcctgtccgagtttattttcatttataattttcttccttggtcatactgtgttttttttttgttttttgcaggatgttcgtggagacctgccggcgccttcgcctgatgaaaggttcagaggccgttaacttggcaccaagagccgcccgatgaggcgcaagcgcaactccagcgtcaccagtacgcactggcttttagtggcttggcttgttggaggaacgagggaacgtacttcgtcgctgttttgaggatcttcacttgacatatatatagcaatgtgtacagctgtcacctgctgcttttgcctgaggaaagtttgtagttccattactttacttatctgtagtgtctatctatctatctatagatccgaagctttgatatacacatggcggctacaatgtatttttgatgaataagaccagaccagagtaccagacacaccgaaccgaacccgttcttccgcagctccacgcgcggttggcattttgagggttatgtggtggtgttttgcaatttgcagtaggcgtgaaggctgatgtcgtagctgccaattatttatacatcttgatctgtgttgagctatggttttttgtttaatcgatcttggtttaaatcgcgacatgcatgtcaaacgaaagaggtcctccttttctgctgatacggtgg

SEQ ID NO: 210096 - DNA, 2303 bp, Zea Mays
cctcgctgaacacgaacgggcgtggcgaccgcccatgccgaaaacgcccacaaaaaattagggagttttcttctcccgtccaccttgcgtgctcgcgcgcgagctctcgtggcgcagccacaactaggcgaccgccgccgcccctacgccacgtgctcgagtctagcctcgtcgattgcttccccagtttaattgatctacaagcttcagaacatgttcaagaatacatttcagtctgggttcctgtccattctttatagcctcgggaccaagccattgcagatatgggataaggaagttgtgaatgggcacattaaacgaccccaagatgaagatatccaatctaatgtacttgaaattgttggaacaaatgtacagtcaacttacatcacatgcccagctgatccttctgctactcttgggattaagcttccatttctggctattattgtgaaaaatcttaagaaatacttcacgtttgagatccaagttctggatgacaagaatgtccgacgtcgatttcgagcatcaaattttcaagtgttctgtcacaagggtgaagccatatatctgcacgatgccgttgaaactcgacgatggctggaacaacatccagttgaaccttgctgatctgacaaaaagggcgtacggcacaaattacgtcgagacgctgcgggtgcaagttcatgcgaactgccggctccgcagaatctacttctctgaccgcctctactcggaggaggagctgccgcctgagttcaagctctaccttccaatccagaaatcataggatcccgagggcgtggagagactctggtgaccgggagacttatatcgtaccattgtgaggataacctagctgcacatctgcgccttcctgagatacagaaaaaaaatgtaccagaatgtttctgttagttttctgattgttgtgcgatgaatgattaggctgttctgttttcatagcaagggcgagtagccttagttggggctgttacccagtgacccctttgtgtgaacgattttttttttttttttttttttttttgttgaaagtaaaccagacagtaagaggtggccggccgaggccggcaaacccggcgtcaacacgtagcatatatagatcctaggacaagcacgcaaaggcaacacgtccagcgcagcagcgtccatggacccgacgcaaggccaaaacaagacaccagttaggcagttacagacaaccccacccaaaagcctcgcgccgtcgcgtcagcgtcagcccgggccagggtcacgcccaattctcgccggcgcccggtcccaaacgccggccactcctcggcacagtgcagacacaccgccggcgtcggcacctgccatatctgcgccgcgtctccgtgggtggcagtggcacggagccgatgggaggtagcgcgcgcgcatgcaaccggaccaggtccatgtccatccgcgcggcgggatcgaaaaatcggtttctcggcatgcacctggaacccgggctccatgaccggccatcccttgctgccgggtagtaatagtatggcagatggcacccgtgtgcgttcgcgcatgcgcccgtgctgtctgccgtgcacgcatcccgtcggccgcggctgcgcgcctcgctcagagcctcagaccagaccggcaggtgtccacgcgatgggggagtgctggagatggcgtggtctgaagatgctttattattcggacggatgtgtagctgttcctctggccccgatcggttggagctgtcccagtgggacaaggacagcgacggggagtgcactgttgggggatttgactctgggcaggcaccatcgacgaggcatctcgctgaccggcggcaggccgggatgggaggtcgggcggggtggccggaggaggatgatcggtccggtccaggtccatgtccatgcacggagagttatcgtcgaggcccgcctcaccgcctggcatttcgcgtactaataagggcttgttcggttagctcttaatccatctctcaatacatgtggtttgcgtgagattgggtaggtttaaattccaagcaagtcaaagttcttctaaattttttcaaatttcatccaatccatatataattagaataaccgaacaaggcctaaagacggcaaacgactggcaaacgaaaagcctcaggctctaattatattgtccctgtaataacaacaacaacaataatctgcgctctctctctctgcgttcgcattgaatgagtgctcttgcctgcaagttgcaactgtggtcgatttgcatgcagttgcagcacagccttttgc

SEQ ID NO: 210097 - DNA, 1314 bp, Zea Mays
cgaaaaaggacgcacgggaatacgtaaaaaatccaacgttaacgagaggggagaagaagagaaataaagtgcgaggtaaccgtaaccctacccccttgcgagcacgacccaacccatcatctcgcccgtcacccgtcaggacccggaccaaaccaatcaggcggcaccatgtctgcggtagtctgtggcaagaggtcctcctccatcttcgccgacgagctcctcccgccgtctccttcctcccctcactcctcccaccagccggcggccaagaggtcccgccgctccccctcgcaccgcggcggctccgacggactccgaccggaggcgctcgtcgactatctacttgccctcttccccgacatggatccacagttgcttgaaaaagctctggaagcatctggagatgacttggattctgcaataaaaagtttgaatttgctgcgcttagagtcagcagaagctatcttgtcatcgactggtttcaaacctgaaaattgtctgcaaacagcaattcagccttctcttgaaggtattcctaatggtggtgtggatacggctacagaacatccgcctagcgtagataattaccagacaagctataatggctctgaatgggttgagctattagtcacagagatgagaaatgcttctgacataaacgatgcacgggctcgtgcgtcaagagctctggaggctttggagaaaacgattgtagagcgtgcaggagctgaagctacacaaaacctgcataaggaaaacatgatgctcaaggagcagttgactgttgttctgcgagagaactccgtgctgaagcgggcagtcgccattcagcacgagcgccaaaaggagttcgacgagaggtctcacgaggtccagaacttgaagcaacttgttctgcagtaccaggagcaagttaggactctagagatgaacaactacgccctcacaatgcatctcaagcaggctcaacagaacagctccatacctgggcgtttcaaccctgatgttttctaagcgtagtagctgctgaacggtccgccccagattaataagctatgtatgaatatatcttgttctaccaactgctcctgagatggggatatccgataggtggattcaccgcccaagggtccagaattttcaagtcactatggttttgatttcgatatactccgtatttatttaaacgtgttgctttcatgcaattggctatccgatatattgtgtgcgcccacttttccgggtatggtttatttgatccatggctacaatcaatattcgtcaacgtaatgtaggaactaatattactgt

SEQ ID NO: 210098 - DNA, 855 bp, Zea Mays
gttttctaccagagactattgttttccctggatgcattcatgtagcaacagttatacatgccttctgttgaaggtattcctaatggtggtgtggatacggctacagaacatccgcctagcgtagataattaccagacaagctataatggctctgaatgggttgagctattagtcacagagatgagaaatgcttctgacataaacgatgcacgggctcgtgcgtcaagagctctggaggctttggagaaaacgattgtagagcgtgcaggagctgaagctacacaaaacctgcataaggaaaacatgatgctcaaggagcagttgactgttgttctgcgagagaactccgtgctgaagcgggcagtcgccattcagcacgagcgccaaaaggagttcgacgagaggtctcacgaggtccagaacttgaagcaacttgttctgcagtaccaggagcaagttaggactctagagatgaacaactacgccctcacaatgcatctcaagcaggctcaacagaacagctccatacctgggcgtttcaaccctgatgttttctaagcgtagtagctgctgaacggtccgccccagattaataagctatgtatgaatatatcttgttctaccaactgctcctgagatggggatatccgataggtggattcaccgcccaagggtccagaattttcaagtcactatggttttgatttcgatatactccgtatttatttaaacgtgttgctttcatgcaattggctatccgatatattgtgtgcgcccacttttccgggtatggtttatttgatccatggctacaatcaatattcgtcaacgtaatgtaggaactaatattactgt

SEQ ID NO: 210099 - DNA, 838 bp, Zea Mays
gttatatagctcgaccatatgctgctcaatctcaacacattttgtatccgattttagtattcctaatggtggtgtggatacggctacagaacatccgcctagcgtagataattaccagacaagctataatggctctgaatgggttgagctattagtcacagagatgagaaatgcttctgacataaacgatgcacgggctcgtgcgtcaagagctctggaggctttggagaaaacgattgtagagcgtgcaggagctgaagctacacaaaacctgcataaggaaaacatgatgctcaaggagcagttgactgttgttctgcgagagaactccgtgctgaagcgggcagtcgccattcagcacgagcgccaaaaggagttcgacgagaggtctcacgaggtccagaacttgaagcaacttgttctgcagtaccaggagcaagttaggactctagagatgaacaactacgccctcacaatgcatctcaagcaggctcaacagaacagctccatacctgggcgtttcaaccctgatgttttctaagcgtagtagctgctgaacggtccgccccagattaataagctatgtatgaatatatcttgttctaccaactgctcctgagatggggatatccgataggtggattcaccgcccaagggtccagaattttcaagtcactatggttttgatttcgatatactccgtatttatttaaacgtgttgctttcatgcaattggctatccgatatattgtgtgcgcccacttttccgggtatggtttatttgatccatggctacaatcaatattcgtcaacgtaatgtaggaactaatattactgt

SEQ ID NO: 210100 - DNA, 829 bp, Zea Mays
aaaaagatgttttccgagctgccccagaggcccagcccacggtgtcagtgtcacctctgctatttcttcacccgtccgttcacttgcgttcatccggcctacgttaaaatctctccatcccggcgacgactggcgacagccgctgccggcctactccaggtccccaggtctacgtcggacccttcgccgcggcgaacaccaccaggtaacgcaacccttattctctccctgctgtgcgaaaccgagcacccaaaccctaatttaagctatttgtattcggatctgatctaattactacaagtggatatatggcgagcacggggcggtcgatgctgctgtcactgctcctcttcgcagtgacgctgtcgctgctggagatgtacagggccaagttcgcctcgtcggagctcatgaccattgccggtggattcgtctgctccctcctattcctgctactcctcacctttattggaaactatcaagaagctagtggagatagaactgggtggggtgcagttgttgtagcacaacttgtagctcttattgtagccggcactgtccaccgtgtctgtatcacaacatgcttcctgttttccgctggactcctttacgaggttgacaagctctctggcatgatccttgcgaggagtgagtctaaggtgaggcggcactaagcacagaagcagcacagagagatgatacatcgatatttttatgtgatttaccaccttttgccggtttcatgatgtcattttccttcagccatactcgcggtgcgttgcatctgtctgtgcaatatagttttgccatcttttgtcgctcatctgtt

SEQ ID NO: 210101 - DNA, 760 bp, Zea Mays
aaaaagatgttttccgagctgccccagaggcccagcccacggtgtcagtgtcacctctgctatttcttcacccgtccgttcacttgcgttcatccggcctacgttaaaatctctccatcccggcgacgactggcgacagccgctgccggcctactccaggtccccaggtctacgtcggacccttcgccgcggcgaacaccaccagagatctgtcactgattttgcagtcctcttgtcagatggcgagcacggggcggtcgatgctgctgtcactgctcctcttcgcagtgacgctgtcgctgctggagatgtacagggccaagttcgcctcgtcggagctcatgaccattgccggtggattcgtctgctccctcctattcctgctactcctcacctttattggaaactatcaagaagctagtggagatagaactgggtggggtgcagttgttgtagcacaacttgtagctcttattgtagccggcactgtccaccgtgtctgtatcacaacatgcttcctgttttccgctggactcctttacgaggttgacaagctctctggcatgatccttgcgaggagtgagtctaaggtgaggcggcactaagcacagaagcagcacagagagatgatacatcgatatttttatgtgatttaccaccttttgccggtttcatgatgtcattttccttcagccatactcgcggtgcgttgcatctgtctgtgcaatatagttttgccatcttttgtcgctcatctgtt

SEQ ID NO: 210102 - DNA, 2485 bp, Zea Mays
aaacactatcgccgtataatgagatttggcaggatgaatcaacgtgccgcatgcttgtgctactatttgccatctgaaccatgtcgtcgcggcgacgccagtcatcctcgtggcttcacagtccatcgacgggacaaagctgtgaatccatcaacggagtccccggattccttactacattcgttcgttccacgccgccgtagaaagcaacccgaagtccccaacgccaccggcaccggcacggcgaactcgggcacgcaccgcagccagccggccggttcggcaggcaggcaggcagagaggattgcattgcactgcttccatctcccctgcccgccccgccgcggcagatcccgaggcggctcgcacttccaggtcaactcaaagtacgcccgcgcccgcctagacgttgtcttccctccctgcactccccgccacgacgccgcagcagatccaccatcgacgcgcgcgccgcgcgccccgacgcggaacgctggatcccgcgcagcaggaggcggccaaccagtcgccgtcgcccccggcccccaccccgcctgccgcagcaagcggcgtccgctaccgcacgccctcgtccccggacctcctcctccccgccgacgccgccaagatgcgccgctactccgcgctgcccaacggcggccgccaggagacgctggccgaccgcgcgcaccgctaccggggcgtcgtgctcgtcatcctcgccccgctcgcgctcgtctctctcgtcctcctcctcatgccacgctcacccgctggcaccatgggcggcgcccggaggtccgggccggccggggcagacaggtacgccgtcatcttcgacgccggtagctccggcagccgcgtccacgtcttccgcttcgacgccaacctggatctcgtccgcattggcagcgagatcgagctcttcgtccagataaaaccggggcttagccactatgccaacgacccccgggaggctgccgagtcgctcgtctctctccttgacgatgccaagcgagtggtgcccgccgaattgcgcgaccaaacgcctgtcagggtcggggccaccgcagggctgagaaatttgggtgcacaaaaatccgaggcaatactgcaagcggttagggaccttcttcgcgaaaagagttcctttaaaaaccaaccggattgggttacagttcttgatggaacacaggaaggttactatcaattatctgttggggaacttgggaaagacttatgcagacacagttggagtagtcgatcttggtggtggatctgtccaaatggcatatgctattgcggagaaggatgcagaaaaggctcctaagccatccgatggggaagatgcatatgtgaagaaactgtttctcaaaggaaccacatattatctttatgttcatagttatttgcattatgggttgctggcagctagagcagaggtcttaaaagctggcaatggcaatggttacagcaactgtatgttagagggatttcaagggcaatacaaatatggcgacaattcatttgaagcatctgcttcaccttctggtgctagttattcaaaatgcaaggatgatgcagtgaaagctcttaaggttgatgaagcatgcacccacatgaagtgttcttttggtggcatttggaatggtggtggtggtgctggacagaataatctctttgtagcatcctttttcttcgatagggctgctgaggctggatttgtgaacgccaatgcacctgttgctaaggttaaaccctcagacttcagacaagctgctgagcgcgcttgctctttgagtgtgaagaacgccgaggctacctttcctggtgtccaaaaggataacattccatatatctgcatggaccttgtttatcagtacacattacttgtgcacggattcggcgttgatccagaccatgagatgaccttggtaaagaaggtcccctacagtggtgcatatgtcgaagccgcatggcctcttggcagtgccatcgaggtggcatcttcatcatagcaaggagacacagtttagcaaggtaacatcggacggcattgttgtcatgaagttttagcgttgggagtcccccccccccctgaccgcttactgaattcacaccattttgtcactcaatccatccatcctccccatacggtaacgggtagctttacacaccaagggaagcctcggctgtacttggttctagcggccattgtaagccctattactattattgttattaatatctgtatactactaatgcaagtaagatgagagcctcaggcattctttttgacctctgtatactgggatgtgcatgatataaagtgccatcattcgctcactcaaatgcgtacatgtttggtcattgtgtttactggcagccctttgctgctggaaaaagagtacatatttattaaccgtgtgggcctgagctgcttatctactgctggcttgctgtgccctgtgcctgtacagacgag

SEQ ID NO: 210103 - DNA, 2093 bp, Zea Mays
tactatttgccatctgaaccatgtcgtcgcggcgacgccagtcatcctcgtggcttcacagtccatcgacgggacaaagctgtgaatccatcaacggagtccccggattccttactacattcgttcgttccacgccgccgtagaaagcaacccgaagtccccaacgccaccggcaccggcacggcgaactcgggcacgcaccgcagccagccggccggttcggcaggcaggcaggcagagaggattgcattgcactgcttccatctcccctgcccgccccgccgcggcagatcccgaggcggctcgcacttccaggtcaactcaaagtacgcccgcgcagcaggaggcggccaaccagtcgccgtcgcccccggcccccaccccgcattggcagcgagatcgagctcttcgtccagataaaaccggggcttagccactatgccaacgacccccgggaggctgccgagtcgctcgtctctctccttgacgatgccaagcgagtggtgcccgccgaattgcgcgaccaaacgcctgtcagggtcggggccaccgcagggctgagaaatttgggtgcacaaaaatccgaggcaatactgcaagcgaggttttaggaattattcgtgggtgatgtgagagtgttcaggaatttctcctgaatcgtgctcctgtattcacacttaagtccagcaacaagtaacaagtattacctttccctctacttttaggttactatcaattatctgttggggaacttgggaaagacttatgcagacacagttggagtagtcgatcttggtggtggatctgtccaaatggcatatgctattgcggagaaggatgcagaaaaggctcctaagccatccgatggggaagatgcatatgtgaagaaactgtttctcaaaggaaccacatattatctttatgttcatagttatttgcattatgggttgctggcagctagagcagaggtcttaaaagctggcaatggcaatggttacagcaactgtatgttagagggatttcaagggcaatacaaatatggcgacaattcatttgaagcatctgcttcaccttctggtgctagttattcaaaatgcaaggatgatgcagtgaaagctcttaaggttgatgaagcatgcacccacatgaagtgttcttttggtggcatttggaatggtggtggtggtgctggacagaataatctctttgtagcatcctttttcttcgatagggctgctgaggctggatttgtgaacgccaatgcacctgttgctaaggttaaaccctcagacttcagacaagctgctgagcgcgcttgctctttgagtgtgaagaacgccgaggctacctttcctggtgtccaaaaggataacattccatatatctgcatggaccttgtttatcagtacacattacttgtgcacggattcggtattgacctgattgagatcgaacaaaacaaatcagaatagcataagcctgttctcacttttttttgcaaacattcttgtaggcgttgatccagaccatgagatgaccttggtaaagaaggtcccctacagtggtgcatatgtcgaagccgcatggcctcttggcagtgccatcgaggtggcatcttcatcatagcaaggagacacagtttagcaaggtaacatcggacggcattgttgtcatgaagttttagcgttgggagtcccccccccccctgaccgcttactgaattcacaccattttgtcactcaatccatccatcctccccatacggtaacgggtagctttacacaccaagggaagcctcggctgtacttggttctagcggccattgtaagccctattactattattgttattaatatctgtatactactaatgcaagtaagatgagagcctcaggcattctttttgacctctgtatactgggatgtgcatgatataaagtgccatcattcgctcactcaaatgcgtacatgtttggtcattgtgtttactggcagccctttgctgctggaaaaagagtacatatttattaaccgtgtgggcctgagctgcttatctactgctggcttgctgtgccctgtgcctgtacagacgag

SEQ ID NO: 210104 - DNA, 2393 bp, Zea Mays
catcctcgtggcttcacagtccatcgacgggacaaagctgtgaatccatcaacggagtccccggattccttactacattcgttcgttccacgccgccgtagaaagcaacccgaagtccccaacgccaccggcaccggcacggcgaactcgggcacgcaccgcagccagccggccggttcggcaggcaggcaggcagagaggattgcattgcactgcttccatctcccctgcccgccccgccgcggcagatcccgaggcggctcgcacttccaggtcaactcaaagtacgcccgcgcccgcctagacgttgtcttccctccctgcactccccgccacgacgccgcagcagatccaccatcgacgcgcgcgccgcgcgccccgacgcggaacgctggatcccgcgcagcaggaggcggccaaccagtcgccgtcgcccccggcccccaccccgcctgccgcagcaagcggcgtccgctaccgcacgccctcgtccccggacctcctcctccccgccgacgccgccaagatgcgccgctactccgcgctgcccaacggcggccgccaggagacgctggccgaccgcgcgcaccgctaccggggcgtcgtgctcgtcatcctcgccccgctcgcgctcgtctctctcgtcctcctcctcatgccacgctcacccgctggcaccatgggcggcgcccggaggtccgggccggccggggcagacaggtacgccgtcatcttcgacgccggtagctccggcagccgcgtccacgtcttccgcttcgacgccaacctggatctcgtccgcattggcagcgagatcgagctcttcgtccagataaaaccggggcttagccactatgccaacgacccccgggaggctgccgagtcgctcgtctctctccttgacgatgccaagcgagtggtgcccgccgaattgcgcgaccaaacgcctgtcagggtcggggccaccgcagggctgagaaatttgggtgcacaaaaatccgaggcaatactgcaagcggttagggaccttcttcgcgaaaagagttcctttaaaaaccaaccggattgggttacagttcttgatggaacacaggaaggtgcatacgagttactatcaattatctgttggggaacttgggaaagacttatgcagacacagttggagtagtcgatcttggtggtggatctgtccaaatggcatatgctattgcggagaaggatgcagaaaaggctcctaagccatccgatggggaagatgcatatgtgaagaaactgtttctcaaaggaaccacatattatctttatgttcatagttatttgcattatgggttgctggcagctagagcagaggtcttaaaagctggcaatggcaatggttacagcaactgtatgttagagggatttcaagggcaatacaaatatggcgacaattcatttgaagcatctgcttcaccttctggtgctagttattcaaaatgcaaggatgatgcagtgaaagctcttaaggttgatgaagcatgcacccacatgaagtgttcttttggtggcatttggaatggtggtggtggtgctggacagaataatctctttgtagcatcctttttcttcgatagggctgctgaggctggatttgtgaacgccaatgcacctgttgctaaggttaaaccctcagacttcagacaagctgctgagcgcgcttgctctttgagtgtgaagaacgccgaggctacctttcctggtgtccaaaaggataacattccatatatctgcatggaccttgtttatcagtacacattacttgtgcacggattcggcgttgatccagaccatgagatgaccttggtaaagaaggtcccctacagtggtgcatatgtcgaagccgcatggcctcttggcagtgccatcgaggtggcatcttcatcatagcaaggagacacagtttagcaaggtaacatcggacggcattgttgtcatgaagttttagcgttgggagtcccccccccccctgaccgcttactgaattcacaccattttgtcactcaatccatccatcctccccatacggtaacgggtagctttacacaccaagggaagcctcggctgtacttggttctagcggccattgtaagccctattactattattgttattaatatctgtatactactaatgcaagtaagatgagagcctcaggcattctttttgacctctgtatactgggatgtgcatgatataaagtgccatcattcgctcactcaaatgcgtacatgtttggtcattgtgtttactggcagccctttgctgctggaaaaagagtacatatttattaaccgtgtgggcctgagctgcttatctactgctggcttgctgtgccctgtgcctgtacagacgag

SEQ ID NO: 210105 - DNA, 2237 bp, Zea Mays
cacgtctcgtttggaaactcaaggcccccagctaaactggagagctgtcatgtgcacatgcttttattcagaattttattcagaaggaaaaatctggtacaaacactattacattatgcgccacggttacgcgcaccatgtccaggtgctagcgcatcgggttctgccaaatacatacgattgaaccagcatcattttaccagctgtgagcacgccagccgaagatccttgtggggctccctagctgtctacatctacaatcatcagaggagcttcacagccccgagcagccctcttcggtaggagccccaggtgaagcagcatagaattagctttcatcatcatcgtcagtttgagtagcatcttcccttgatttcttcactggacgcagaaattttccatttctggccctggacactttggagcctaaggagaccaaaaactctgaccacctgtacatagttacatacttttgtgaaaacttgaccagccacaaaagaatcaacaaaattgctaaacttcgtttataaaaaatccaccatcaagcttgttaaatactcatttaaacacagcaaccagcaaaattctccaaacaaagagatttaaaccttgttaccagtaacatggcaaaccaaatacgaagatgaaagtttatgctagcagtttagcacagtatgaccagaatttttactgaatcaacaagtgctggaaggaatggtatgtgccttatttacaatcctttgaattcatgaaatgattctgctttaatagcacacctaaaggaatactatactgcataattgttttgcttcacataaatttgagtggaactgagggcatacataaactgattccgtacggaaagcacagccaactacatagtcatggtatcatttatacatatatagcaaagaagttttcagcttaacagggataggggagggaataattaaaagatgacacataagaaagggaataacatgcaaacacaacatgccaacatggtaagtgataagtagctgttgttgcgaaagggcctctagctgagttgcttaggtggtttgagtagcacttctcaggtcctgagttcgactcagcgtgggagcgaattttaggctgtggttaaaaaaatgtcctcgtcccacgccaaagcacatgtctaaggcctggtcccggtcgatgtcgtgttctcacatgggctacggtgacactgtgtatgggtttggcaggggttccggggttttctcgacctgcgtgagaaagtatttttcttaatataatgctcggggctgacttaccactgcaggtcgagttttttataagtagttgtttctgccttgctatatctcagaaactaggccatagacaacagaaaaaataagggcttttcaatctattagaactaaatgtcattaccaaataccttggggaatgtcatgtattctaagtgtatagatacataaccaatctccatgcagatttcttcaggattgatatgacaagcggcatggttataaaaatgcaagtccatctgatttcttgacctgcgtgaggtctttttcttaatataatgccccggggctgacttaaacccccctccctttataagtagcagctgtttctgccttgctatatctcagaaactaggccataaacaggaaaaaataatggcttttcaatctattagaactaaatgtcattaccaaataccttggggaacgtcatatattctatgtgaaatagatacataaccaatctccatgcagatttcttcaggattgatatgccaagcagcatggttttgcaattctattttttatgatcctatggtttgcaatcctaccatttgagttccaatgccattaaggatcaccatttttttgacaaacttatacgccaactacgatcatgacaattcatgaaagcattcacttgtatttgtatacactgagcctatgaagttgtgctcacatggttgcgagtcatcattcacaaaataatatatcaaaattctaagaacctgttatggaacacataaccctccaaccttcatagctacaactacaagagctagattgtgcaagggcacattgcagtacattggactcacattaagttatcaacaaacacaagtttcaccatcaggtgaagttaagacagaaaacatactcctttatagccctgatggtgaaacctgtgtttgttgagattctgggttggtttcaggttttaccttt

SEQ ID NO: 210106 - DNA, 2331 bp, Zea Mays
cagctctcgggcatctgatgttttgagaaaaggtaagggatgcaatatgggctgaattcaatgagtgtgatgaccattttgggctttgcccaaagggggcaaaaaaaaacccaatatttatttccggggtccccaaaaacaatgaggaagaggtggctagtattgctgccatcactgaacagtctgcaggtgttcaaaatggacatcaagggaaggaaaaagcagactgcaagtcacacaagtgcacatatttcacccacacaaattgacatggaatcctggcccggacttccttccctgaatcctacacttgatagaaactatagtgatgacaacatagcatccacatatctggatttttgtgctgcaaccagtttacaagaagtgaccagaaattctacagagcaactagatggtaaatcagaagtgtttggtaatgatcaagaagaaaagagtaacagtttccttgattgcgactggggcaatattggaggttttgatgattttgaccgtctatttagccatagtgactccatatttggtaatgagatagttgccaacgacagtgattttctttctgcatcttcgaatttgatggatactgctgtgctatcaatcccagttccggtcgaagcacataagaggccagtgtggtcacgtagaaaaccagaggaaagaggtaaaagtaaaatatccagcagtacaagtggcttctcccacagcaaagtagagagttcatcgacgaatttgcaaactcctatggaacctgtacagactcctcaatatgcactgttccaggatagcaagaagataggagaagttcagcatgctaatcagtttatgtttcctggatatgggtatcctcctgcatatccatttcctaccattccgttagtgtcaaacattcaagctgaaggctatcagacaaaaccagctggcacaagctaccgaacttcggaagattacctaaaacagtcaagttccacagaaatgtcacaagatataccatcaagaccactaacaatgacaccacaagaaaagatagaaaagcttaggcgccggcaacaaatgcaagcactgatagctattcagcaacaacagcaacagtttggtcaacagggtcctggcagtgacacaatggtgtctcaagcatacacccctggtaacaaaaatccggattccttagggagttcaattgtcatagatgaaaacacaaataaggttatttcgcctgagatgattccaactgaccatgaccgggttcacaagagttctgcaatttcagatgatccctttatagaggaaaaaatatattatcagctacaagatgctcttggcaagttggataccaaaactcgactatgcattcgagatagtttgcttcgtttggtccatagtgcaacagagagaaagattgatggtgataggagcactaacaagactaataaagatgaagatgaagcttcggaagacgcatctactaggaaaacaaggtctccaaacaaggaagcagaaacaaccactaatccaattgatcgtatagtggcccatttgctgttccacagacattgctccaaggttgcaaaagcaacaaaagaaataatatcgtcaatccccttgactctagaacctgagccgaaggtacccttgggaactcctagggttccatcaaaagatcaacgagatgagcaagaaattgtgttgcaaccatcacaataatgtgagatgtgctagaagataaggttttactcaatttgagtaaacttatttgcatttagttagcctatgaatctaatgtcgtccttctaacgagtatacacatgctgattaatcaactgttcaggataaaaagttatgcaaatccagtgatgatggcagtcttatgatcgcctgtggccctggagatcgcttgtgtaatatgtagccatttcaacattgtaggatccttttattttcatcctgtaagaacatctcagattgtataggaacctacgattttgtgccgagccgtaaaaagagcaaaccttggctctggacataaggcgtgtttaggagcaagaggattaaagcaaaccttggctcttggctctggacataaggcgtgtttgggagcaagaggattaaagttgattgaaggggctaaaatccttttctattcaatttaaaatagtaagagagattttagtcctttcaatctttttatgatgcgtttggttgcaatgataagacgagacgagatgagataatccttcaaataatgttgtttggtttagggtcaaaggttgagataggattatctcagtgttgttccagttatccctcaaaattgga

SEQ ID NO: 210107 - DNA, 2044 bp, Zea Mays
cgcattctcccttccctggactattcttggtgggtggagagagccgcagaaggcagctggaagaggagaggaccgcgcgaggctccgtgccggcgagttcgggtgcttttcctgcggtccgagatgcgatcgttgggacccgggagatagcgcagctcgggttcgggttcgggggcggctaccgcgacggcggccgccacctgagcaggatgtttaactggaacgacgagcagcaccagagcaactagatggtaaatcagaagtgtttggtaatgatcaagaagaaaagagtaacagtttccttgattgcgactggggcaatattggaggttttgatgattttgaccgtctatttagccatagtgactccatatttggtaatgagatagttgccaacgacagtgattttctttctgcatcttcgaatttgatggatactgctgtgctatcaatcccagttccggtcgaagcacataagaggccagtgtggtcacgtagaaaaccagaggaaagaggtaaaagtaaaatatccagcagtacaagtggcttctcccacagcaaagtagagagttcatcgacgaatttgcaaactcctatggaacctgtacagactcctcaatatgcactgttccaggatagcaagaagataggagaagttcagcatgctaatcagtttatgtttcctggatatgggtatcctcctgcatatccatttcctaccattccgttagtgtcaaacattcaagctgaaggctatcagacaaaaccagctggcacaagctaccgaacttcggaagattacctaaaacagtcaagttccacagaaatgtcacaagatataccatcaagaccactaacaatgacaccacaagaaaagatagaaaagcttaggcgccggcaacaaatgcaagcactgatagctattcagcaacaacagcaacagtttggtcaacagggtcctggcagtgacacaatggtgtctcaagcatacacccctggtaacaaaaatccggattccttagggagttcaattgtcatagatgaaaacacaaataaggttatttcgcctgagatgattccaactgaccatgaccgggttcacaagagttctgcaatttcagatgatccctttatagaggaaaaaatatattatcagctacaagatgctcttggcaagttggataccaaaactcgactatgcattcgagatagtttgcttcgtttggtccatagtgcaacagagagaaagattgatggtgataggagcactaacaagactaataaagatgaagatgaagcttcggaagacgcatctactaggaaaacaaggtctccaaacaaggaagcagaaacaaccactaatccaattgatcgtatagtggcccatttgctgttccacagacattgctccaaggttgcaaaagcaacaaaagaaataatatcgtcaatccccttgactctagaacctgagccgaaggtacccttgggaactcctagggttccatcaaaagatcaacgagatgagcaagaaattgtgttgcaaccatcacaataatgataaaaagttatgcaaatccagtgatgatggcagtcttatgatcgcctgtggccctggagatcgcttgtgtaatatgtagccatttcaacattgtaggatccttttattttcatcctgtaagaacatctcagattgtataggaacctacgattttgtgccgagccgtaaaaagagcaaaccttggctctggacataaggcgtgtttaggagcaagaggattaaagcaaaccttggctcttggctctggacataaggcgtgtttgggagcaagaggattaaagttgattgaaggggctaaaatccttttctattcaatttaaaatagtaagagagattttagtcctttcaatctttttatgatgcgtttggttgcaatgataagacgagacgagatgagataatccttcaaataatgttgtttggtttagggtcaaaggttgagataggattatctcagtgttgttccagttatccctcaaaattgga

SEQ ID NO: 210108 - DNA, 2066 bp, Zea Mays
cgcattctcccttccctggactattcttggtgggtggagagagccgcagaaggcagctggaagaggagaggaccgcgcgaggctccgtgccggcgagttcgggtgcttttcctgcggtccgagatgcgatcgttgggacccgggagatagcgcagctcgggttcgggttcgggggcggctaccgcgacggcggccgccacctgagcaggatgtttaactggaacgacgagcagcaccagagcaactagatggtaaatcagaagtgtttggtaatgatcaagaagaaaagagtaacagtttccttgattgcgactggggcaatattggaggttttgatgattttgaccgtctatttagccatagtgactccatatttggtaatgagatagttgccaacgacagtgattttctttctgcatcttcgaatttgatggatactgctgtgctatcaatcccagttccggtcgaagcacataagaggccagtgtggtcacgtagaaaaccagaggaaagaggtaaaagtaaaatatccagcagtacaagtggcttctcccacagcaaagtagagagttcatcgacgaatttgcaaactcctatggaacctgtacagactcctcaatatgcactgttccaggatagcaagaagataggagaagttcagcatgctaatcagtttatgtttcctggatatgggtatcctcctgcatatccatttcctaccattccgttagtgtcaaacattcaagctgaaggctatcagacaaaaccagctggcacaagctaccgaacttcggaagattacctaaaacagtcaagttccacagaaatgtcacaagatataccatcaagaccactaacaatgacaccacaagaaaagatagaaaagcttaggcgccggcaacaaatgcaagcactgatagctattcagcaacaacagcaacagtttggtcaacagggtcctggcagtgacacaatggtgtctcaagcatacacccctggtaacaaaaatccggattccttagggagttcaattgtcatagatgaaaacacaaataaggttatttcgcctgagatgattccaactgaccatgaccgggttcacaagagttctgcaatttcagatgatccctttatagaggaaaaaatatattatcagctacaagatgctcttggcaagttggataccaaaactcgactatgcattcgagatagtttgcttcgtttggtccatagtgcaacagagagaaagattgatggtgataggagcactaacaagactaataaagatgaagatgaagcttcggaagacgcatctactaggaaaacaaggtctccaaacaaggaagcagaaacaaccactaatccaattgatcgtatagtggcccatttgctgttccacagacattgctccaaggttgcaaaagcaacaaaagaaataatatcgtcaatccccttgactctagaacctgagccgaaggtacccttgggaactcctagggttccatcaaaagatcaacgagatgagcaagaaattgtgttgcaaccatcacaataatgtgagatgtgctagaagataaggataaaaagttatgcaaatccagtgatgatggcagtcttatgatcgcctgtggccctggagatcgcttgtgtaatatgtagccatttcaacattgtaggatccttttattttcatcctgtaagaacatctcagattgtataggaacctacgattttgtgccgagccgtaaaaagagcaaaccttggctctggacataaggcgtgtttaggagcaagaggattaaagcaaaccttggctcttggctctggacataaggcgtgtttgggagcaagaggattaaagttgattgaaggggctaaaatccttttctattcaatttaaaatagtaagagagattttagtcctttcaatctttttatgatgcgtttggttgcaatgataagacgagacgagatgagataatccttcaaataatgttgtttggtttagggtcaaaggttgagataggattatctcagtgttgttccagttatccctcaaaattgga

SEQ ID NO: 210109 - DNA, 2331 bp, Zea Mays
cgcattctcccttccctggactattcttggtgggtggagagagccgcagaaggcagctggaagaggagaggaccgcgcgaggctccgtgccggcgagttcgggtgcttttcctgcggtccgagatgcgatcgttgggacccgggagatagcgcagctcgggttcgggttcgggggcggctaccgcgacggcggccgccacctgagcaggatgtttaactggaacgacgagcagcaccaggtaagggatgcaatatgggctgaattcaatgagtgtgatgaccattttgggctttgcccaaagggggcaaaaaaaaacccaatatttatttccggggtccccaaaaacaatgaggaagaggtggctagtattgctgccatcactgaacagtctgcaggtgttcaaaatggacatcaagggaaggaaaaagcagactgcaagtcacacaagtgcacatatttcacccacacaaattgacatggaatcctggcccggacttccttccctgaatcctacacttgatagaaactatagtgatgacaacatagcatccacatatctggatttttgtgctgcaaccagtttacaagaagtgaccagaaattctacagagcaactagatggtaaatcagaagtgtttggtaatgatcaagaagaaaagagtaacagtttccttgattgcgactggggcaatattggaggttttgatgattttgaccgtctatttaggtcgaagcacataagaggccagtgtggtcacgtagaaaaccagaggaaagaggtaaaagtaaaatatccagcagtacaagtggcttctcccacagcaaagtagagagttcatcgacgaatttgcaaactcctatggaacctgtacagactcctcaatatgcactgttccaggatagcaagaagataggagaagttcagcatgctaatcagtttatgtttcctggatatgggtatcctcctgcatatccatttcctaccattccgttagtgtcaaacattcaagctgaaggctatcagacaaaaccagctggcacaagctaccgaacttcggaagattacctaaaacagtcaagttccacagaaatgtcacaagatataccatcaagaccactaacaatgacaccacaagaaaagatagaaaagcttaggcgccggcaacaaatgcaagcactgatagctattcagcaacaacagcaacagtttggtcaacagggtcctggcagtgacacaatggtgtctcaagcatacacccctggtaacaaaaatccggattccttagggagttcaattgtcatagatgaaaacacaaataaggttatttcgcctgagatgattccaactgaccatgaccgggttcacaagagttctgcaatttcagatgatccctttatagaggaaaaaatatattatcagctacaagatgctcttggcaagttggataccaaaactcgactatgcattcgagatagtttgcttcgtttggtccatagtgcaacagagagaaagattgatggtgataggagcactaacaagactaataaagatgaagatgaagcttcggaagacgcatctactaggaaaacaaggtctccaaacaaggaagcagaaacaaccactaatccaattgatcgtatagtggcccatttgctgttccacagacattgctccaaggttgcaaaagcaacaaaagaaataatatcgtcaatccccttgactctagaacctgagccgaaggtacccttgggaactcctagggttccatcaaaagatcaacgagatgagcaagaaattgtgttgcaaccatcacaataatgtgagatgtgctagaagataaggataaaaagttatgcaaatccagtgatgatggcagtcttatgatcgcctgtggccctggagatcgcttgtgtaatatgtagccatttcaacattgtaggatccttttattttcatcctgtaagaacatctcagattgtataggaacctacgattttgtgccgagccgtaaaaagagcaaaccttggctctggacataaggcgtgtttaggagcaagaggattaaagcaaaccttggctcttggctctggacataaggcgtgtttgggagcaagaggattaaagttgattgaaggggctaaaatccttttctattcaatttaaaatagtaagagagattttagtcctttcaatctttttatgatgcgtttggttgcaatgataagacgagacgagatgagataatccttcaaataatgttgtttggtttagggtcaaaggttgagataggattatctcagtgttgttccagttatccctcaaaattgga

SEQ ID NO: 210110 - DNA, 1960 bp, Zea Mays
cgcattctcccttccctggactattcttggtgggtggagagagccgcagaaggcagctggaagaggagaggaccgcgcgaggctccgtgccggcgagttcgggtgcttttcctgcggtccgagatgcgatcgttgggacccgggagatagcgcagctcgggttcgggttcgggggcggctaccgcgacggcggccgccacctgagcaggatgtttaactggaacgacgagcagcaccagagcaactagatggtaaatcagaagtgtttggtaatgatcaagaagaaaagagtaacagtttccttgattgcgactggggcaatattggaggttttgatgattttgaccgtctatttaggtcgaagcacataagaggccagtgtggtcacgtagaaaaccagaggaaagaggtaaaagtaaaatatccagcagtacaagtggcttctcccacagcaaagtagagagttcatcgacgaatttgcaaactcctatggaacctgtacagactcctcaatatgcactgttccaggatagcaagaagataggagaagttcagcatgctaatcagtttatgtttcctggatatgggtatcctcctgcatatccatttcctaccattccgttagtgtcaaacattcaagctgaaggctatcagacaaaaccagctggcacaagctaccgaacttcggaagattacctaaaacagtcaagttccacagaaatgtcacaagatataccatcaagaccactaacaatgacaccacaagaaaagatagaaaagcttaggcgccggcaacaaatgcaagcactgatagctattcagcaacaacagcaacagtttggtcaacagggtcctggcagtgacacaatggtgtctcaagcatacacccctggtaacaaaaatccggattccttagggagttcaattgtcatagatgaaaacacaaataaggttatttcgcctgagatgattccaactgaccatgaccgggttcacaagagttctgcaatttcagatgatccctttatagaggaaaaaatatattatcagctacaagatgctcttggcaagttggataccaaaactcgactatgcattcgagatagtttgcttcgtttggtccatagtgcaacagagagaaagattgatggtgataggagcactaacaagactaataaagatgaagatgaagcttcggaagacgcatctactaggaaaacaaggtctccaaacaaggaagcagaaacaaccactaatccaattgatcgtatagtggcccatttgctgttccacagacattgctccaaggttgcaaaagcaacaaaagaaataatatcgtcaatccccttgactctagaacctgagccgaaggtacccttgggaactcctagggttccatcaaaagatcaacgagatgagcaagaaattgtgttgcaaccatcacaataatgtgagatgtgctagaagataaggataaaaagttatgcaaatccagtgatgatggcagtcttatgatcgcctgtggccctggagatcgcttgtgtaatatgtagccatttcaacattgtaggatccttttattttcatcctgtaagaacatctcagattgtataggaacctacgattttgtgccgagccgtaaaaagagcaaaccttggctctggacataaggcgtgtttaggagcaagaggattaaagcaaaccttggctcttggctctggacataaggcgtgtttgggagcaagaggattaaagttgattgaaggggctaaaatccttttctattcaatttaaaatagtaagagagattttagtcctttcaatctttttatgatgcgtttggttgcaatgataagacgagacgagatgagataatccttcaaataatgttgtttggtttagggtcaaaggttgagataggattatctcagtgttgttccagttatccctcaaaattgga

SEQ ID NO: 210111 - DNA, 1730 bp, Zea Mays
gtcggagaccaacgccacgccgacatcgacagcactgatccgacaagtcgccgtttctgccctaagcacggacgctgttggtcacactcgcggagccccatccttccctcccggtctctccttgcgagctagtaccctacttgctgcacagtgccacaccgctcgcgctggagtatgggttcgagcccgatgtggtggtcaggaccaccaccgtcgccgtggagccgcggtttagggaaatggtgggcgctggtagggccattcgtggtgaaggccgtcgggttcctgctgctcgcgggcctcttgttccgggtgctctggtcctttccgtcctctccggcgccggcgttgcagatcacaaaaggaaaatgcagtcttttcaatggggaatggataccaaacccctctggtccagcctatacaaatgcaagctgtcgatttatcgacgatcaccagaactgcatgatgaatgtaagatttctagattctgtgagaaacaaaggttggggactaattggtgactccatccttcgtaaccaagttcagtcattgctttgccttctgtctaaggctgaagaacctgttgaggtttaccatgataacgaattcaaaaacaggagatggcacttccaatcctacaacttcacagtgtccatcgtctgggctcctttcctcatcaaatctggtatttttgagaatgaggatggcgtgtctacctctgaaatacagctccaccttgatatactcgatgctaactggacaagtcagtatgagagctttgactatattattatttctggcggacaatggtttctgaggacagcggtctactgggagaacggtgcagtggttggtggtcataattctcagaacaagaacgtcgctgaacttggttttgagcacctgtatcagaaaactctacaaaacgttttcaacttcatcgtctcagcgaaacacaagccagtaattttcttcaggacctggtcacctgatcacttcgaggatggagagtggttcagcggtgggtcttgtcgcaggaaattgccctacaacaagggagagtacagagagggtaacatcgagcgtgtcatgagacagatcgagcttgagtccttcaacaaggctgtagccgcgcttaggggttcagcggacatggatagactgagactgatggatacctacagcctctcgtccttgagaccggacggccacgttgggccttacagaacaccctatccctttgcaaggggcagcagtaaatccacgcccgttcaaaatgattgcttgcactggtgtgtaccaggccccattgatgcatggaatgatcttgttatgaagatggccctggatccatgaaaaccttatggatttgtatggtgtgctcttatggagtaagtagcagctaagtgggcacaaaaaagtgtgtccgttttggtttagctgtaaaataggagtgctagcaaatagagaaacctcagggttggctttgttgcaaagatatgtgtatgttgttttaaagctttataagtttcaactgggcagatactgccagttgttcctggtttaacaggttggccctcgatgctgactgttcaagcgtaccatgaattttgagatggtagcaagaagtaaccttcaatccaccgttcagccaggcatgactgctccagctgacgaactcttctaatttagaaatacaggggtttaggattgtttaggatggctccaga

SEQ ID NO: 210112 - DNA, 3305 bp, Zea Mays
ttgattatgagaaaaatacaaatggacagttagtgcaacatttggacaagccagatctcaacaccttcggtcactcaaataccaaaaaatataaattctctcatattaagaacacatatttaaattttaatcaaatggctccaattattcccaaatttaattattttttccaaatgttgcactagttgtccatttgtattttttgcgttgtagactgcattgttcacagaatgaagtttgaaatacaagatgggatgagagataggatgtgtaagctgctcgtgtcatgtacggtaaaacgttcactaggcgcaggcgcgcgcgtgatgtccggcgagcagtcgagcgcgcggccacagagcgggcagcagcgcatgctgcaaatcagccacagatagcaagtggctaagattagggaagatggctaagattaggaaagaagcagtctatcaggctagagagaatcaaggagacttgctccatttgtaattggccaccggccatatattcatgtatgcagcacgattacagaaaaaaaaaagaatttatccttcttctacctctagcctcttaagcctgcggttaggggggcataaccccgaccggagaagacggccgacggctacgagctacgtagccgaggtccggcgagtcagggattccaggtccttgacagcgaaccggcgccatgacggggtgccgtcatcttcttgcagctgaatgtaccagtgttgcgcgatgccctcgagattgtatgaggccatccacacttgctcctccggcgaggaacaatggtggcgaaaatatgactcacacttgttgatgaagaggagaggatcggttttgccatcaaaccgagggaagtcccatttctggaatttcggcgggcggtcggcgtcgcgcgggcgttcatgcatggcgccgccggaggacgacgacgcggacttctccttcaggccggagatgtcggcctgcatctccttcatcatctccactacgtcggcaagggtgtactcagacatggcgctggaggcagaggaacgggtgggtgatggaggtggtgtgtggctggtggggggttcggtggactgggaattgctggacgaagatcgccggactcgtgataccaagctgtcaaggacctggaatccctgactcgccggacctcggctacgtagctcgtagccgtcggccgtcttctccggtcggggttatgcccccctaaccgcaggcttaagaggctagagcatgcgctgctgcccgctctgtggccgcgcgctcgactgctcgccggacatcacgcgcgcgcctgcgcctagtgaacgttttaccgtacatgacatctcgagatcgccttaaagatttgagtggtacaaggctacaagctttagttggccacttgtactgttctctaccaatatattatttggcaaatactgttcttcaggtgtccacttgaggctttccataagaaccgccaaccgctcgttaagattgtgtttttgctcatttacatttctgccttgatgttttgagaaagatacccaacaagtgcctcatatctgcaaacacccttgccgtacaatgctttgaagaccacaataatcactcgctgctagcaatgagatctattaagataaatgataattgaggacatcaaccaaattaattacagttactgtacaagcatgggacaacacatgctacatggcttattaaactttcataagttaggtcagctgttcaacctactgtgctgtgactcagcattcagcaatatttaaggctatgcatgtccttggatgtagacaccggaatgatctcacttcattattatccataaaaaaatatgggaccaacgagttaggaaaatgcagtcttttcaatggggaatggataccaaacccctctggtccagcctatacaaatgcaagctgtcgatttatcgacgatcaccagaactgcatgatgaatggtagacctgataaggaatatctacattggaagtggaaaccttatggatgtgatcttccaccatttgatgcagtaagatttctagattctgtgagaaacaaaggttggggactaattggtgactccatccttcgtaaccaagttcagtcattgctttgccttctgtctaaggctgaagaacctgttgaggtttaccatgataacgaattcaaaaacaggagatggcacttccaatcctacaacttcacagtgtccatcgtctgggctcctttcctcatcaaatctggtatttttgagaatgaggatggcgtgtctacctctgaaatacagctccaccttgatatactcgatgctaactggacaagtcagtatgagagctttgactatattattatttctggcggacaatggtttctgaggacagcggtctactgggagaacggtgcagtggttggtggtcataattctcagaacaagaacgtcgctgaacttggttttgagcacctgtatcagaaaactctacaaaacgttttcaacttcatcgtctcagcgaaacacaagccagtaattttcttcaggacctggtcacctgatcacttcgaggatggagagtggttcagcggtgggtcttgtcgcaggaaattgccctacaacaagggagagtacagagagggtaacatcgagcgtgtcatgagacagatcgagcttgagtccttcaacaaggctgtagccgcgcttaggggttcagcggacatggatagactgagactgatggatacctacagcctctcgtccttgagaccggacggccacgttgggccttacagaacaccctatccctttgcaaggggcagcagtaaatccacgcccgttcaaaatgattgcttgcactggtgtgtaccaggccccattgatgcatggaatgatcttgttatgaagatggccctggatccatgaaaaccttatggatttgtatggtgtgctcttatggagtaagtagcagctaagtgggcacaaaaaagtgtgtccgttttggtttagctgtaaaataggagtgctagcaaatagagaaacctcagggttggctttgttgcaaagatatgtgtatgttgttttaaagctttataagtttcaactgggcagatactgccagttgttcctggtttaacaggttggccctcgatgctgactgttcaagcgtaccatgaattttgagatggtagcaagaagtaaccttcaatccaccgttcagccaggcatgactgctccagctgacgaactcttctaatttagaaatacaggggtttaggattgtttaggatggctccaga

SEQ ID NO: 210113 - DNA, 2011 bp, Zea Mays
agcgaaccggcgccatgacggggtgccgtcatcttcttgcagctgaatgtaccagtgttgcgcgatgccctcgagattgtatgaggccatccacacttgctcctccggcgaggaacaatggtggcgaaaatatgactcacacttgttgatgaagaggagaggatcggttttgccatcaaaccgagggaagtcccatttctggaatttcggcgggcggtcggcgtcgcgcgggcgttcatgcatggcgccgccggaggacgacgacgcggacttctccttcaggccggagatgtcggcctgcatctccttcatcatctccactacgtcggcaagggtgtactcagacatggcgctggaggcagaggaacgggtgggtgatggaggtggtgtgtggctggtggggggttcggtggactgggaattgctggacgaagatcgccggactcgtgataccaagctgtcaaggacctggaatccctgactcgccggacctcggctacgtagctcgtagccgtcggccgtcttctccggtcggggttatgcccccctaaccgcaggcttaagaggctagaggaaaatgcagtcttttcaatggggaatggataccaaacccctctggtccagcctatacaaatgcaagctgtcgatttatcgacgatcaccagaactgcatgatgaatggtagacctgataaggaatatctacattggaagtggaaaccttatggatgtgatcttccaccatttgatgcagtaagatttctagattctgtgagaaacaaaggttggggactaattggtgactccatccttcgtaaccaagttcagtcattgctttgccttctgtctaaggctgaagaacctgttgaggtttaccatgataacgaattcaaaaacaggagatggcacttccaatcctacaacttcacagtgtccatcgtctgggctcctttcctcatcaaatctggtatttttgagaatgaggatggcgtgtctacctctgaaatacagctccaccttgatatactcgatgctaactggacaagtcagtatgagagctttgactatattattatttctggcggacaatggtttctgaggacagcggtctactgggagaacggtgcagtggttggtggtcataattctcagaacaagaacgtcgctgaacttggttttgagcacctgtatcagaaaactctacaaaacgttttcaacttcatcgtctcagcgaaacacaagccagtaattttcttcaggacctggtcacctgatcacttcgaggatggagagtggttcagcggtgggtcttgtcgcaggaaattgccctacaacaagggagagtacagagagggtaacatcgagcgtgtcatgagacagatcgagcttgagtccttcaacaaggctgtagccgcgcttaggggttcagcggacatggatagactgagactgatggatacctacagcctctcgtccttgagaccggacggccacgttgggccttacagaacaccctatccctttgcaaggggcagcagtaaatccacgcccgttcaaaatgattgcttgcactggtgtgtaccaggccccattgatgcatggaatgatcttgttatgaagatggccctggatccatgaaaaccttatggatttgtatggtgtgctcttatggagtaagtagcagctaagtgggcacaaaaaagtgtgtccgttttggtttagctgtaaaataggagtgctagcaaatagagaaacctcagggttggctttgttgcaaagatatgtgtatgttgttttaaagctttataagtttcaactgggcagatactgccagttgttcctggtttaacaggttggccctcgatgctgactgttcaagcgtaccatgaattttgagatggtagcaagaagtaaccttcaatccaccgttcagccaggcatgactgctccagctgacgaactcttctaatttagaaatacaggggtttaggattgtttaggatggctccaga

SEQ ID NO: 210114 - DNA, 1514 bp, Zea Mays
tacaaggctacaagctttagttggccacttgtactgttctctaccaatatattatttggcaaatactgttcttcaggaaaatgcagtcttttcaatggggaatggataccaaacccctctggtccagcctatacaaatgcaagctgtcgatttatcgacgatcaccagaactgcatgatgaatggtagacctgataaggaatatctacattggaagtggaaaccttatggatgtgatcttccaccatttgatgcagtaagatttctagattctgtgagaaacaaaggttggggactaattggtgactccatccttcgtaaccaagttcagtcattgctttgccttctgtctaaggctgaagaacctgttgaggtttaccatgataacgaattcaaaaacaggagatggcacttccaatcctacaacttcacagtgtccatcgtctgggctcctttcctcatcaaatctggtatttttgagaatgaggatggcgtgtctacctctgaaatacagctccaccttgatatactcgatgctaactggacaagtcagtatgagagctttgactatattattatttctggcggacaatggtttctgaggacagcggtctactgggagaacggtgcagtggttggtggtcataattctcagaacaagaacgtcgctgaacttggttttgagcacctgtatcagaaaactctacaaaacgttttcaacttcatcgtctcagcgaaacacaagccagtaattttcttcaggacctggtcacctgatcacttcgaggatggagagtggttcagcggtgggtcttgtcgcaggaaattgccctacaacaagggagagtacagagagggtaacatcgagcgtgtcatgagacagatcgagcttgagtccttcaacaaggctgtagccgcgcttaggggttcagcggacatggatagactgagactgatggatacctacagcctctcgtccttgagaccggacggccacgttgggccttacagaacaccctatccctttgcaaggggcagcagtaaatccacgcccgttcaaaatgattgcttgcactggtgtgtaccaggccccattgatgcatggaatgatcttgttatgaagatggccctggatccatgaaaaccttatggatttgtatggtgtgctcttatggagtaagtagcagctaagtgggcacaaaaaagtgtgtccgttttggtttagctgtaaaataggagtgctagcaaatagagaaacctcagggttggctttgttgcaaagatatgtgtatgttgttttaaagctttataagtttcaactgggcagatactgccagttgttcctggtttaacaggttggccctcgatgctgactgttcaagcgtaccatgaattttgagatggtagcaagaagtaaccttcaatccaccgttcagccaggcatgactgctccagctgacgaactcttctaatttagaaatacaggggtttaggattgtttaggatggctccaga

SEQ ID NO: 210115 - DNA, 1508 bp, Zea Mays
tggtctgctactctgaaattaataaaacttaataacacgacactattttgtattttcaatactttgccaggaaaatgcagtcttttcaatggggaatggataccaaacccctctggtccagcctatacaaatgcaagctgtcgatttatcgacgatcaccagaactgcatgatgaatggtagacctgataaggaatatctacattggaagtggaaaccttatggatgtgatcttccaccatttgatgcagtaagatttctagattctgtgagaaacaaaggttggggactaattggtgactccatccttcgtaaccaagttcagtcattgctttgccttctgtctaaggctgaagaacctgttgaggtttaccatgataacgaattcaaaaacaggagatggcacttccaatcctacaacttcacagtgtccatcgtctgggctcctttcctcatcaaatctggtatttttgagaatgaggatggcgtgtctacctctgaaatacagctccaccttgatatactcgatgctaactggacaagtcagtatgagagctttgactatattattatttctggcggacaatggtttctgaggacagcggtctactgggagaacggtgcagtggttggtggtcataattctcagaacaagaacgtcgctgaacttggttttgagcacctgtatcagaaaactctacaaaacgttttcaacttcatcgtctcagcgaaacacaagccagtaattttcttcaggacctggtcacctgatcacttcgaggatggagagtggttcagcggtgggtcttgtcgcaggaaattgccctacaacaagggagagtacagagagggtaacatcgagcgtgtcatgagacagatcgagcttgagtccttcaacaaggctgtagccgcgcttaggggttcagcggacatggatagactgagactgatggatacctacagcctctcgtccttgagaccggacggccacgttgggccttacagaacaccctatccctttgcaaggggcagcagtaaatccacgcccgttcaaaatgattgcttgcactggtgtgtaccaggccccattgatgcatggaatgatcttgttatgaagatggccctggatccatgaaaaccttatggatttgtatggtgtgctcttatggagtaagtagcagctaagtgggcacaaaaaagtgtgtccgttttggtttagctgtaaaataggagtgctagcaaatagagaaacctcagggttggctttgttgcaaagatatgtgtatgttgttttaaagctttataagtttcaactgggcagatactgccagttgttcctggtttaacaggttggccctcgatgctgactgttcaagcgtaccatgaattttgagatggtagcaagaagtaaccttcaatccaccgttcagccaggcatgactgctccagctgacgaactcttctaatttagaaatacaggggtttaggattgtttaggatggctccaga

SEQ ID NO: 210116 - DNA, 1244 bp, Zea Mays
tgaacgagcgaccgaacaagctataaaaaaaaggtgacgttcctcaagtgcggcggcgtggtgctgggcacgggcatccaccacgtgaccatggacggcatgggcgcgttccacttcatccagacctggaccggcgtggcgcggggcctcgacacggccgaggcgtgcggcccgctgccgttccacgaccggacgctcctccgcgcgcgctctccgccggccccggccttcgaccacccggtctactcgccggctctgctcaacggcgtgccccggcccttcgtcacccgcgtctacgccgtctccccgaagcttctcgctggcatcaagtcccgctgcgcgccgggcgtgtccacctactgcgccgtcaccgcgcacctctggcgttgcatgtgcgtcgcgcgcgggctcgccccgggctcggacacgcggctccgcgtgccggccaacgtccgccaccgcctgcgcccgccgctcccgcggagctacttcggcaacgccatcgtgcgcgacctcgtgaccacccgggtggaggacgtcctggaacgcccgctcgggttcgtggcgcaggcgatcaaggacgcggtggaccgcgtcaatgacgcctacgtgcgctccgtggtcgactacctggaggtggagtcggagaagggcagccaggcggcgcgcgggcagctcatgccggagtccgacctgtgggtggtcagctggctcgggatgcccatgtacgacgccgacttcgggtggggcacgccgcggttcgtcgcgccggcgcagatgttcggcagcggcacggcctacgtcacgcagcgcgccaacagggacgacggcctcgccgtgctcttcgggctggagcccgagtatctgcagtgcttcgaaaaggtgttctatggagagtgagtcgtgagattactagtgtcatccgcgtttcgtcgtgagcaccgagtgcgattactgtagcttggaacctgatgctgtggatgtgggctttgcaaattactccggtttctgtgttttttttcctagtattctcatgtggtttttaggtgctcagtcgagacttgagagagaacatagctgcgttgactttagcatggtttaatttcaactctatgggtctctatctattgtcacattagctatccaccgtactatcgattctattgtcggccgttgtcaaccatatctatagcatggtcgtacaaaaaatatgaaaataaaaaacaacatcatcataaataaaa

SEQ ID NO: 210117 - DNA, 797 bp, Zea Mays
ggaatgttcggtgttcacgcgtgcatgcaagcatggtgaccggagaaggtgtcaggattcagcccaacaccagcaagctggaggacttggggttcagattcaagtacggagtggaggagacgctggactgcagcgtcgagtgcgccaagaggctgggagagctctagatgcatgctacacatgcatgcgcagcattggaattcagcgactgtgatacgagagctagtgatggttcgtcactttactacatcgaacggtggtcgtggaggatgacgaggtcgtcatgtcttgttgatgccggcactacatagagggtacgtgctgtgaggtcatgatccaatgcaccatcacagagacatccaccgtaggaactcggatccccatactcgtgtgcacgactaccattgttatgtgatgttgatgcaagtgaacttggaggcaacataatggtggtgcaccgttaagccagctggaggcgataagatcgtatatcaccacgaacggcctgcgctttgtgtcgcccgacatgttggtaggtgtttgaccgcatgcatgagttagtatgtgaaagctaactttctagagcttttataaaataacgtagaaagttaggtttatttcctagagctaccagctgcctctcgaaagttatttatttcctacggtttgttatgaaagtcgtaagaagttaaaaaaaccgtaggaagtgtatgattttggtgtagtgtgagagaggagaacgatgacgacaatatgggtgatgattaagcagatccataccagggtttttgtgactg

SEQ ID NO: 210118 - DNA, 1249 bp, Zea Mays
tcaatgacatgtggggtccatggtatattagcggatgataatcagagaggaggaggcaacacggcacgctaacaaaaaccagaccacgcggaacggcaacagcaagctgcctctctcccttgcgcgcgcgtgatttcatcttcgtccgatcccatcccaccccaccccacctcaccggagcccctctccccctaactcctccggcagctgctccgatcccgaaccgtgattcgctcgatggcggcaaccgcgggcggcaacaagatccgcaacgccaagctggttcttcttggggacgtgggcgccggcaagtccagcctggtcctccggtttgtgaaaggccagttcgtcgagttccaggaatccaccatcggcgcggctttcttctcgcagaccctggcggtgaacgacgagacggtcaagttcgagatatgggacacggcggggcaggagcggtaccacagcttggctcccatgtattaccggggcgctgcggctgccatagttgtctacgacatcacgaacgcggcctcttttacgcgtgcgaagaaatgggttcaagaacttcaagcacaaggaaactcgaatacaatagtggctcttgccgggaacaaggctgatttgttagatacgaggaagcaaaggcgtatgctcaagagaatggtctcttcttcatggaaacttctgccaaaacagctaccaatgtgaacgacgtgttctatgagattgcgaagaaactgcttcaagggcagcaggttcagaacccacaaggcgggatggttctcaaccagagaccacctgagaggatggtgagctcttcttcctgctgtgcgtgaagcgcaagatggaagtgtggatcacatgttccatggcctggactccaggagtattaggtgcgcggaggcggggaagaatgttgccgaatcttgtgaagtggttgccatcccagttgctgaaatcctgtacttttcactgcttgttcgttgccgtgttccttgtaaatgtgaatacttattactttggagactcacgtcacgtgttcttacggtgcatgatcgtgcttgtctttctatgacttgagagaacagagtgaaacaagacagattcgtttgattcacttataccaattacacgatgataaaatttatgggtttaaaggtttctagatgcaactcttttatcagtttgatgatcagtggggtgaacccaaacgacaatgttcagatgtgcatcagtttgatgtacagaa

SEQ ID NO: 210119 - DNA, 1593 bp, Zea Mays
actctcgcgccgtggccccggtttgcagcccctcgctctcttctaagcaccatggatgtggataatatttgtgatattgacaacaatgtgtctaatgaagatgagatacatggtattgggggggggggggatgttaatggcaatgacagtgaccacatggaggaggaggatcatgttcttacacctactggtagtgaggtgaatgtcagaaaaaacaaatccatagatggagacaatcgtgtggtgaaacgactactagcaaccaagtcaactagtacctctacaagcaagtttatggcatcagcatttaaagcaacaaggtcaaacaagagcacagatttagtgcctcaacctcaagtttcgaaagttgcacaagatgcaagtgcgagtgcaagtgaaaatgcaagcatagctgcaagtgtccaaataagcactgaagatgattgtgatgaagaattagatgtcaagaaaaagaagctcacttcatgggtttgggagcattttacaagatggtgtgatagtagtgatcccataatctgcactatggcatactctatgagagacaagtttgataagtactgggagatgaacaatatggctttggcagtgggagcatttcttgatcctaggtacaaacacagaatggttgagctatacatgtctaagatgtatgatagtgagatggccgagttggagaaaatgacattcatgaatgttatcaatgaattatttgcattctattcatcaaccatcaatgcaaaatcaactaataagggtactagctcgaaggattctgtggcaagcaaaaatgttgttttgatggatgacgatgatgagaatgaggttaatcttgatgagttatatgcagcaacaaacaatgtgaagaaagtgtctgaattggatctttacatgagtgacggcctagtgaaggctaatgaaggtgatgcaccatttgatgccttatcatggtggaaggggcaagtgacaaattttcctattctttctagccttgctcgtgatgtactatcaatgcaagtgtcaactgttgcttcagagtcggcatttagctctggtggacgtgtggttgattccttccgttcgaagcttaaacctaaaattattgaagccttggtttgtactaaggattggaagcttgcttcagacaaagatttggagggtgaaataaaaactataagtgaagctatgaatgctatggaggtggacgatgaggttgcgacttgagatcttcaagcaagcatggattgcttgcactatcttatgttatttaaaaactatcctttattgtaatagtctattgtgttgaactgtcttgtgctatgttaaactcttgggtgatgtgaacttatgaacgattgtgttagactattgtatggtgtgaacttattgctatattgtgttgttgatctatggtttatgtaatgctatattgtatgatgtgttgaatgatgtgaacttattgctatattatcatgttgaactattgtcttgtatgatgtgaatttattgttatattgtcatgctagagtactatattgtatgatgtaaacttattgatatattattatgttagag

SEQ ID NO: 210120 - DNA, 2020 bp, Zea Mays
caaagtcggacgcacaaagcggggagggcgaattccgcacgaaacacgcagaccatatatgcccatggcatttatttttttcccgctcagtctaagagagaggtcgtaaccgtcgccgatgcaagcagcaaaatactcacccgagcagaaagaaagaagcacgcgcatctctcacccgcgagcagaaggaagcacgcactctcccacacttgccagcccgctgcactgcactgcacacacgccctctcactcgctccccgctctagcctcgtcccaactcccagtcccgcatcgtctccgaaatctcttcatctaccggcggcgcaagcccgaccgcgctgcctctctctctctctctctccctcttcccactctccgtgcggagttctcttctctcgcgtgctcgcatatagtcgcatcgttagggcgcgtcctgggagagggaggccttcgctacctccgtggcagcgacagacgaccatgaaggcgctgctggtgacggtgcttctcctcctctcttccaccctcgccgcgtcacagtggtgcgtgtgcaggcaggacgcgtctcaggccgcgctgcagaagacgatcgactacgcgtgcgggtcgggggcggactgcaactccatccacgagacgggggcgtgctacaaccccaacaccgtcgcggcgcactgctcctgggcggccaacagctactaccagaacaacaaggccaagggcgccacctgcgacttcaccggcaccgccgccctcaccaccagcgacccaagtaaacgcgccccctccacacccctccttgcctagagagcattacgttatctacacgctggctgggttagaattgccaagagaagatgaagagtagagaggtttagggcttgtaggtaatggagaggattgatgggactagaatctctcactattcaattttcaattttaaatagcgagagattttagcctaaaggtctgccattgccattgccaattgctaaagtttttttttgtgtgtgtgcttggggcacctgaactcggcttttgacatggaacaatgcggatctgatcatttttggcacatttcattttgctatcagttaccataagggcaccagcttaaaaaaccctaagttaaagctatctaggtgtactgctggtcaagcaagctttagggaatcgagttctgtacaggcacactgcattaaggctagtggtgtggcctcgcctaaaactagtaaaacacattagaaaaaggaacattttgattccggtgtcttgtatatggtgtctgtgttcatttccttccacgttcttctgtgctggtgtgacactgtccgtttcatcactccatcagtgtcctacctgtatcttacatggtctttgtgctactataaactttcaggttcttcaggctgctcttaccctaccggtgcaaggcaccatgggaggaggaaccgcagggacctccacaggcacaggcacaggcacagccggcgctggcatggggacaggcactgccgccggaactgcgggtaccgggttcggcggcctaggaccaggcacggacgctagcatggacaccgcggcggcggcgggcttgctccttcccccaagagctggtgggctggccgccgccctcgccgcgcttctcctctccgccatggtgctcgcgtgacgcttttagtatggcctcggaaacatggcctgcctgttgctagtagaaagctagcactgcccttttggtaagggcgtttcaggagcactgtgctggactatatagagagatgctcctctgtgactgtgaccacctcacgttctgcgtactctgtaatctggtaggatgcctgtctctatcatgattcatgaaggacgattggtctgtcttttttttatcgtgctatttattaatcgtgtaaatgtactagcgaagggaaggcactggtagctaggttagctcgagtccggatggaatgataatgctactaatacaaacaatgccgtagtgtgtgtgtgtatttatcaa

SEQ ID NO: 210121 - DNA, 1936 bp, Zea Mays
gcggtaacgaccagcagcagcgtgcccgcgggcactcaagatttgacctcctccttcggtcaagtccagcgtgctcgctccatcgctcggccgtggcctgtgggagtccttaaaaccccctcggctttccattgttgttgggcagctagcgcccttgccgagtcacttggttggatcgccgctgctcaccccgtcctagacgcgaggcgacgacgcctccctatccctctcctccgcaatggccaggccccgcaagaacggcggtaccgacgaggatgatgctaacgccgccacgggagccaccgggaagccgaagaagctgatgaagcgggcgcggaggaagagcgagagcccctccccgcgcagctccgcgtaccgcggcgtcacacggcaccggtggacggggcggttcgaggcgcacctgtgggacaaggacgcccgcaacggctcccggagcaagaaaggcaagcaaggtagcccatcaccgatccaccagctcgtccatggattccggttgttacgtttgcgatcgcgactgacctgacctctcccccgtgtgctttgcgtatgcgtggttcctcttccgctgctggcgccgtcctgcgatcgaccgggttggcgggcggtccgggctcacgtacggacgggggcgcgtgcctgcagtttatctcggcgcgtacgacgacgaggacgcggcggcgcgcgcgcacgacctggcggcgctcaagtactggggccccgccggcaccgtcctcaacttcccgctgagcggctacgacgaggagcggagggagatggaggggcagccccgggaggagtacgtcgcgtcgctgcggcggcggagcagcggcttcgcgcgaggggtgtccaagtacaggggcgttgccaggcatcatcacaacgggagatgggaggcgaggatcgggcgcgtgttaggcaacaagtacctctatctcggcacttacgcaacacaagaggaggcggcagtggcgtatgacatggcggctatagaacaccgcggcttcaacgcggtcaccaacttcgacatcagccattacatcaaccactggcatcgacattgccatggcccctgcgacggcagcctcggcgcgatggacgtcgcaccgaacgtctcgctcgaactagacctactcgagtgcccggccaccgtcggcctcggcctcgaggagaccacgggcgacgatgaattccacaaccgcgaggactacctggggcaccttttcggcgtgcagcagcttcccgacgagatggggccgccggctcatcagatggcaccagcatcgtcggcgctcgatctggtgttgcagtcgcctaggttcaaggagctgatgcaacaggtttccgcggcgggagcctccgagaccaacggcggcagcatgcgtagctcgccatcaacgtccctgtgttcgttctcgccttcgcctctggagctgccatcgccgccgctacagcaacctactgaattcatcgatggcgcgccgccgcggtgcagcttcccggatgacgtgcagtcgttcttcgatttcaagaacgataacgacatgagcttcgtctacgcggaggttgacacattcctcttcggcgacctaggcgcatacgctccgccaatgttcgacttcgacctgtacgagtgatcaggatccgactgccagcgttccaagacgccagtgttgttaaaatggcttcataatttttgtttatgatgatgatgagatgactgctatcaaggtttacttgaaagaggtaggattagttatttattctcgcccttttttcaaatagctagaagaggaaaatatgcttctctttttttcttttttccctaaaaggctcaaaggtgtatacaagtcgtcacgaagaactaattgacattgatgacatctctactattataatgcaatagtttcaacagtcg

SEQ ID NO: 210122 - DNA, 3345 bp, Zea Mays
ggaccaggaggttgaagcgaactgttgcgcgccccttatttcttgccgccgtctcttcccacaaccactctttcgctctgaaacaatccacctgagctgcaccaaggagcgagtcgcaagaccctcgctctcgctcgctcctgctcctgcatcgtcgacctagatagcagtgtcagatccagcgctcgaccatggcggccgcctcggcgtcgctcgaagacctcaagaacgagaacgtcgacctcgagagcgtcccgatccaggaggtgttcgccgtcctcaagtcctcgccgcacgggctcacctccaccgatggcgccagccggctccagatcttcggccccaacaagctcgaggagaagaaggggagaccgccggactggcaggacttcgtcgggatcgtcacgctgctcttcatcaactccacaatcagcttcatcgaggagaacaacgccggcaacgccgccgccgccctcatggccagcctcgccccacagaccaaggtgctgagggacggcaaatggtcggagcaggacgcggcgatactggtgccaggcgacatcatcagcatcaagctcggcgacatcatccctgcggacgcgaggctgctggagggcgacccgctcaagatcgaccagtcggcgctcacgggcgagtcgctgcccgtcaacaagatgcccggcgacagcatctactctggctccacctgcaagcagggcgagatcgaggctgtcgtgatagccaccggcgtccacaccttcttcgggaaggccgcccacctcgtcgacagcaccaacaacgtcggccacttccagaaggtgctcacggcgatcgggaacttctgcatctgctccatcgcggtcgggatgctggtcgagatcgtcgtcatgtacccggtccagcaccggcagtaccgcgacggcatcgacaacctgctcgtgctgctcatcggagggatccccatcgccatgcccaccgtgctgtccgtgaccatggccatcgggtcgcaccggctgtcgcagcagggcgccatcaccaagcggatgacggccatcgaggagatggccggcatggacgtgctctgcagcgacaagaccggcacgctcaccctgaacaagctcaccgttgacaagaacatgatcgagccgtttgtgagggatctggacaaggactccgtagtcctgtacgcagctcgagcatccagaactgagaaccaggacgccatcgacgcgtccatcgtcggaatgctcgcggacccaagggaggcccgtgccggcatccaggaggtgcacttcatgccgttcaaccccgtcgacaagcgcactgccatcacctacatcgactccgacgggtcatggcaccgcatcagcaaaggtgcccccgagcagatcatcgacctgtgccggctccgggaggacctcagccggcgggtgcacgccatcatcgccaagttcgcggaccgcgggctgcgctcgctggccgtggcgcggcagagggtccccgagggcaacaaggacgcgccgggcactccgtggcagttcctggccgtgcttccgctgttcgacccgccgaggcacgacagcgccgagacgatccggcgcgcgctgaacctgggcgtgaacgtgaagatgatcaccggcgaccagctggccatcggcaaggagaccgggcggcgcctcggcatgggcaccaacatgtacccgtccagctccctgctcaaggacggcgacacgggcgggctccccgtggacgagctgatcgagaaggcggacgggttcgcgggcgtgttcccggagcacaagtacgagatcgtgcggcggctgcaggggcggaagcacatctgcgggatgacgggcgacggcgtgaacgacgcgccggcgctgaagaaggcggacatcgggatcgcggtggcggacgccacggacgcggcgcggggcgcgtcggacatcgtgctcacggagcccggcctcagcgtcatcatcagcgccgtgctgaccagccgcgccatcttccagcggatgaagaactacaccatctacgccgtgtccatcaccatccgggtggtgctgggcttcctgctcctggccctcatctggcgcttcgacttcgcgcccttcatggtgctcatcatcgccgtgctcaacgacggcaccatcatgaccatctccaaggaccgggtgaagccgtccccggtgcccgatgcctggcgcctccaggagatcttcgccacgggcgtcgtcctcggcacgtaccaggccctcgccaccgtcctcttcttctgggccgtccgcgacaccgccttcttcacgaatacgttcggggtgcaccacatcggggacagcacggaggagctgatggcggcggtgtacctccaggtgagcatcatcagccaggcgctcatcttcgtgacccgtgcccggagctggttcttcgtggagcggccgggcctgctgctggtggccgccttcctggccgcgcagctggtggcgacgctgatcgccgtgtacgcgcactggccgttcgcccagatcaagggcatcggctggggctggggcgccgtgatctggctcttcaccatcgtcaccttcttcccgctggacgtgctcaagttcggtatccgctacttcctgagcggcaagcagtggagcaacgtgttcgacggcaagacggcgttcgccaacgagctggactacggcaagagcaagcgcgaggcgcagtgggtgatcgcgcagcggtcgctgcacgggctgcagcagcccgaggcgtcgggcctcttcaactcggccgacaacagcagcaacgacttcgtcgagctctctgagatcgccgagcaggccaaacgccgagcagagatcgccaggctaagggagctgcacacgctgaaagggcacgtggagtcggtggtgaagctaaaggggctggacatcgacaccatccaacataactacacagtgtgatcatgccatcgatttggggaggaacctttttgttttttgtcttttgattttttttggggggggggggggggggggtaggggaggaggaactgtaggattcagttgtctaggtgagataaataattaacttgaagaaatggtagaatttgttgatcgaagggtatgtttatctgtcgcatagctgaacagttccaaggttactgctaaagccatgcggttaggagctttgttcatatttatttgcttgtttaggcagctctagtatttttctcttaattaacggcatacaaataaaagcctttttcagcctgaattgcattcggatttcattcctgaacgttcatttaaagcgggatttctttttttgctttccattttcgggatgaga

SEQ ID NO: 210123 - DNA, 856 bp, Zea Mays
acatccaccccatccgtcattgacagatcccgcaatactcacagggccctcttctctcatctctcactccctcgctccgtctaccagtaccaccacgtccctcctcgtcgacgatctcgtagcggcggcgcacatggcgagcgacggcgcggcggctacgccagcgaaggttaccccaaagaaggccaatctcctcgacccgcactccatcaagcaccttctcgacgagaccatctccgaggtcgtgaagagtaagggctacaccgaggacacgcggctgggcaactggaagctggggatcggagccgccgtgattgctgtcgccctcctcgctcagttttaccccaagaagttcccgcagaaccgcgatttcctccttggctgcatcgccctgtatgtggtgctgaatgtggtgctgctgatccttagctacaccaaggagaaggatgccatcctattcacgcaccctcctatggtttacaaaggaaggagttcttgtggagggcctgttctggaaggatgtcgagaagctgattgatgactacaacagtgagcgcaagagtaaatgaattggtagctcgtgtctctggccatctggggagacatcgctgtctagagaaatccgtcaaagtttagcttaatctgaacaggcatttttgctatactgtaccggttgaccagtgaatgaatgatgttctagacattaactttggttccaagctttctgtcgtgtccatggataactatccgtccgaatcctagaaacgtggtccgtgcttgtaacctgtttgttctggtgcttccatacgccggagcagattttgaagagaaatgaaacaaatcgttaaatcacatt

SEQ ID NO: 210124 - DNA, 1386 bp, Zea Mays
cacgagggcgccagtagatatattcatcttcatctcggcttgcgatatttttgaattttctattccgtattgaaggcgtcgatggccttgtccgccctaatcagcaccctcctcgccgccgccatctgctttgtaggtcctactatacttgcaacctctcccgccgactcgcttcgatctacccgccctcgcgtcaccatggggtacgcgcagctcgtcatcggccccgctgggagcggcaagtcaacttattgctccagtttatacgaccattgccagaccgtgggaaggacaattcatattgtcaatcttgatccagctgctgagcacttcgactatcctgtagatatggatatcagagagctgatttcattggatgatgttatggaggagattgggttggggccaaatggcggtctcatctactgcatggagcaccttgaagacagcttggatgattggtttgatgaacagctagagaactacctagatgatgattatcttgtgtttgattgccctggccagattgaactcttcacacatgttccagttctgcggaactttgtcgagcacctgaaacgaaaaaatttcaacgtttgcgctgtttaccttcttgattcacagtttgtcagcgatgtaacaaaatacatcagtggttgcatggcttctctatctgctatgattcagcttgaacttcctcatatcaacatcctttcaaagatggatctggtctccaacaaaaaagatgtagaagagtacctggacccgaatgcacaggttcttctttcacagctgaatcggcagatggcacctcggtttggcaagttgaacaagtgtttagctgaactggttgatgattacagcatggttaatttcattccacttgatttgagaaaggaaagcagcatacaatatgtgctatcttctatcgacacatgtatccagtatggggaagatgcagacgtgaaggtcagggacttcgaagaagacgaagactaaccactggatgctgtgggaggtgcaaactggttgctagcagtcgtgtagtgcggagtgagactttgggactgtgtatggcgcaggcatgcaaaaacgtcgtaggatgctgatggcagctatgtggtctatgtaagacgaactaaaccagatactccatttggcaagtcctagtaaaacgtgtgcgcgccttgatggtcctgttctccctcgatgctccgttggtattttatcaaaatcaattcaacggttgccgtatttatagaaacttagcaaagggtgagtttgatgtcaaatcgattgagttgtttacgggccttccggcatagtccgccctcgttgcaatgctgagacgttggctggggcggggctcttctgaactgtttcaag

SEQ ID NO: 210125 - DNA, 378 bp, Zea Mays
gagacagtgcgtttcgtattggtacaggttccatttgaccttggtgactacagctgtaatttgttgctggatgatgtatgcaatcgtctaccttgctcagatgaagccattgatcaaccccattctgagcggagagtgagcgctgcatctgtattgaacagaacgaaagcgagacctgctgtaccattgttcagtccgtgaactttatattcattttggccccacctgatgaaataaataaataaactgccatgatttttttggtgccactcttcacccgtgattagtgtatgcaattgcatgatatacgcagtaataacatataaatatctatgtatcgatgatgtgcttgaattggggtgtctcgtgcgcgttccc

SEQ ID NO: 210126 - DNA, 3978 bp, Zea Mays
ttccctcccaaacggcaagcgcggccccaaaaatcccctccctagggtttgccccctcctttccgtgagatccaaaccccaatggacgagacgctcgcctcccttcgccgcccgaagcgcggccgcccgccgcggccgcgggaggactacaccgcgtactttgaggatgtggctgaggcgggagggctcgcgccgccccagtccaagcggaagcgcgcggcctccgccgctgccgccgcgtccctggaggacctgccactcatcgatataatcaaacataatggtaggctgatcagccatgctgtcaaaaggctggttgaggattacgaatcaaagaaaaattcagtgacgtttcagattttaacaatgatatttgaggcttgcggcgccaagcatgagatttatcctgactaccttcgcgagtctgatgtggatgacgttgtggtctctcttgtcgacctagctaagaaaggtctggtggaagataattacaactcaaagcataaggatctcaaaaacttcaaagaaaacatggtttctttttgggacagcttagttattgaatgtcagaatggcccactgtttgatgacctcttgttccaaaaaatcaaagactatgtggttgctctgtcatgtgctcctccaagggtatatcgccaagtagcttcaatgattgggctccaacttgtaacatcattcatttctgttgctaagactctcagtggacaacgtgaaaccactcaaaggcagctgaatgcggagaagaagaagcaaagtgatggatcgcttattgaatctctcaacaatagactagcctttacacatgcaaacattacatacttggaggaattgatgcgcaagatattcagcgggttgttcatgcaccgttatcgtgatgttgatcctgagattcggatgtcctgtatcagatccctaggtatttgggttgtctcttatccatcactctttttgcaagatatatatttgaagtatcttgggtggacactaaatgacaagaatgctggagttaggaggacttctgttcttgccttgcaaagtctttatgaagtggatgagaacataccttctcttggtctctttactgagaggttttacaccaggattatccagcttgctgatgatattgatgtttcagtagctgtgtcagctataggtttgatcaagcaattgctgaggcatcaactgttgagtgatgatgatttaggcccactatacgatctgcttattgatgagcctccaatgattaggcgtgcgattggtgagttagtttatgaccacctaatagcacaaaacatcaagacctctcatcccggagctagagatggggaaaatgaatcttctgaggttcatattggtcgaatgctgcaaatccttagggaattttcagacgacccagtcctcagttcatacgtcattgatgatatttgggatgacatgaaggcgatgagagattggaggtgtatgatttctgtgcttcttgatgaaaatcctgcaattgagcttactgacattgatggaacaaatctagttcgcatgctgcgagcctctgcaaggaaggctgttggggaaagaatagttcctgcagtggacaacagaaagttgtattacaataaaggcgaaaaggaaatattggaaaataacaggcgtgaaataacaagtgccttattgacaaggtatccacatcttttaagaaaattcatatctgacaaagctaagatatcgcccatagttgatatgatgactcttttgaaacttgagttgtattcatacaaaaggcaagagaagcatttcatgacagccatagatctcatcgcagatgccttcttcaagcatggtgagaaggacccactgagatcttgcatcaaggcaattattttctgttgcactgagtgccaggctgatcttaaagattatgctgaaaataaacttaagaatcttgaagatgagttggtcttgaaagtcagaactgcaatcaaggaagtagaggcaggtgatgatgaatactccctcttggttaatttgaagcggctttatgaacttcagctgtcaaaacctgttaagaatgatagtttatttgaggatatgtaccgaatactagctcatcttagagatatggataatgaggtgaagagctttctcctcctcaatatgtatcttcaagtagcttggtgccttcatgcaattgatggtgaaaacccatctgaaacatgtattgatgaacttttatcaaagcaaagctcactttttgatcaactctattattatttagtggtactgcccacttatcagaaagaggggaggagcaccactgtactttcatgcagatttgttttgttttaggtctgcatcattactgcagaaatgtggtgcttgtttaagaagtcaaaatattcttcgacaagactagagagtttgggttatttcccacagccagatatggttcagaagttctggaaactatgtgaacaacagctcaacatatcagatgaaacagaagatgaagatgcaaatgaagaacatattgaagacacaaacagggatgctgtcatgattgcagctgcaaagctagtgcttgctgatacagtatcaaaggattatcttggtccagagattgtttctcactatgtatctcatggggcaagtacgacagagataatcaaacatctaattacttctctaaagaaaaatgcaaactttgacatgggaactctattttttgaggccttgaaaagggcatatgaacgttacatggcccatgttcacgacggagaaaaccaaatcttgactggcaagtcttattcagaatgtcaagatcttgctagtcgtcttgcaggatcctatgttggggctgctcgcattaaaaataagtcagatatcctgaagattatccgagatggtgtttcttttgcttttgttgagcttccaaaccaattgttgttcctcgaggctgctcttctgccatttgtttctaaacttcaagcatcagatattccagatatcttggcagatgtagagaagaggattcaacatatcaatacgactggagatcaaagtgtttggcgcccattttttatgttcgtagagcacctacgtgacaaacatgcaaagaatgagaggaagaggaaaaacctgtgaggaaacggggccgtccaagaaaagttagagaggtaccagatgtaccagatctacgcggtgctcggcatgtacgtgggaagaaactttttagagatgatgggcacaactctagtggtgaggaatctattggtgcatctgaccatcaggatcacggtgaagatgacgacagcaacggcgatgcagatcagcccttgatcaacacgatcaggtcttccgccgccaagctacggtccttgaagatctctcaacagggaccaagcagccaaaaaggggtccctggcccatccggaagcaatagctgagaggatgcatgcagtgcccctcatcgtcggtgatgatttccagacattgactgaccgattcaagcagcacagggggctggcactaacatcagtttgacgaggacaccattccacgcggagctgcagtcatccgctgtttagctgcttgttctaattgtgtaagcgctgtatatgatttgcacttgggtgctgtgactccctttgtatgcgggccctccccctttccctccctatgttctcagtgtatattaccaaatcatcttcatgtgtaataatatttacaggagtaggttgatggattcatgggactggctatcgtgtgttatcttgacatggctgagggcatcttccaggttatttcgtttttagcactgagttgccgtcctggcgcgtggtatgctgattccatatgctgttggtctacctagttttccatttcgatttcctcttctttgttagccgagttctgtcctaaagatgcccccgctaaagctgttgattaatatagtttccatatgct

SEQ ID NO: 210127 - DNA, 853 bp, Zea Mays
attaaaatggtcacggaaaatggttcagaaaagatttgtgtgcttcatcagaatagagcatagaccattttcctatccaggaagtccattgaacatgttaaggtgtgctgtaatcatctgtgtcaagtatgatgccaacatgccataaacatgttaaggtagagaggttacactagctgacattgtcagataatcaacatggctgaactcaaaaatggttggcattggccacaattttcaactgaatgcaactggatggaagtggaagctttctacttgcctggggggagatggtgtgtctcagataagaaacaagtcaaaactcagcttgttcccagggtttgatttgaggattggatggaaagcagagtatgtgcttcctgagattcatggggctgttggcacaggagaaccagccttcagtatgaactatggaaggttgcatgcatcgatagatcgggtcgaggctatcgttactcagtcagatcagtattgatcttccagtgcggaaaggcaagggagtttcttgatcaataacaaacacgttgagtagatcccagggttacaagaagcattctgaagctccgtgcctgatgtacagcaaataccaaagtttaggaccacgctttgagaagctgtttgagttctccaaagcttttgactttgagcggcttctgttgcttctgaaagcgtaactataaataatgtttatcctgcttgtgtacgaaacaccagagtatcagtaattcagtatagtgagcgacgtcaaagcatgatctctatgcatcaagatttgtcttctaagctattcggaagtacgcttaaaccctgcataagtggccgcagtaacgaa

SEQ ID NO: 210128 - DNA, 828 bp, Zea Mays
ctcaaacctgatgaaaatcgtatcgatgtagtagaaactttctacaatcttgaggtcaatgactttgaggcaaagatagtactgaagcctctagattacgagcggaaatggaagttccagtacaagcccatcagtggcgacatacagctgctttccaagaagataccagtcacaaagtttctaaatctacaggttggcattggccacaattttcaactgaatgcaactggatggaagtggaagctttctacttgcctggggggagatggtgtgtctcagataagaaacaagtcaaaactcagcttgttcccagggtttgatttgaggattggatggaaagcagagtatgtgcttcctgagattcatggggctgttggcacaggagaaccagccttcagtatgaactatggaaggttgcatgcatcgatagatcgggtcgaggctatcgttactcagtcagatcagtattgatcttccagtgcggaaaggcaagggagtttcttgatcaataacaaacacgttgagtagatcccagggttacaagaagcattctgaagctccgtgcctgatgtacagcaaataccaaagtttaggaccacgctttgagaagctgtttgagttctccaaagcttttgactttgagcggcttctgttgcttctgaaagcgtaactataaataatgtttatcctgcttgtgtacgaaacaccagagtatcagtaattcagtatagtgagcgacgtcaaagcatgatctctatgcatcaagatttgtcttctaagctattcggaagtacgcttaaaccctgcataagtggccgcagtaacgaa

SEQ ID NO: 210129 - DNA, 808 bp, Zea Mays
gttccaaactcccaaacagttctacaatcttgaggtcaatgactttgaggcaaagatagtactgaagcctctagattacgagcggaaatggaagttccagtacaagcccatcagtggcgacatacagctgctttccaagaagataccagtcacaaagtttctaaatctacaggttggcattggccacaattttcaactgaatgcaactggatggaagtggaagctttctacttgcctggggggagatggtgtgtctcagataagaaacaagtcaaaactcagcttgttcccagggtttgatttgaggattggatggaaagcagagtatgtgcttcctgagattcatggggctgttggcacaggagaaccagccttcagtatgaactatggaaggttgcatgcatcgatagatcgggtcgaggctatcgttactcagtcagatcagtattgatcttccagtgcggaaaggcaagggagtttcttgatcaataacaaacacgttgagtagatcccagggttacaagaagcattctgaagctccgtgcctgatgtacagcaaataccaaagtttaggaccacgctttgagaagctgtttgagttctccaaagcttttgactttgagcggcttctgttgcttctgaaagcgtaactataaataatgtttatcctgcttgtgtacgaaacaccagagtatcagtaattcagtatagtgagcgacgtcaaagcatgatctctatgcatcaagatttgtcttctaagctattcggaagtacgcttaaaccctgcataagtggccgcagtaacgaa

SEQ ID NO: 210130 - DNA, 1920 bp, Zea Mays
accagacccacacgtttctttaccctaaccttttcgctgctccagcgaagaacacagccaccgccgtttcttcgtcttcctcgcagcgccggcgcgccatctcggtacgaaggcgacggcggcggcgacggcggcgttcaggatcgggatctcagcgacgacgtcagaggcttcccatcccgacccccgccagtcgcctcgcgccctcgactccggactccggtcctccgcacaccggccggtgaccctgcgtttgaacctgctatagaaatttataaaatggccgcggttgatgcgacaaccaaggagatggatgcactgcatgttggacaaaatgatgaaacaaaagagactctgattaaagaagacaaagctgcaaacagcaatcattctgttgttgcagctcagtccttgctaccagaggacgacgatgatgatgaagcacaagctgatggtccatctcaagatggagcagcagctgtaaagaagaaaaagaagaaaaacaaatccaaaaagaagaagggcccccttcaacagacagatcctccatcaatacctgttgatgagcttttcccctcaggagaatttccagagggcgaaatccaacaatacaaggatgacaatctgtggagaacaactagtgaggaaaagagggacctggaacgactgcaaaagccaatatacaactctgttcgccaagcagcagaagttcatagacaggtgcggaaatatatgaggagcatcataaaacctggaatgttaatggttgatctatgtgagacattggaaaacatggtccggaaacttatcaaggagaatggactgcaagctggcattgcttttccgactggatgctccttgaattgctcactggactccaaatgcgggcgacaaaactgtgctacaatatgatgatgtgatgaagcttgattttggaacacatatagatggttacattgttgattgtgcatttactgttgcattcaatcctatgtttgatccattgcttcaagcaacgagagatgccacaaatactggaatcaaggaagctgggatagatgcacggcttggtgatgtcggtgctgcaatccaagaagttatggaatcctatgaggttgaaatcaatgggaaagttttccaagttaaaagtgttcggaacctcaatggacacagcatcgggccatatcaaatccatgctgggaaatcagttccaatagtgaaaggtggagaacaaacaaaaatggaggaaggggagttttatgccattgaaacttttggatctacgggaaagggatttgtcagggaggacttggaatgcagtcattacatgaagaactttgatgtcggacatgtgcctttaaggttagcaaaggccaagcaactgcttgggaccatcaaccacaacttcggaacgctcgccttttgccggcggtacttggaccgccttggtgagaccaagtacctcatggctctgaagaatctttgtgacaatggcatcgttcagccgtaccctcccctgtgcgatgtgagagggagctacgtctcacagtttgagcacacaatcttactccggccaacttgcaaagaggtcatttccagaggcgatgactactgattgcggctggaggaggctccttgtaccaggttgtgtgtgtggagcgccatccgtttatggatcacactcggataaatggtttggtcctccagagttcaggatgttgtatgagttttataataactcgctaaagattgtggatgtacaagtagcagtaatacgttttctgggaacatggacattgttaggctatttccagcggggatttcgtccgagtttcaatctcgattaaatgtgttgccacataagaaaatatgataatatggcaataatttaataagagagtgagttttattggatgtgtt

SEQ ID NO: 210131 - DNA, 3763 bp, Zea Mays
acaaaactcaaatcgcagttcccgtccatctgtcaccacctcgctctctacattgcggaaccctattctctcatcgcgctctcgcctcaccggcgccgccaatccgccggcgagctagggctttctgatcactggcctctccagtttcccgccaccatgggggtcgacagcgacgacgaggatctcgtcgtctatgggacgcccatcgagcgagaggaggacacctccgcccgcaagcgccgggccgtcgccgaggctggccaactccgcgccctccctgcctggaagcaggaggtgagggatgaagaaggaagaagaagatttcatggtgcatttactggtggattctctgctggcttttacaacactgttggctcaaaagaggggtggacaccacagacatttacatcatcacgaaagaatagagctgagctgacaaagcaaagcatatacaattttcttgatgaagaggatataaagctgcagagcacgctcgaaaacaggcatccaaggaacaaaaggagagaccatctgctatacctggtcccatacctgatgaattcgtggtccccaccacaaattcaattggtgtgacattgttaatgaaaatgggttggcgccaaggacgctctattagggactcacatgctgattccttatatgaatcacgcaggaatgctagaaaagcttttcttgctctctctggtgccaaggatggtgaagatcaagatcaaagtgctgaaaagcctagcttagataaagctgttgtggggtcagtcggggaaatacctgtatctggaaatacccctgtctatgtgcttcatccaaagcaggattttcatggattaggttacgatccattcaagcatgctcctgagtttagagacaggaaaacattgcagaagtcaagagagaggggccgcaaacgaaatgatgtttctatgaggggaaatcttctgatttctaactcaggacattatgctcctggttttgggattggagctctcgaagaacttgatgttgaagatgaagatatttatgcatcaggttttgcttatgaacaaactgaagttgatattgagccttcaaaaactgccaatgacagtaattataaacttgatgacagaaaaagaggtttctatctgagctttaagattgcctcaaattctgaatacaaacttgaacggttccttcctcctgagatccctgatgattttgatgctcaacacaaatttccaactccagttcaatctgctgagatgttttctgactctgctcctcttgaggttcctccaccagaagacactagcttgacactattgattgacggctgtgcagctatggttgcacgttgtgggaaacatattgaagatttctacaaggagaaaagtaagacaaacccgcagttccttttcctaagtggaggagctggctgtaactattacatgagaaagttatgggagcatcagcaaaaacatattggtcagcgatggcatgattctgcaaaatcaaagacttcttctgataagttgacagcagagaatcgtgggaaaattcttggtgaaaggccccttgacagaactactaaagtacatagcccatctctttctgcaaaggaagctgttcaactgcaatctaatcttactgagacatttgtcaagccaatatcccttgatggcctaccagagtatgagaagccttttagcaatgatcctgcgaaacaagttagatttgagcaatttcttagagataaatacaagggaggtcttcgtgctgcaaatgttacacctacaagtactatgtcagaaggtgatcgtgctcgggaaaggcttgattttgaggctgctgcagaggcaattgaaaagggcaagggaaaaaaagttattgatcctttgtcagtgttctctttgcctggaatgaatgagcaacgctttgtagcggcaacccaaccagagagctctgtagtgatacaagatgagaagcccatctatccacaaaggcagcagtttgaatggcggccttctccaatactgtgcaaacgttttgatattgttgaccctttcatggggaagccaatgcatgttcaaagaccaaggagcaagatggagaaccttatctttatgacagaatccaacaaaggaacaaatgatgaagtggagagctcgagtagaagtttgcagcatgcttctatggaagcgctatctgatgttgaatcacgaggagccgctactgatcctgactttgagcccagcagcttgcaaagacctgttgatctttacaaggctatcttttctgatgactcagatgatgatgcagatgaaattcttagcaatcaactagtggatccagtgaagacaagtgaaggtgccaacatggctctcaatcgtcttgtagctgaggatttcctagaatcattgggtaaagaactgggattagaagtcccgccagaaaggcctcatgtttcatctgaacctgaaaaattttcagcttctcgggctagtctctcatcccaggatgaaaggataacaactgctctcaccaaagtaaaggagaatcagtgctctattgacattgtgcaagttggcaatatcaatgaagatactccattagccagtgctgaaacccttggtatgaaatacgagaatcaggagaatagaaccgagaaaatcaggtctcgccctatgaatcgacaaagccagaaccatagtccaaggtctgattcatctagcgaacggcacaggagttggaaaaggagacatcgtcacatctggaatggaactccagaatctgagtccggtgaacgccataggagcaaaagaaaggagtctcattcaagacacagaaaacgcaggagtagaagtccaggtagtgatactcccagtgatacccaacatgagacaaaacggaaggagaaaaggcatcgccgaacttacacatctgatactgattctagtgatcatgaacacagcgaaagatataaatctagtagtaggcgatcatctgacaaagacagaagtagaaagcgtcgtatacaccacaagcacagaagaaaagatcatgtagattaaacatgaatgggaactgctggaatacgactgtacaaacgatggaaggtgcagtgcagggccattgggtttagcaaaccatggaagtttgatgagaacactgggaggtatggaaaatttgctcacaggaagtattctgctcatattggcttcattgcgttcatcacttttgcccgaagttttctttgttggattggtggaataccactgtagcattgctataccacaaagcagtttcatggaaaggaatcgcaatcatctggtcgcttgtagaagtcttaggaaaaagatcttgttgaagtagccgtgtttgcaaaaatgttgatcttgatagcaaatggtttgactacaaatctatggtgtgtgtaaaaccgcaagttgtatgatagctatttttttagtttacttagttatatgataatgtagttttgttttgttttacagaaggtaattaggtttttgagaatggtcaaagcatagcgtaatggttaaggcttctgagtagaacctttaggtcccggttcgttcctattgggggcaaatttctggtttggttaaaaaatcctcattgtgtcccgtctgctccggcgctcacgctcatgggttatgtcttgcgcgtcagcttccagttgggccgttgtagagtatgtgttgatagtgatagtttgggtcaggttcgaggaatttttttgtcgaga

SEQ ID NO: 210132 - DNA, 459 bp, Zea Mays
aaaaaatctctcgcatgagaaggaacgggcgcgtcgcgccactcctcgctcatggcgtcctccactctgccagccttccccttccgtccgtctcttcccggacttacgtccccggatcctgctaagcttaaccacgtatctgtttgaagacccgttcgccgtcttcccgttgcggcctccgcggcaccgtcgggcgccgccgccgcggcgacggagcgcaagcgcttccgggagcgctacgggctcaacccagacgacttcgaggaagatgcagaggaggatccaagggaagagagcagggacaggcggagccgcggagacagcagcagtctgggagaggggagcaaactgtggaagctgcagttactccagcgaaggtggcggagcctcgggagactcacaaatcacaatcaatacgtaatgcagttacttcaggtaaatatccttcctttgattata

SEQ ID NO: 210133 - DNA, 1395 bp, Zea Mays
catgaacctagggccctgtccgaacgcgcctcccacggcggcgcgtgcgactccccaacatgggaaataaatagatgtcccaattacccatcgagccgtcgtcgtggagcggcaggatttgaaaaatctcgcgagagggccttgtccttgtccacttcctccgcttcgccgtccctcaaagcagcggaaggggagaggccagggtgcagcagcaggaccccaacggcaacctccgccacgcaccacggagcaaccaagcagcaggtaaggcaaggcaaggtaagtgacgagacaaagatggtgcaggaggagctgccgcaggcatggtggttcgacagccacaacctcgcgaggccgtcgccatggctgaacagcacgctctcagagctggatgacaagaccaagcaaatgctgaagctgatcgaccaagacgcggactcgttcgcccagcgcgccgaaatgtactacaagaagcggccggtgctggtggacatgctcggcgacctgtaccgcacgcaccgctcgctggcggagcagtacgacctgctgaagcacggcagcggcacacggcacacggtgttcggcctgtcttcctgcacacagagccggtcgtcgacgaacggcaggaccactcctcgctcctcctgctcggcctctacgtacgactcggagtccgaagtggacgaccccgggcaggaagaatacgaggcagagcagctggcgcgtgcggggatggccaagacggagtcgccgccgccgccgccggagcagcagcagcaagaacagcgtgagcaggcggagcagcagatgcgcgcggagatcgagaggctcaaggcgcagaacgcggcgctgcagaaggcggccgaggagagcgcggcggcgctcagggcggagctggccgggaaggacgaggagaagcgggaggtgatcaggcagctggcgtcgtccatggacgtgatgaggcaggagaacctcacgctgcgcgagcacatcagcaggggatcgtcgaagcgttcctctgcgccccgcgcgggagctgcgttcgatctcaggaaggtggccaggggcctcttctccgcgaggctgttcaccgcgcactgcaggcctacgggccccatcgtcgcgctctgagcaggatgccaggatcgtgaagagagacagcgtagatatgcatttgttgtaggcgagtgatgtgcatattataggatggcatcgatcgatattccctccgctgtctgtttctcaggttcaactaaactagagggagcactcgttttttactatgatggcgtagtagtagtagttaactgtagttaaatatttactagtcatatggatgcatgtttgtatgatggcgttaattattgttaagtattattttgtcaaaaaaaaaac

SEQ ID NO: 210134 - DNA, 1838 bp, Zea Mays
tgacgcttggctttcgaggcacgcggatgccagatttccccggatggggcgtgtgcggctgccggggccgcatcgtgtgcacgccaaattctcccgtcctcgacaccagctagcgaggctacgcagcagctgatgataccttatcccccgctggcactctggcagctagctattacccccctgctgcgccgcgcagccttctggtctacccccgttggctgcttcttctacctaccctcgccgtcgcctcaacttcccggccgccgtcccctccgatcaccagctgctgcttgtgctgctgagccaagctagcgatgaacatcttgaacctgcagcccatcaacccaggcgggcacccggcgttcccggcggccaaggagagcgggcacctcacgccggcgtcggtgcgcttcgacggcgtgccggtgccggcgcagtcccacgcgcactgtccgaggtggcaggctcagacgctgcgccgggacagcagctacgtcggcgtggagcacgaagggaccaggaccaccgcgtccgtcccggtcccggtcccggtcccagccgttgccccggtgcctgccccgttcaagccgctcacgctcgacttcctgcggtcgctcatggacaggagctgcagcatgagccccgccgtcgcggagtacggcgaggacagcgccccgccgccgccgcagatggtggcgctccgcgtggtggtggcctccgccgtggagctggacgcgcgccagaccgagctcatcgcgcgcaagatgcgccgcctcaccgggttcgtcaacctcaaggtcgacaacgtcgtggacgcgtccctcctcgccggcttcgtcgtccgctacggcaccgacgactcgcacgtcatcgacctcagcgtcaagggccagctcgccgcgctccagaaccgcgtcgactccatcgaccaccagaccgcccacgtccacggacacccgcaccactgatcatccgatccaacacctctggactctggtgcacatgcaccggaaccggactacaccggagcgaagcgcgccattgccaaaccgtgctacagcttgcagtatacaagagcctatctccatgactgtgattacgagactatatacagaaccgaattgaacgccatggcaacaacagttttcctgtctaatgttgttgtaaatcgcgactgctacctatccttcctgctgagcctatatatgtttctattgctaaaaaaacgaacgttattgtataatatgatcgatgtggagacatcatcctctatggcgtaaagtgcaatatactatctcaagggccaaggccgaggtttgtatatggaggaggattcaggggttgcagcactgcaatggactctatgaccatgagaaagatggctaaatgagactgtatcactctgcaccgatcagattagagacgcaaacacatcaggattattaattcgatgtttctctaattatcgaagaacatcagagcaagataaagcatcatcatgaacgaagtgcagtagcggtaggatcggaccgaagcctgatcagcatcagcagcgctggtggccgttgacatcacggcgccacggggcctcgtagagattcttgaaggccttgtcgaagttcacgaacggacgaaccccatgaaccagaactcgtggttatccatggtcatgatctgaatgtacctctccgcccggttgtgcatgctggaagaagcgttcactgacgtcacttggctcagaggaagctagctggtcctcaaggtagatatcgcacacggtgccattgttttttatgtcagtgatctaggactcgcttccgagtctatatctattgtca

SEQ ID NO: 210135 - DNA, 889 bp, Zea Mays
ctccctatctccagtatcgtagcatgaatgttgaaaagctcaagaagatggcaggtgctgtgcgcactggggggaagggtagcatgcgcaggaagaagaaggcagtccacaagactacgaccacagatgataaaaggcttcagagcaccctgaaaagaataggagtgaacaccattcctggtattgaagaggtcaacatctttaaggatgatgttgttattcagtttgtgaatcctaaagtgcaagcttcaattggtgctaatacatgggtggtcagtggaactccacagacaaagaagctgcaagatctgcttccgtccattatcaaccagctcggccctgacaacctagacaacctgcggaggcttgcggagcaattccagaagcaggcccctggtgcttcaggtgcagaggctggcgccagcgctggtgctgctcaggacgatgacgatgacgttcctgagctcgtccctggagagacatttgaggaggctgcggaagagaaaaaggagtcgtcatgattttgccacatgcccgcccttttgaagggcttataagtaaatccttgcgtagaagggacatgttgaactctgacctaccttatttgtgcctgcttacggttatgtcatgaacgagaatttggtagtccagcgctggtccccctttttcacccatatccccgtgcttgtgtggtaaaagtcttgttaatgttaaaggccacacttaaaccaaatcaaggtaccatgtctccggtaccatgcttcacgaagatttacccctaggtaccatgcttcacgaagatgaataccagatgtcagttcacctgccatttgtttgcctggactgtaggaaatgtcatcatttcatgcgctcacgtttcatctgttat

SEQ ID NO: 210136 - DNA, 2013 bp, Zea Mays
gcccgagcccagagtagggtttcgggcttttcgtcttctctttcgtcctcttcttgttgcgcgccatccgatcgccgctgccaggtcgtgtcctttctcgtcgccggcaaggcctcctcccacccaatttccttgacgagaggcgctgctcggttccccggacctcacctggggcctgcctggcgtccattttagcctaaaataggcttaaatagtcagattttgagcacccaatctcgataaagaaagccccaaagaggcaatagccagctgccagccctagtacgacgacgtgccgccgccagctgcctctgcgcgaagacgacgcgccgccgtagagttgcccaggcccgctgactcccgatctgcatctctcggactgcccgacgccttgcggctgcggacgcctttcgctgtgcgggctgcgtccagtggaacgtcacctctcccagcgcgggacgcgcctccaggctccagcggagctcgacaggccggcagttgaccccttgccaactggctcctggactcctgttttgctgggttgaggagaaccatgccggacgtgaagtccgctgctgccacggtcgccaaggcagtggctggtgactctccttcccctgctgctactcctcctgcgccggccgtcgccagcagcaatgggacaccgcagaagccgcctcctattccagctgccaccttcgacatgcccaagccaaaccttcgtggtcttaacaagcccaagtgcatccagtgtggtaacgttgcccgctccaggtgcccattccaatgttgcaagagctgctgctacaaggctcagaatccttgtcacatccatgtcctgaagcagagcaacacattgccagataagccatcacctgctactgcttcttcaacagaacagccatctaccaatttacccgcaaccagcatcaaggctagctgccttgcaaaagcttcctcagcattttctgaagtctctccaaacaaagaagtcgcttacgaaaaaggttgttggctgtttcacgcgctctgtttgtttttgaaccgttttgtgacttctgtcttgttctaggatgccgtggctataaacaagtggaggtttatgaagctaagggaacatatgcaaggcgatatcgatgatgaaaacgaagcatatgagaggtatacacagaatgttaggttactggaggaaacattctatcccatggaatacgctgatgtcgagcctgaagccgaagcaccttcttcagacgaagaaaggatggacttgctggtttcggaggcaaaggtgaggctgaagtcggataacgaaatcgctgatcgcttcaaggagagggtcgccgccatcttggaccagaagctgaaaaaactgctcgagagccaaagcgccgacgaggacgacaaactgtccgatccagaccaggacgatcatctaaacccggcgaagttcagcgcgaagcagaaggcagagagaagcgcgagcttaaacgagctgctcggtaagctgacacgggcacggagcgaggacgacctgaagccgtgccgcgatctcatcgagcagctgtttgggaaggagaagggctcctctactgacaggcaagctggagtggagatggagcagagagatcaagagtcagccgcagcagcagtagcacagccttactccgtcccagagttgtgcgctaggatggaggttgatgaggactttgccgcaaagattagtgatgagttctcgttgagtcaggtggcgcagctatgaatctggaacccggccttcgatgagttctcgttgagtcagggggatgcaatgttattatcactgagctccttcgatgtgtaccaactcaacagcgctatccatcgacgtgctggcctgtcatttaggtgttgttgtttggttacgactagtaaatgtaaatgttagaaccccgatgagcagatgagttgagcaccgctcccggcgctcgacttcctctcacgaagatttctggagtatggtatagttggagttcg

SEQ ID NO: 210137 - DNA, 1431 bp, Zea Mays
aagaagactatgggcttctagcaattcacgtggttgaagacgtcttgtcccgttccagaacactcgcgctctcgcacgacggcacgagcgcgctactgccatagtgccatggcgagcggcggcggtgctgcggcgcggatggacccggaggtagcaacagagctggtgcggaagggtgccaccctcctcctcctcgatgtcccccagcgcaccctcttcggaatcgatacccagatgttctctgttggacccaagttcaaagggatgaagatggtgccaccgggagcccatttcgtctactactgctccccaaacaggcatgggaatgagtttgcacctactgtcgggttctttcttactacacaccaatctgaggtgattgttcgaaagtgggatgtgcaagaggaacgattaatcaaattatcagaagaagaggatatcagatactcagaagctgtaagacattttgaatttgatgatcaacttggaccatacaatttagattcttatggagattggaaacaactttcggactacttgtcaccgaatgtcattgagcgtcttgaaccaattggaggagaaatcacaattgcgtgggagtcatcatggatggataaagctccccaaagtgacatggagagacgtttggtggaacaactaagagaaggaaagtttgcaaagaatgctcctgtacagtctgggcggagaggatgctactacacaagtatccctgcttcaacaagtttgctggagactattttggccaaaaattatgaaggtcaagaagatctattcttgggggagcttcagtttgctttcatagcttttatgatgggtcaatcactagaggcttttatgcagtggaaagcactagtcagccttcttttgagctgcagtgatgctccccttcatacaaggactaacatgtttataaagtttataaggacattatactatcaactcaagcatggttttcaacatacccaagattccaaaagtggggatatgggcaattctctgtgtttggatgaaacatggttttcaagagacatattcctgtaccgtctttcaaaggatttctttacagttgtatttgaagccccagtcgtggatggagaccttctgtcatgggctaggaaactaaaatcgcttctggagactacgtttgggtgggatcttgaggacgacgcagtgaaccttattgatgaagatgacgagtttgctcctgtcgttgtggagatggatggatcataagctaatgaagccagattccatgcagagaagtcagcagttgttcagcgtttctaccttttggtacagtggtgcgctgacttgtatgaagttttactgcttgtgctgacattgaatatacgtgctaattatcgacttggtttccacttgactgtttaaagatgtagataattaaggggg

SEQ ID NO: 210138 - DNA, 1423 bp, Zea Mays
aagaagactatgggcttctagcaattcacgtggttgaagacgtcttgtcccgttccagaacactcgcgctctcgcacgacggcacgagcgcgctactgccatagtgccatggcgagcggcggcggtgctgcggcgcggatggacccggaggtagcaacagagctggtgcggaagggtgccaccctcctcctcctcgatgtcccccagcgcaccctcttcggaatcgatacccagatgttctctgttggacccaagttcaaagggatgaagatggtgccaccgggagcccatttcgtctactactgctccccaaacaggcatgggaatgagtttgcacctactgtcgggttctttcttactacacaccaatctgaggtgattgttcgaaagtgggatgtgcaagaggaacgattaatcaaattatcagaagaagagatactcagaagctgtaagacattttgaatttgatgatcaacttggaccatacaatttagattcttatggagattggaaacaactttcggactacttgtcaccgaatgtcattgagcgtcttgaaccaattggaggagaaatcacaattgcgtgggagtcatcatggatggataaagctccccaaagtgacatggagagacgtttggtggaacaactaagagaaggaaagtttgcaaagaatgctcctgtacagtctgggcggagaggatgctactacacaagtatccctgcttcaacaagtttgctggagactattttggccaaaaattatgaaggtcaagaagatctattcttgggggagcttcagtttgctttcatagcttttatgatgggtcaatcactagaggcttttatgcagtggaaagcactagtcagccttcttttgagctgcagtgatgctccccttcatacaaggactaacatgtttataaagtttataaggacattatactatcaactcaagcatggttttcaacatacccaagattccaaaagtggggatatgggcaattctctgtgtttggatgaaacatggttttcaagagacatattcctgtaccgtctttcaaaggatttctttacagttgtatttgaagccccagtcgtggatggagaccttctgtcatgggctaggaaactaaaatcgcttctggagactacgtttgggtgggatcttgaggacgacgcagtgaaccttattgatgaagatgacgagtttgctcctgtcgttgtggagatggatggatcataagctaatgaagccagattccatgcagagaagtcagcagttgttcagcgtttctaccttttggtacagtggtgcgctgacttgtatgaagttttactgcttgtgctgacattgaatatacgtgctaattatcgacttggtttccacttgactgtttaaagatgtagataattaaggggg

SEQ ID NO: 210139 - DNA, 2127 bp, Zea Mays
ctggagagcaacgagacaagcacggcggtgtgcgtgcgcacaggcactagagtgagacagctctagaagagagcaagccgccgccgccgccgcatcatcgtcagaagcggccactcctacctctgatcctgatacaaaatccaggccagagggcaggagcctccaaaagagatccactcccccggatggcttcttgcctctgcttccgcagacgccgccgcccaatcattgcctcctctgtccccttcttcctcctcctcgtctccttcctcgcctcggcctcggcctcttccacgacgacgacgaagctgctaggcagcggcaataatgccacgcggcgggtgacgttcagctcggaggagctccgcgggttgcggagcatcacggcccggcttgcgcggctcagggacgcgtccgtcaagacgatccagagccccgacggcgacgtcatcgactgcgtgccggcgcacctgcagccggcgttcgagcaccccaagctgaggagccagaagccagaggtaggaggagcccgaagagaggccgaggagcagcgctggccgcttctccgacgctgacctggacgaggacgacgacccgttgccgcaggtgtggcggcgctccggcgagcactgcccggaggggacggtaccggtgcggcgaaccacggaggacgacgtgctcagggccaccgcctcttccgccacccggttcgggatgaaggcccgcggtgcggggctcgggttcgcgcggcgcgactccaccggcggcggccacgaggtcagtgccaatcggcgatcactcagtcaccgccgcggtgacgacggtcgccggtcaacagtcaacactccaataatttacctttggctgtgcaagcgcagtgcaagaaatttgctcatcaatggcacaccgcacacgatgaaaagtggaaatgacaccaataattgcgtgattattgttgtgtgcttgcgacttgcgagtccgatccatccggcacaggtgacagtcacggtacagggggctgcactcgcaatggccagcacatgcacatgttgtcgactcgactgcatcgttaaacaatgggagaacgtcagtacgtcactgagcagctagacggcctctgtttgcagcacgcggtggggtacgtgaccggcgggcagttctacggcgccaaggcgagcctgaacgtgtggccggcgcaggtggcgtcgccggcggagttcagcctctcgcagatctgggtcatctccggcgccttcggcaacgacctcaacaccatcgaggccggctggcaggtcagccctcagctgtacggcgacaacagccccaggacgacgcgtaccaggagacgggctgctacaacctccactgctcgggcttcgtgcagaccagcagccgcgtggccatcggcgccgccatctcgcccgtctcctcctacgccggccgccagttcgacgtcacgcttctcatctggaaggacccgcgccggggccactggtggctgcagctcggctccggcgcgctcgtcggctactggccctccgcgctcttcacgcacctcggctcgcgcgccgacatggtgcagttcgggggcgaggtcgtcaacgcgcgccccgccggcgcgccgcacacgcccacgcagatgggctccggccgcttccccgccgagggatacgcgcgcgccgcatacttccgaaacgtgcagctcgtcgactgggacaacaacctcgtaccggccgccgggctccgcctgctcgccgaccggccggggtgctatgacatcgccggcggcagcggcggcgcgtggggcacctacttctattacggtgggcccggcaggaatgcacggtgcccgtaactttactagtatattagctaggaacggaatcgaatgcatgggatgggtgttgtacttgtacgtgtgtttcgtacgtgcgcactcaagcacacattagcagaggctgattgctatatattactccaaatgagtctgctttcactttttttaatctctccatgtgaatatgatgccgttgtgatcatctaacaatttgctcatttaatttagcattcttttttcctgtttctttactgcaattatattggacggttggggctatgagtttggtg

SEQ ID NO: 210140 - DNA, 2035 bp, Zea Mays
gttgtggagtctgctgaagaacgagttggagtctgggagacgtttagacaaacacaagcaaattttttttcaatcccgcagagggcaaaaccgtccaacgagacaaccccgcgcagaggcaaaagccccacgcttgagagtgagaagaaacagacgcatcgcttccttgtccatcctacctccccttccccccgcccaaatcccgtgacggtcgccgcccccgccgtgctctcgcccgcgcgggagacgacgcagcacccccccgcgtaggatccgcggcggtcggcaggatggtggtggccacggaggaaatggtggtctactgctttgacaccctcgtcgcctatttcaccggcgagcggccgccgcctcccgccttcgaggatggaaaccagtaagcctccccgcagcgatcgaaaccgggccgtgttgcccccatatcgaggaggtggttttggatccatttcgatatagggttaggccaattcgtgttagatttgggcaaaaggcggcgccttggtagttttggtttcggctcggctcctgttgcgactgattcgcgatccgatctgattgactgtttgttggtcctggcgattgcggaatcgtgtggtcttagttttcgttgcaaggcagaggcgaagtgaagtattcacacttcaatggccacgtacctcgcctttcgacagttgccagcttcctacctctagcgattgtctgacggagaggacaaggaatctcactgctacacatctgagattatgatttaagtaggacagtcagtttaatcctaaggcattcagattctttgggaagttgggaggttaaacaggatgagctttcgtgttctgactgtgacgcactgatgtttcttattcatactccaggattcagacttttaattgagatcctttcaaccgtgtagtccacattaatttgtatggcttgtaaggcatcattgttctagcatacatgtttttaactcattgggtcaatttttttgtaactttagcccattgtttgtgacctggaagaaggctgccaatggttcagaaccacgcctccggggatgcataggaactctggagtcccgtcagattgtcagcggctttagggactacgccctaactagtgcgctgagggaccgacgctttcccccaatacaatcaaaggaactcccaaccttggagtgcacggtatctatactcactgattatgaaattgcagaggactacctcgactgggaggttggaaagcatggtttaattattgaatttacagctccagactccaacacaaaacacagtgcgacctatttgcctgaagttgcgggccatgaaggtgaaaatttcctttttcatcgatgcgatgtacacttatcgtttctacagagttctttagtttctagaattattgcaggggataataagaagaaatgagttaagaaaatatgtaatttcatctttctaaatcatcatggaccaaatgcattataatgagcaataacggttggacacatgtagaaactattgattcactcgtgaggaaggcaggttaccagagaatcatcactgagtccttgaggaagaaaatcaaagtcactcgctaccagagcaccctgtacacgatgcactatggtgaatatgttgcgtacctcaagaagaacagaggtgcagccccgtcaattagtggggctcctcctgtagttaatggcttcaagccaagccattgatttatcagtataaaaaaaagctcaaagaacatattactataatttatctgcgagcaatttggggggtgtagtgtaaccaccccccacagttcattgatctagcatcattcccttccaaggaaaaggccaaataggggcgtcatgacaagcgcccagaataataatgccttcctggatggatcatggatgatgcttatgtatcttgaaaacacatgtgcttcaagaagttcaaattgtgtggtgaagttaattgattcgagttggccattcctagttccagtgatttgtctctattcttaactt

SEQ ID NO: 210141 - DNA, 2907 bp, Zea Mays
caaatcccaaatccagttacccggtgcccccctcccgttccgtcgcgctcgggtccctctcctcctctcccctcctcctccttcgcttcgtagtaatcgtaaacccggaccgccccggcaggcccccgccccacgcgtgcgagagagagagagagagagagcgcgcgcgcgccatgggagaagagaccctcgttgccatgccgcccgcgctcccccaccaccacgcccccacgccgccacagccaccgtcggggccagttgctgcggataagggggaggaaggggaccatcgtcgtcccgcagagggcgtcgccgggccgccgcaagtccagccgcggtcggtgaccccgcacgggctcggcggcgaggagggggacgtatactacgcgcgcaagatgctccagggcgcggtgctgcggccgccgccgcacctcccgcagccagaggcgccgccggggctggccagggcgcggtccacgccggcggcgccgcacgagtacgcggcacaaggggatggcgaggacgaggagcgggagagcaagaggcccgtcgagcggtcggcctccgcgaactcggcctccacggcggtcgtggacgtggagtccatcgggcggttcttccgcgaccgccgcgacgtgctgtcgtcggccataacccgccgcatctcgtcgctcaaggagtcgacctcggcggcgaaggccggcgcctacggcgtgcaggagatccacctgcccaacgtcaaggtcacggtgcgcctcaaggacgcgatcgccgccgccgacgacaccgacaccgacacctacgacgtcgggtacaccttctcgggcggccgcatcaaaggccgggtcagcttcttctcccgctcgggctgccgcgactgcgccgccgtgcgcgcattcttccggcagtccggcctgccctacgtggaggtcaacctggacgtgttcccggagcgcgaggccgagctgggctcccgcgcgggcgccgcggcccgcgtgccccagatcttcctcaacgagaagctgctgggcggcctcgtggtgctcaactccctgcgcaacggcggcgagttcgagcgccgcgtgcgcgacctcgcgggccgccggtgccccgactcggcgccgcgcgtgcccgtgtacgggttcgacgacgacgccggcaaggcggacgaggaggccgaggacgccatggtgggcatcgtcagggtgctccgccaccgcctgccgatccaggacaggttcgtcagggtgaagctcgtcaagaactgcttctccggaaccgacatggtggacggcatcgtgaaccacctggactgcagcaggaagaaggctgtggagatcggcaaggagctggcaaggaagcacttcatccaccatgtcttcagggagaacgacttcgaggacgggaaccagaacctgtaccgcttcttggagcacgaccccgctgtacccaagtactacaacttccggggctccaccaacgacggcgagcccaggcccgccgcggccatcgggcagaggatgaccaggatcatgctcgccatcctcgaggcctacgcctccgacgaccgccgccacctcgactacggccgcatcgccgccagcgaggagttcagaaggtacgccaacctggtccaggaactgcagcgggcggacatgacccagctccccgcggaggagcggctgcccttcttcctgaacctgcacaacgccatggccatccacgccgtggtccgggtcggccagccgggcgccgtcgatcgacggcctttcttctcggacttccagtacgtcgtgggaggccacccctactccctcgcggcgatcaggaacggtatcctcaggggtaaccggcggcagccttacacgctggccaagccgttcggctccagtgacaggaggctggagctggcacagcggcgcgcgaacccgctggtgcacttcgcgctgtgcgacgcgacgcggtcgagcccgaccgtgcggttctacacggcgcagggcgtggagccggagctccggcacgcggccagggagttctttctccacggcggcgtggagatcgacttggagagccggacagtgcacctcaccaggatcatcaaatggacagggacatcctccggtggctcctcaactacctcgacccgaccaaagccgggctcctgtcgcatctcctgaacgagggcggcccgatcagcatctcctacatgaactacgactggtctctgaacgtctgagcagaatccgtccgggatacgtacagcagtgtaacatgcattggggtggtggtggcacgatacattgagaggttcatggccacgatacattcagcatgctgagcttattcggcagagagaagtctagatatgtatatagaattttgagtgttgattttgcactcaaaaaggatatgccccgcgtgcaacagcatccctgtcggagaaatctctcccggtgatgccatatgccgtcgtcgttaagggcaagttttctgtattccagttgctccaacagggaagaaagagtagatgtatatcatttatgtatgctgggaaaatacactgttctggtcgccgtgaaatttccgcagtggagattgtgtgtatgcgtcctggtgatgaggtagagttggatggcatatgtgcttttctgttcttagttgagacgagttcttccgtatgcactccatctcctagctgcagactaattactttcatgcggtgggtgtttgacggaatgcttcactagcaatctgtagaaacatatgcttcatgggatgatgtatcataagtttatcctataaattttggtgaaattaattgattcatcatttatatactaattattagtaatgtggaatgagatgacgacagatcaacttattctattgtataaaacaaataaaaaa

SEQ ID NO: 210142 - DNA, 2450 bp, Zea Mays
gctcagtgatgtgctaggcggggtagcgtgcggatgactgcgggtgacggcactgaggcaggtgatggtggtgggtgagggcgttcacagattaagcagaggcgaagacgatccaagaagtggagccctatctctatcaaacgtggtgtaaggaaacctgtacgtaacccttccaaacgggcagctggacgtgtttttttatcggtggaccgcccgtccggtttcggtgttcccaaaagaagcgcataatttgatcatggataggttctcgtaacaaaatgttttttttctggattccgaaggaaaaaggacgaacagagaacccgtgttttaacttttttgtttacacacccgccgtacagtgatgtatgctgtagtaccaccatcctttcctctagagttcaaaaatctactgatctagaggcgggccggcctcccatgccgccaccgccgcctccaggaccacctcaccagcgccgtcgccgcggcgcttcttcgcagcttcgccctctggccgtgggatatggtccagtcacggcggcgcagcggcaactaccgttgcccgcgccgcgccgcactgccggcggcagcgctcctgctcttcctcctcgccgccgtcgcgctgctctacgtctccccgccgccgctcgcagaccaccccgtgctcgcttcctcccgccgccgccgctcggcccataccttgctgaacagctccggcgccggtagcatggaggagttcgagcgccgcgagatttcccgtgctccgacgaatggttcggccgtcagggatgacctttggggttcaaagcttgctagcaaattttatgggtgcagcaactcaagcagcaggtttcttgactcaaatattactacccaaccagagcgctatttgatgattgttacaagtggaggcctgaatcaacagagaacagggataatcgatgctgttgttgctgcacgcattttaaatgccacacttgttgttcccaaactagaccaagcatccttctggaaagattcaagcaatttttcggatattttttacgccgactggttcatctcatctctatcaaaggatgtaaagattgtgaaagagcttccacatataggagattcgaacctgatatgcttgccttttcggggtgctattacggtggtggagagaaagagaggagagaacttggtgctataaggaagaggtggaaaggcttgcatcctaacccagagaaaggaagaaggcaaggtagatgccctctaactcctgaagaggtgggtttgatgttgagagcgctgggctacagaaaggatgtccacatttatgtagcttctggagagatatatggaggtgcaaggactctggcacctcttaaagctctcttccctaatctccacacaaaagaaacaatatctagcaaagaggagctggctccattctctaaatattcttctcgcatggctgcacttgatttcattgtctgtgatgaaagtgatgcttttgtggctaacaacaacggcaacatggctaaaattttggctggacgaaggtatccgttgctgctatgtcatcagtggtttattacttgccctgaccatatttcgtgccctctgcaggagatactttgggcacaagagaacgatccgaccaaatgccaaaaggctctatcccttatttttgaacagaggaaacatgtcgtgggatgcattctcctcaaaagtacacatggttcagaaaggatttatgggagagcccaaagagctgaggccagggaggggagagtttcatgagaacccttctacctgcatttgtgaaaggactgatggcaaagcagtagccagagccaaatctcaagatgatcaagtattgaatagtgttgctgaccaaggcaaaggcattggcgagccagctgttcccaatcatacggatgaagaggcgggcgaacctgatgatgacgaagatgtccctgctgacaaagaggttgttgacgctgaaatggttgacgatgtattggccggggatcctgagttagaacagattctttcagactagtatccatcatcagagatgtttgcacaaaccaatttttggccgagtgattgatgaattttgccacgtccctcgaaattgtacatactttttttttgcgatgtaaatgtacgtatacatccaatctactctagcttagctcgcagcctccttacacagtagctcttttgtaacgtttgtggattgttatagcttgtatcatgggttttgctttttgtgtagcaactctttgacgccctttttgtgtaagcatcttttggcatgtaggatgtgaggtgcttaagcacggataattaaggagagaacgttgttataccattttcataaatgagttacttgcctagatagatttagccatcttgttaacacaaatgaaaaaattggtcttaagtaatatttgagtttt

SEQ ID NO: 210143 - DNA, 1203 bp, Zea Mays
gccgaggcaaggcgtttccccagtcgagcagaatgtcgagtggccagatgagttccctttcaagcctgaggacttcagccgcttcgacgaatcatcagatactctgttctactcggttccacgttttgtcactcacattgatgaccaagcaatccaagctctcacagagtactattctgaagttcttcctccaagtaatactcctggggtggccattctggacatgtgcagcagctgggtcagccattatcctcccggttacagacaagagaagatcgtggggatgggtatgaatgaagatgaactgaaaaagaactcggtactgactcagtatgtcgtgcaagacctcaatgtgaacccaaagcttcctttcgaagataacacttttgatgttatcaccaatgtggttagtgtagattaccttacaaagccaatagatgtttttaaggagatgcgacgaatactcaagccaagcggccttgccataatgagcttttcaaaccggtgcttttggacaaaagctatatctatatggacctcaactggtgatgctgatcatgcatggatagttggtgcttacttccattatgttggaggttttgaacctccccaggcacttgatatatctcctaatccaggacgaactgacccaatgtatgttgtatgctcgagaaagaaaatagggtaactaaacaatatatttggcaagtgtgcatatatatttgcagtgctatcaagaaacaaatagaaggaaaaatacaagaagcaagttgtttggccctgatcgcaggacctattggtgagctgatgtttccgtgagtaatgtaacgacagaaaaaagaagcaactactacataaactatttatagaagcggcagattcacttcataggttgtagcaactgtctttactaaaagtgtgtttggtttgaggaatgaagtgatccatcttcttctcactcctcacttttttatttggtttgtgtaatagaatgagttgatccatcaccactccattcctcgtaagataataattagtatatacatgaggggtgggttgattccaccaaaattgatagaatgaacttatgatgcatcacctcataaagcatagagtgactgcacaaaccaaacacaccataagggtatgtagaaatgatttattaaaataatggtatttattaaataatactacatccgtatt

SEQ ID NO: 210144 - DNA, 2120 bp, Zea Mays
gaaaaattgatttcctaaactagccctaatatggtactcgctgctaatgcgaccacagggataacttcccagtgtgtgttctattcttagtttctctgatcggctccaaattgccttgttcccatggtttatttggactcgaggtctctcactgatgatggatgtaggcagtgttcaacaatatcaggaagctttctcgtaccatcactgcaatcgtcgaccccacatggcagcgaaacggaaacggacgcgacacgctgcaacgttcgggagtaccagcgacgaacccaatcccaatccctatcttccgagatttgtctgcgcccctgcggcgcgcatggcgccacgactgaccgtggccttgggcggcgctcgggcatgagtacatggcgctcggtggcctcgcgtcgcgttactcacccaccggcaccgcgccacggccgcgttcgtctcaacaggagccgatggccactctcgcgccacggccacatatcctcctcggcttgacaaggccgcagcccatagcgcttcgtgcctgcgccgccttctcccgctcccgccacgcgccagtcccaccgcgggccgcgcagccgcggcgcgtcttcctcggccttggcgctgccttcatcgaccaggccacccgcatggcctccggcggcacctcgtcccgctctttcgttgccggagcgcggccgaggcaaggcgtttccccagtcgagcaggttttcatgctctaccttttagaaaatatcgctgcaaagctgtagtgttttcttgtttttggacctggttaatggagaaagattgtagattctcaagaatgtcgagtggccagatgagttccctttcaagcctgaggacttcagccgcttcgacgaatcatcagatactctgttctactcggttccacgttttgtcactcacattgatgaccaagcaatccaagctctcacagagtactattctgaagttcttcctccaagtaatactcctggggtggccattctggacatgtgcagcagctgggtcagccattatcctcccggttacagacaagagaagatcgtggggatgggtatgaatgaagatgaactgaaaaagaactcggtattatgtactgactcagtatgtcgtgcaagacctcaatgtgaacccaaagcttcctttcgaagataacacttttgatgttatcaccaatgtggtactgtgtcctttgtattgtattcttgttaaaagaagagattatacgttgtactgcaaagtgttacttctttattagcatcgtgaattggagcgcaaagattgtttacattatctgatagtagcacttctttgctagtaggttagtgtagattaccttacaaagccaatagatgtttttaaggagatgcgacgaatactcaagccaagcggccttgccataatgagcttttcaaaccggtgcttttggacaaaagctatatctatatggacctcaactggtgatgctgatcatgcatggatagttggtgcttacttccattatgttggaggttttgaacctccccaggcacttgatatatctcctaatccaggacgaactgacccaatgtatgttgtatgctcgagaaagaaaatagggtaactaaacaatatatttggcaagtgctatcaagaaacaaatagaaggaaaaatacaagaagcaagttgtttggccctgatcgcaggacctattggtgagctgatgtttccgtgagtaatgtaacgacagaaaaaagaagcaactactacataaactatttatagaagcggcagattcacttcataggttgtagcaactgtctttactaaaagtgtgtttggtttgaggaatgaagtgatccatcttcttctcactcctcacttttttatttggtttgtgtaatagaatgagttgatccatcaccactccattcctcgtaagataataattagtatatacatgaggggtgggttgattccaccaaaattgatagaatgaacttatgatgcatcacctcataaagcatagagtgactgcacaaaccaaacacaccataagggtatgtagaaatgatttattaaaataatggtatttattaaataatactacatccgtatt

SEQ ID NO: 210145 - DNA, 2100 bp, Zea Mays
atttctaatgtacaatttataacacattcttatacttccttctttatagcataaatgtagtatcgggataataaacaaatatattacatatataaatatattaacttaattagttttgtctaaattatacttattataatgaaattcaattccaacaaaataaacggggctaaggaaattagttcatttttcttttaataaaataggaattctttggaaaaattgatttcctaaactagccctaatatggtactcgctgctaatgcgaccacagggataacttcccagtgtgtgttctattcttagtttctctgatcggctccaaattgccttgttcccatggtttatttggactcgaggtctctcactgatgatggatgtaggcagtgttcaacaatatcaggaagctttctcgtaccatcactgcaatcgtcgaccccacatggcagcgaaacggaaacggacgcgacacgctgcaacgttcgggagtaccagcgacgaacccaatcccaatccctatcttccgagatttgtctgcgcccctgcggcgcgcatggcgccacgactgaccgtggccttgggcggcgctcgggcatgagtacatggcgctcggtggcctcgcgtcgcgttactcacccaccggcaccgcgccacggccgcgttcgtctcaacaggagccgatggccactctcgcgccacggccacatatcctcctcggcttgacaaggccgcagcccatagcgcttcgtgcctgcgccgccttctcccgctcccgccacgcgccagtcccaccgcgggccgcgcagccgcggcgcgtcttcctcggccttggcgctgccttcatcgaccaggccacccgcatggcctccggcggcacctcgtcccgctctttcgttgccggagcgcggccgaggcaaggcgtttccccagtcgagcagattctcaagaatgtcgagtggccagatgagttccctttcaagcctgaggacttcagccgcttcgacgaatcatcagatactctgttctactcggttccacgttttgtcactcacattgatgaccaagcaatccaagctctcacagagtactattctgaagttcttcctccaagtaatactcctggggtggccattctggacatgtgcagcagctgggtcagccattatcctcccggttacagacaagagaagatcgtggggatgggtatgaatgaagatgaactgaaaaagaactcggtactgactcagtatgtcgtgcaagacctcaatgtgaacccaaagcttcctttcgaagataacacttttgatgttatcaccaatgtggttagtgtagattaccttacaaagccaatagatgtttttaaggagatgcgacgaatactcaagccaagcggccttgccataatgagcttttcaaaccggtgcttttggacaaaagctatatctatatggacctcaactggtgatgctgatcatgcatggatagttggtgcttacttccattatgttggaggttttgaacctccccaggcacttgatatatctcctaatccaggacgaactgacccaatgtatgttgtatgctcgagaaagaaaatagggtaactaaacaatatatttggcaagtgctatcaagaaacaaatagaaggaaaaatacaagaagcaagttgtttggccctgatcgcaggacctattggtgagctgatgtttccgtgagtaatgtaacgacagaaaaaagaagcaactactacataaactatttatagaagcggcagattcacttcataggttgtagcaactgtctttactaaaagtgtgtttggtttgaggaatgaagtgatccatcttcttctcactcctcacttttttatttggtttgtgtaatagaatgagttgatccatcaccactccattcctcgtaagataataattagtatatacatgaggggtgggttgattccaccaaaattgatagaatgaacttatgatgcatcacctcataaagcatagagtgactgcacaaaccaaacacaccataagggtatgtagaaatgatttattaaaataatggtatttattaaataatactacatccgtatt

SEQ ID NO: 210146 - DNA, 2542 bp, Zea Mays
gaagaaagcactaaagcagagtgggatgccgcggtgaggactgaggactgaggactggacgcgcggcgcgggtgcgcggcttcggagtccgctagactacaccacgcgggttcggcaaatggggatggcggcggacgcgacgacggccatgaccatcgacttcctccgcgcgcgcctcctctccgagcgctccgtctcccgcgccgccaaggagcgggccgaccaccttgccaagcgggttgtggagctggaggagcagctccggacggtgacggcgcagcggcgcaaggcggagcgggcggccgcggaggtgcttgccatcctcgactcccagggcttcggccgcctctccgacgccgcggacgattcaggctcagagtacgaggccgacacgggcgatcccaatgccgtcgagagggacggaggcggcgggaatgcagcggaggacgcgctgtcggggtcggagctgggagccccggcggcggcggctgctgcctctgctgctcaggccgggggcttgtcgtggaggggccgcgccgcgagccccgaatgcgagaggcggcggccgcagcaccaacagcacaagggcaggcagctaaggcagaggcacggccacggccacggccacaggaggggttacttttactgccgcgccgcggattcgtcgcccaagtaccacccagggcagtcttgccggaagatcaagaggaaggagctgagatctcagacagaagaagaggagggcaacgacaatgcagtggagagcacggaggacgggcaggagagatcagattgtactgtttgcactgatcaaccggctgatgttgatggcgaggtgaaccaagatgggcatggctcttctagtaatggaagaggggaggatcgtgatgatcttgccatggtatatgagaaggatggggagatggagagggtactcgagaagcaggctgagctaattggacagttcgaggctcaagaaaatgctcagagggagtgggaggagaaattcagcctgagccgggattcagttatggataatgttaacttattaaacaacaagctaaatcaggctgaaaatgcttgtgggaggagggaaactgctcgggttgtagataaagaagtggtttgtgaacaggcaagatcaagtgacaataatttccattgcatcaacgacccctctgaatgtctaccaaatggccctgtttcagaattgccccaaaatgtagccaaagatagtgttactgaacaccggaaatttgatgggtttggtcatgattgtgtagtgactgctgcagcagtaatttcaagccacggagaactgcaggttaggaaggatgtgctgacaactaaaagctatcctgaaggaagtggcaataatcttgggaaatcagctctaccaccacaaggaagctgtggtagcagactaaatgcaggacatagaaatggtcaaggagatgaaagttcagacagtggttcaagctaccatgtgaatgctcgatcttctgagcaatacataaacacatcatcagttgggagccagctaagtgatactcctaaaagcgaagtctcagaatggagctcctcttgctttcataaccataccgataaccagcttgatacacaacttcatcaatcatcaaacaaagatgtaggaggggtgctagaggcccttcgacgtgccaagatgtctctcagagcaaagctgagctggccaagtctagccagcaagaacatattggcacttgaagcaccggatgatttgccagtcaatggcatggaactttcactctgcaggacagcccatgtcagtcaggaaatattcgcactaccaacaccaacagactaccttaacaaggtattaccgcatgatgatgtgaaggtaccaataggtcctgctggtttgtttcgtttgccaatagattcatttcccagagatgagatgaccacaagggatggctatggttcatggttcagtttgacctcggtgagtccaccctacgtgtcgccaagctatcatgctgatcatattatgccagctctatccttgtctcagtatggttctgggttgtcactaaatccatactatgatcctcatagttccatgttgctatccatgcccactgctggtgggcgtagcgtccctgtgtcagatttcagaataggggatggttccttcctccgagaagttccacggcctgacaattattaggggatgccttctagagacaactgcacacttccagtatggtcatggtcacgggaactctcataatgttcaaatgtatcttcatgctttgtaaaaactatcaaaaagttcaattgtacctgttcatgcttggaatctcacgtctgtgatggtgttggatgccatttgctgcatcgattctgcattacgttaggtactgatgtataccatgtagtgttgcaaactaagaacatgttctgtttgtaagcagtatcggtgtttgaaatattatttcgtccgtccgatgtaagttgtgataaggtactaggatggtaataaagctaatttttttaactg

SEQ ID NO: 210147 - DNA, 6231 bp, Zea Mays
ctcgtcccctccagccgtccagcgcccacggtggtgcgtcctctccgagacaccgctcgccggacctcttccgagtttgggaaactctggcgccatgaatccaatagtatagcacacgtcgcatgggagaaggcacattccaagagcagatgatccacacacacggtttcagcccggtggcccaacggcgcagctatcaccatccagtaacatccccggaattcacccctgccttctgttctgctgttcaccccgcgtgcgcgttcttcctctcgtgcgacaactgggcgaccgccgccgtcctacggcaggtggtcacttcttcgtcggttccttcgctggcgacgagcacccaccaagccctggaagaagcaaggattcaccctcaagctcgaaactgaacgcaactcccgaagacccggtgaagccatgtctgcggggagaggcgatccaaacacccctgccaacaggcctctgttcctgagtgctggggtgcccaacttaggctgtcacaatgttgcagctccagctgcagcaggcaacagcggctcgatcgcctcgcaagtcttattctccccatgctccacgtctgtcctgaatactattcaggaggttcctgctccacaatctgctctgttgagtccgataaaccgtgcaactgaacaaggtgatgtgccctgcatccagccatcctggaatatgcctgggggttgcacgcaggtgcctattaatatcatagtgttccatagggaactcactagaaggggttcgaggccgcagttgtcgccgtcggccactgccttacctgatgtttcagagggagcttccattcggcttgctgggagtaatttcttgtcacatggaagaacacctagcatcgttgcaggtgatatgacaacgaattcttcacagctagccactgcagataaatacaattcagagcatcggatgaattgtttacatgatgaagcatccaagactgaaaatggaaaaggaagtacccaacttccacaattagcaacagcaattttccgtgacagctacaatgatttggaatcagtggttcctgcagctacctgggaaacacgagtgcaacattctcaagaatcaaccacctgtcttgcagaaagtaccactgatgacaacattcatatgtaccaatctatgcaaaaaaggctcaagacacaaatcaacaagagtgaacacacaccattgtcagcaccaactgtacccaaggagaaaacactgactcaaattgagacgcagctagcaagtgccgagaaaaccgaaatgttcaggaatgaggaaaccccagcgctgaaaatgaaggctcggaagaaaaaacacagaccaaaggtaatcagagagaataagccagccaaagtgcagaaacctgattcaacaccagatggaaaatctccgaaccaaaaggtcaagagaagttatgtccggaagaaaagaaacctcagctctctggagaattgctctggtcctgttagcgatcaatcaatctctggagcaacaggagttgcagctagaagcagaacatcatcagttcgacgaagtctgcaatttgaatccaaagaacaaggattgcagggcggccattcgtcaatggccaacatacaccatcacaactatgagaaacctggccatgctcaaagttctttctactcagagtcagaagtgcagactgggcgtgtgatgcaagaaggtatggagaattcaccaggagaattagctttcgacatgagtcgcagactgaacaaatttttagatgagtacatacatttgccagatatgctaaaacctacacaagaagtttcggctgcaacttctgcatcatttagtacggaactggcaagggaagaagataatgtgggaagaacttgcaaacctgatggcaaaagtaagtgcagtttgtttgctgatgaaagggtggtaaaccccacaatagaagggaacaaaaaggacttggaattaaactattctgatgctgatggtcttgtttcctcagctaggtctttacctcaaatggatcccacaagaagtcagatgggtaaggtgtcggaagtggaaaaccccacacaccatagcaatggttcgctacctggcacacgggactctgttgtcttgagggctgcagctgagatgttcgcatttttccaagcgggtgcaataaaaaagaagcgatctgcccgactccgcagaaattcccccttttatactatggatcttaagaataatactctacaagcatcaacaagactgccacagccatgcatggatgcgctgcatagaagttcttgcattaagtttttgaccaaaaaacgttcagaaaaggcaagaccgcactgttccagtgtaattcaaccaaatgatgagctgaaggacaggctttcagctggaagcactttttatggcgcaactaatggatgcaaaatatcagaagagagttctccaaacttttcatctcagaccctggacaataaaagaatcaacgttgatactcattgtgaagtagcagaagggagatcaaccaacacatcaacaggaccctatatggattacgttcaaggagttgcatcaaagttgaagcatcttgatttgaatactgaacaggtgcagagaactgagatgcatttatctctgaccacaccagctgttatttcttttgagggaacaagtggtccttcaaatgctcttgtcccatatggtggtgtggtgatggttcccaatgagaggcccttgcagttagtcaaaaagcagcggcctcgtgctaaggttgacttggattttgagacgacgagggtttggaaccttttgatggggaaatcagccgagtcttatgggactgatgttgaaaaggagagatggtggcagcaagaaagagaagtgtttcaaagccgtgctaattcgtttatagcacgcatgcgacttgttcaaggggacaggcgcttttctccttggaaaggatctgtagtcgattctgtagtaggagtgttcctcactcagaatgtagctgatcatctttcaagctctgcctatatggcccttgccgcaagttttccttcacggccagtcaacaataattgtaaggatgatggtaccacagaagacaataaacaaaccaccaggatgagtgagctagtaggagagaaaagtgtgtttgaccttttctacaatggtgttagacctgatctagaagtgggatgtgaggaggtatcaatgacttgcaagaagacacacatggaaccaacagacaatactagggatagtgaatttattgaaggtgaaacctattcctttgattacaaatcaacagatgaaagcgtttgcaatcacaaagggataggtatagaacataaagaacaacaattaccagatttctcctcagcagaattaactgtgtctacagaactcgtgcagcagatacaaatccagaagatctcatcctctcaaattttaacttcagaaaccatacaatcaagattatctttgagttctgagatacctagaaattttgtttgtggtggttctgctgcagcttatcagcagctgggaagcaatttcgaccagggaagctcattaacagaaaatgatgccacagccagtgaaattgaatgtcacagactccaaatggctgcaataaatgattatggatttggtaaacctgagattccttctagttcctcaatgccatttttcttggctgttgatcctcaacaactgaaattgagaaatgagacaaatgtttcttcaacatcttccaacattccttcagattctgcatcaccaaacttgaaaaatggcacggatcctcttttgatgccatttaattcctacatggcagattggagcagcgataagataacttacaccactctgaacactccaaaaataagcacagaacttccagtcaagttacaccatgacaaaagtagtagctttgaagcaccaaacctgaaggagcatgaatcagtctttgcaacacatgaaatgacggtagaagcaacaagaaaagaagacgaacacacatcaaaatctagttttacttcctacaatggagtaccagatacagctgcacaagcatcaaagccaaagaaaacaagaaccacaactgcaaagaacacagagaattttgactgggaaaaattacgaaggcaggcttgtagtgaagggcagatgaaacaaagaagttttgaaagaagagactctatagattgggaagcagtacggtgtgcagatgtacgaagaatatctcatgccattcgggagagggggatgaataatgttttagcagagcgaatccagaattttctgaatcgtttggttagagatcatgggagcattgaccttgagtggctaagatatattcccccagactcagcgaaggattacctactaagtatacggggactggggcttaaaagtgttgaatgtgttcgtcttctcacactgcatcatcttgctttccctgttgacaccaatgttggtcgtatatgtgtaagactgggatgggtgcccattcaacctcttcctgaatctctacagctacatctcttggagctatatcctatcttggaaactatacaaaagtatctttggcctcgcctttgtaaactcgatcagcagacactgtatgagctgcattatcagatgattacatttggaaaggtcttttgtaccaaaagacagccaaattgcaatgcatgcccaatgaggagtgagtgcaagcattttgcaagtgcatttgcaagtgcaaggcttgcacttcctgctccccaggaggaaagcttagtgaagttgagcaatccatttgctttccagaatagcagcatgcatgctatgaattcgactcacctacctcgccttgaggggagtatccattcaagggagtttcttcctaagaattcagagccaataatcgaggagcctgcaagtccaagagaggaaagacctccagaaaccatggaaaatgatattgaagatttttatgaagatggtgaaatcccaacaataaagcttaacatggaagcttttgcacaaaacttggagaattgcattaaagaaagcaataacgaactccagtctgatgatattgcaaaagcattggttgctattagcactgaagcagcttcgattcctgtaccgaaactaaagaatgtgcttaggcttcgaacagaacactatgtgtatgagcttccagatgcacatccacttttacaacagctaggacttgaccaacgggaacatgatgatcctaccccatacttattggccatatggacaccagatggaataaaggaaataactaagacaccaaaaccatgctgtgaccctcaaatgggaggcgatttatgcaataatgaaatgtgccacaattgtactgcagagaaagaaaaccaatctagatatgtcagaggcacaattctggttccttgtcgaacagctatgaggggtagtttcccacttaatggcacttactttcaagtcaatgaggtatttgctgaccacagatctagccacaacccaatccatgtggaaagggagatgctatggaacttgcaaaggcgcatggtctttttcgggacttcagtacccaccatattcaaaggtctaagaacagaagaaatacaacaatgcttctggaggggatttgtctgtgtgcgaggattcgacatggagactagagcaccaaggcctctgtgcccccatttgcacattatagcaaggccgaaggcccgcaagacagcagcaactgagcaagtactctaatcagcaaagatatcagttttatgaacatcatgtttattgtgatatgacatcaatagctctcgacctatgcatggaatcatattacttcctgcctggcgatggccattgtttaggaaatttaagccatggatggggtccgagactgttagttctgagacgagaggactaatgaagcatcaggaagcaccaataattttcacttttttgtttcagatctactgtatgtaaattagcatctaactgttagttatgagacgagaggactaatgaagcatcaggaagcaccaaataattttcacttttttgtttcagatctactgtatgtaaattagcatctagctgttagtccatgtaagatgccattgctatcctttctgagacaaactaccttatcaacatttcatttggttaacatttgttctgagtattgggaagcctgccagaattttgttt

SEQ ID NO: 210148 - DNA, 6130 bp, Zea Mays
ctcgtcccctccagccgtccagcgcccacggtggtgcgtcctctccgagacaccgctcgccggacctcttccgagtttgggaaactctggcgccatgaatccaatagtatagcacacgtcgcatgggagaaggcacattccaagagcagatgatccacacacacggtttcagcccggtggcccaacggcgcagctatcaccatccagtaacatccccggaattcacccctgccttctgttctgctgttcaccccgcgtgcgcgttcttcctctcgtgcgacaactgggcgaccgccgccgtcctacggcaggtggtcacttcttcgtcggttccttcgctggcgacgagcacccaccaagccctggaagaagcaaggattcaccctcaagctcgaaactgaacgcaactcccgaagacccggtgaagccatgtctgcggggagaggcgatccaaacacccctgccaacaggcctctgttcctgagtgctggggtgcccaacttaggctgtcacaatgttgcagctccagctgcagcaggcaacagcggctcgatcgcctcgcaagtcttattctccccatgctccacgtctgtcctgaatactattcaggaggttcctgctccacaatctgctctgttgagtccgataaaccgtgcaactgaacaaggtgatgtgccctgcatccagccatcctggaatatgcctgggggttgcacgcaggtgcctattaatatcatagtgttccatagggaactcactagaaggggttcgaggccgcagttgtcgccgtcggccactgccttacctgatgtttcagagggagcttccattcggcttgctgggagtaatttcttgtcacatggaagaacacctagcatcgttgcaggtgatatgacaacgaattcttcacagctagccactgcagataaatacaattcagagcatcggatgaattgtttacatgatgaagcatccaagactgaaaatggaaaaggaagtacccaacttccacaattagcaacagcaattttccgtgacagctacaatgatttggaatcagtggttcctgcagctacctgggaaacacgagtgcaacattctcaagaatcaaccacctgtcttgcagaaagtaccactgatgacaacattcatatgtaccaatctatgcaaaaaaggctcaagacacaaatcaacaagagtgaacacacaccattgtcagcaccaactgtacccaaggagaaaacactgactcaaattgagacgcagctagcaagtgccgagaaaaccgaaatgttcaggaatgaggaaaccccagcgctgaaaatgaaggctcggaagaaaaaacacagaccaaaggtaatcagagagaataagccagccaaagtgcagaaacctgattcaacaccagatggaaaatctccgaaccaaaaggtcaagagaagttatgtccggaagaaaagaaacctcagctctctggagaattgctctggtcctgttagcgatcaatcaatctctggagcaacaggagttgcagctagaagcagaacatcatcagttcgacgaagtctgcaatttgaatccaaagaacaaggattgcagggcggccattcgtcaatggccaacatacaccatcacaactatgagaaacctggccatgctcaaagttctttctactcagagtcagaagtgcagactgggcgtgtgatgcaagaaggtatggagaattcaccaggagaattagctttcgacatgagtcgcagactgaacaaatttttagatgagtacatacatttgccagatatgctaaaacctacacaagaagtttcggctgcaacttctgcatcatttagtacggaactggcaagggaagaagataatgtgggaagaacttgcaaacctgatggcaaaagtaagtgcagtttgtttgctgatgaaagggtggtaaaccccacaatagaagggaacaaaaaggacttggaattaaactattctgatgctgatggtcttgtttcctcagctaggtctttacctcaaatggatcccacaagaagtcagatgggtaaggtgtcggaagtggaaaaccccacacaccatagcaatggttcgctacctggcacacgggactctgttgtcttgagggctgcagctgagatgttcgcatttttccaagcgggtgcaataaaaaagaagcgatctgcccgactccgcagaaattcccccttttatactatggatcttaagaataatactctacaagcatcaacaagactgccacagccatgcatggatgcgctgcatagaagttcttgcattaagtttttgaccaaaaaacgttcagaaaaggcaagaccgcactgttccagtgtaattcaaccaaatgatgagctgaaggacaggctttcagctggaagcactttttatggcgcaactaatggatgcaaaatatcagaagagagttctccaaacttttcatctcagaccctggacaataaaagaatcaacgttgatactcattgtgaagtagcagaagggagatcaaccaacacatcaacaggaccctatatggattacgttcaaggagttgcatcaaagttgaagcatcttgatttgaatactgaacaggtgcagagaactgagatgcatttatctctgaccacaccagctgttatttcttttgagggaacaagtggtccttcaaatgctcttgtcccatatggtggtgtggtgatggttcccaatgagaggcccttgcagttagtcaaaaagcagcggcctcgtgctaaggttgacttggattttgagacgacgagggtttggaaccttttgatggggaaatcagccgagtcttatgggactgatgttgaaaaggagagatggtggcagcaagaaagagaagtgtttcaaagccgtgctaattcgtttatagcacgcatgcgacttgttcaaggggacaggcgcttttctccttggaaaggatctgtagtcgattctgtagtaggagtgttcctcactcagaatgtagctgatcatctttcaagctctgcctatatggcccttgccgcaagttttccttcacggccagtcaacaataattgtaaggatgatggtaccacagaagacaataaacaaaccaccaggatgagtgagctagtaggagagaaaagtgtgtttgaccttttctacaatggtgttagacctgatctagaagtgggatgtgaggaggtatcaatgacttgcaagaagacacacatggaaccaacagacaatactagggatagtgaatttattgaaggtgaaacctattcctttgattacaaatcaacagatgaaagcgtttgcaatcacaaagggataggtatagaacataaagaacaacaattaccagatttctcctcagcagaattaactgtgtctacagaactcgtgcagcagatacaaatccagaagatctcatcctctcaaattttaacttcagaaaccatacaatcaagattatctttgagttctgagatacctagaaattttgtttgtggtggttctgctgcagcttatcagcagctgggaagcaatttcgaccagggaagctcattaacagaaaatgatgccacagccagtgaaattgaatgtcacagactccaaatggctgcaataaatgattatggatttggtaaacctgagattccttctagttcctcaatgccatttttcttggctgttgatcctcaacaactgaaattgagaaatgagacaaatgtttcttcaacatcttccaacattccttcagattctgcatcaccaaacttgaaaaatggcacggatcctcttttgatgccatttaattcctacatggcagattggagcagcgataagataacttacaccactctgaacactccaaaaataagcacagaacttccagtcaagttacaccatgacaaaagtagtagctttgaagcaccaaacctgaaggagcatgaatcagtctttgcaacacatgaaatgacggtagaagcaacaagaaaagaagacgaacacacatcaaaatctagttttacttcctacaatggagtaccagatacagctgcacaagcatcaaagccaaagaaaacaagaaccacaactgcaaagaacacagagaattttgactgggaaaaattacgaaggcaggcttgtagtgaagggcagatgaaacaaagaagttttgaaagaagagactctatagattgggaagcagtacggtgtgcagatgtacgaagaatatctcatgccattcgggagagggggatgaataatgttttagcagagcgaatccagaattttctgaatcgtttggttagagatcatgggagcattgaccttgagtggctaagatatattcccccagactcagcgaaggattacctactaagtatacggggactggggcttaaaagtgttgaatgtgttcgtcttctcacactgcatcatcttgctttccctgttgacaccaatgttggtcgtatatgtgtaagactgggatgggtgcccattcaacctcttcctgaatctctacagctacatctcttggagctatatcctatcttggaaactatacaaaagtatctttggcctcgcctttgtaaactcgatcagcagacactgtatgagctgcattatcagatgattacatttggaaaggtcttttgtaccaaaagacagccaaattgcaatgcatgcccaatgaggagtgagtgcaagcattttgcaagtgcatttgcaagtgcaaggcttgcacttcctgctccccaggaggaaagcttagtgaagttgagcaatccatttgctttccagaatagcagcatgcatgctatgaattcgactcacctacctcgccttgaggggagtatccattcaagggagtttcttcctaagaattcagagccaataatcgaggagcctgcaagtccaagagaggaaagacctccagaaaccatggaaaatgatattgaagatttttatgaagatggtgaaatcccaacaataaagcttaacatggaagcttttgcacaaaacttggagaattgcattaaagaaagcaataacgaactccagtctgatgatattgcaaaagcattggttgctattagcactgaagcagcttcgattcctgtaccgaaactaaagaatgtgcttaggcttcgaacagaacactatgtgtatgagcttccagatgcacatccacttttacaacagctaggacttgaccaacgggaacatgatgatcctaccccatacttattggccatatggacaccagatggaataaaggaaataactaagacaccaaaaccatgctgtgaccctcaaatgggaggcgatttatgcaataatgaaatgtgccacaattgtactgcagagaaagaaaaccaatctagatatgtcagaggcacaattctggttccttgtcgaacagctatgaggggtagtttcccacttaatggcacttactttcaagtcaatgaggtatttgctgaccacagatctagccacaacccaatccatgtggaaagggagatgctatggaacttgcaaaggcgcatggtctttttcgggacttcagtacccaccatattcaaagaagaaatacaacaatgcttctggaggggatttgtctgtgtgcgaggattcgacatggagactagagcaccaaggcctctgtgcccccatttgcacattatagcaaggccgaaggcccgcaagacagcagcaactgagcaagtactctaatcagcaaagatatcagttttatgaacatcatgtttattgtgatatgacatcaatagctctcgacctatgcatggaatcatattacttcctgcctggcgatggccattgtttaggaaatttaagccatggatggggtccgagactgttagttctgagacgagaggactaatgaagcatcaggaagcaccaataattttcacttttttgtttcagatctactgtatgtaaattagcatctagctgttagtccatgtaagatgccattgctatcctttctgagacaaactaccttatcaacatttcatttggttaacatttgttctgagtattgggaagcctgccagaattttgttttcgtacctgt

SEQ ID NO: 210149 - DNA, 5957 bp, Zea Mays
ctcgtcccctccagccgtccagcgcccacggtggtgcgtcctctccgagacaccgctcgccggacctcttccgagtttgggaaactctggcgccatgaatccaatagtatagcacacgtcgcatgggagaaggcacattccaagagcagatgatccacacacacggtttcagcccggtggcccaacggcgcagctatcaccatccagccctggaagaagcaaggattcaccctcaagctcgaaactgaacgcaactcccgaagacccggtgaagccatgtctgcggggagaggcgatccaaacacccctgccaacaggcctctgttcctgagtgctggggtgcccaacttaggctgtcacaatgttgcagctccagctgcagcaggcaacagcggctcgatcgcctcgcaagtcttattctccccatgctccacgtctgtcctgaatactattcaggaggttcctgctccacaatctgctctgttgagtccgataaaccgtgcaactgaacaaggtgatgtgccctgcatccagccatcctggaatatgcctgggggttgcacgcaggtgcctattaatatcatagtgttccatagggaactcactagaaggggttcgaggccgcagttgtcgccgtcggccactgccttacctgatgtttcagagggagcttccattcggcttgctgggagtaatttcttgtcacatggaagaacacctagcatcgttgcaggtgatatgacaacgaattcttcacagctagccactgcagataaatacaattcagagcatcggatgaattgtttacatgatgaagcatccaagactgaaaatggaaaaggaagtacccaacttccacaattagcaacagcaattttccgtgacagctacaatgatttggaatcagtggttcctgcagctacctgggaaacacgagtgcaacattctcaagaatcaaccacctgtcttgcagaaagtaccactgatgacaacattcatatgtaccaatctatgcaaaaaaggctcaagacacaaatcaacaagagtgaacacacaccattgtcagcaccaactgtacccaaggagaaaacactgactcaaattgagacgcagctagcaagtgccgagaaaaccgaaatgttcaggaatgaggaaaccccagcgctgaaaatgaaggctcggaagaaaaaacacagaccaaaggtaatcagagagaataagccagccaaagtgcagaaacctgattcaacaccagatggaaaatctccgaaccaaaaggtcaagagaagttatgtccggaagaaaagaaacctcagctctctggagaattgctctggtcctgttagcgatcaatcaatctctggagcaacaggagttgcagctagaagcagaacatcatcagttcgacgaagtctgcaatttgaatccaaagaacaaggattgcagggcggccattcgtcaatggccaacatacaccatcacaactatgagaaacctggccatgctcaaagttctttctactcagagtcagaagtgcagactgggcgtgtgatgcaagaaggtatggagaattcaccaggagaattagctttcgacatgagtcgcagactgaacaaatttttagatgagtacatacatttgccagatatgctaaaacctacacaagaagtttcggctgcaacttctgcatcatttagtacggaactggcaagggaagaagataatgtgggaagaacttgcaaacctgatggcaaaagtaagtgcagtttgtttgctgatgaaagggtggtaaaccccacaatagaagggaacaaaaaggacttggaattaaactattctgatgctgatggtcttgtttcctcagctaggtctttacctcaaatggatcccacaagaagtcagatgggtaaggtgtcggaagtggaaaaccccacacaccatagcaatggttcgctacctggcacacgggactctgttgtcttgagggctgcagctgagatgttcgcatttttccaagcgggtgcaataaaaaagaagcgatctgcccgactccgcagaaattcccccttttatactatggatcttaagaataatactctacaagcatcaacaagactgccacagccatgcatggatgcgctgcatagaagttcttgcattaagtttttgaccaaaaaacgttcagaaaaggcaagaccgcactgttccagtgtaattcaaccaaatgatgagctgaaggacaggctttcagctggaagcactttttatggcgcaactaatggatgcaaaatatcagaagagagttctccaaacttttcatctcagaccctggacaataaaagaatcaacgttgatactcattgtgaagtagcagaagggagatcaaccaacacatcaacaggaccctatatggattacgttcaaggagttgcatcaaagttgaagcatcttgatttgaatactgaacaggtgcagagaactgagatgcatttatctctgaccacaccagctgttatttcttttgagggaacaagtggtccttcaaatgctcttgtcccatatggtggtgtggtgatggttcccaatgagaggcccttgcagttagtcaaaaagcagcggcctcgtgctaaggttgacttggattttgagacgacgagggtttggaaccttttgatggggaaatcagccgagtcttatgggactgatgttgaaaaggagagatggtggcagcaagaaagagaagtgtttcaaagccgtgctaattcgtttatagcacgcatgcgacttgttcaaggggacaggcgcttttctccttggaaaggatctgtagtcgattctgtagtaggagtgttcctcactcagaatgtagctgatcatctttcaagctctgcctatatggcccttgccgcaagttttccttcacggccagtcaacaataattgtaaggatgatggtaccacagaagacaataaacaaaccaccaggatgagtgagctagtaggagagaaaagtgtgtttgaccttttctacaatggtgttagacctgatctagaagtgggatgtgaggaggtatcaatgacttgcaagaagacacacatggaaccaacagacaatactagggatagtgaatttattgaaggtgaaacctattcctttgattacaaatcaacagatgaaagcgtttgcaatcacaaagggataggtatagaacataaagaacaacaattaccagatttctcctcagcagaattaactgtgtctacagaactcgtgcagcagatacaaatccagaagatctcatcctctcaaattttaacttcagaaaccatacaatcaagattatctttgagttctgagatacctagaaattttgtttgtggtggttctgctgcagcttatcagcagctgggaagcaatttcgaccagggaagctcattaacagaaaatgatgccacagccagtgaaattgaatgtcacagactccaaatggctgcaataaatgattatggatttggtaaacctgagattccttctagttcctcaatgccatttttcttggctgttgatcctcaacaactgaaattgagaaatgagacaaatgtttcttcaacatcttccaacattccttcagattctgcatcaccaaacttgaaaaatggcacggatcctcttttgatgccatttaattcctacatggcagattggagcagcgataagataacttacaccactctgaacactccaaaaataagcacagaacttccagtcaagttacaccatgacaaaagtagtagctttgaagcaccaaacctgaaggagcatgaatcagtctttgcaacacatgaaatgacggtagaagcaacaagaaaagaagacgaacacacatcaaaatctagttttacttcctacaatggagtaccagatacagctgcacaagcatcaaagccaaagaaaacaagaaccacaactgcaaagaacacagagaattttgactgggaaaaattacgaaggcaggcttgtagtgaagggcagatgaaacaaagaagttttgaaagaagagactctatagattgggaagcagtacggtgtgcagatgtacgaagaatatctcatgccattcgggagagggggatgaataatgttttagcagagcgaatccagaattttctgaatcgtttggttagagatcatgggagcattgaccttgagtggctaagatatattcccccagactcagcgaaggattacctactaagtatacggggactggggcttaaaagtgttgaatgtgttcgtcttctcacactgcatcatcttgctttccctgttgacaccaatgttggtcgtatatgtgtaagactgggatgggtgcccattcaacctcttcctgaatctctacagctacatctcttggagctatatcctatcttggaaactatacaaaagtatctttggcctcgcctttgtaaactcgatcagcagacactgtatgagctgcattatcagatgattacatttggaaaggtcttttgtaccaaaagacagccaaattgcaatgcatgcccaatgaggagtgagtgcaagcattttgcaagtgcatttgcaagtgcaaggcttgcacttcctgctccccaggaggaaagcttagtgaagttgagcaatccatttgctttccagaatagcagcatgcatgctatgaattcgactcacctacctcgccttgaggggagtatccattcaagggagtttcttcctaagaattcagagccaataatcgaggagcctgcaagtccaagagaggaaagacctccagaaaccatggaaaatgatattgaagatttttatgaagatggtgaaatcccaacaataaagcttaacatggaagcttttgcacaaaacttggagaattgcattaaagaaagcaataacgaactccagtctgatgatattgcaaaagcattggttgctattagcactgaagcagcttcgattcctgtaccgaaactaaagaatgtgcttaggcttcgaacagaacactatgtgtatgagcttccagatgcacatccacttttacaacagctaggacttgaccaacgggaacatgatgatcctaccccatacttattggccatatggacaccagatggaataaaggaaataactaagacaccaaaaccatgctgtgaccctcaaatgggaggcgatttatgcaataatgaaatgtgccacaattgtactgcagagaaagaaaaccaatctagatatgtcagaggcacaattctggttccttgtcgaacagctatgaggggtagtttcccacttaatggcacttactttcaagtcaatgaggtatttgctgaccacagatctagccacaacccaatccatgtggaaagggagatgctatggaacttgcaaaggcgcatggtctttttcgggacttcagtacccaccatattcaaaggtctaagaacagaagaaatacaacaatgcttctggaggggatttgtctgtgtgcgaggattcgacatggagactagagcaccaaggcctctgtgcccccatttgcacattatagcaaggccgaaggcccgcaagacagcagcaactgagcaagtactctaatcagcaaagatatcagttttatgaacatcatgtttattgtgatatgacatcaatagctctcgacctatgcatggaatcatattacttcctgcctggcgatggccattgtttaggaaatttaagccatggatggggtccgagactgttagttctgagacgagaggactaatgaagcatcaggaagcaccaataattttcacttttttgtttcagatctactgtatgtaaattagcatctagctgttagtccaaactaccttatcaacatttcatttggttaacatttgttctgagtattgggaagcctgccagaattttgttttcgtacctgt

SEQ ID NO: 210150 - DNA, 6011 bp, Zea Mays
ctcgtcccctccagccgtccagcgcccacggtggtgcgtcctctccgagacaccgctcgccggacctcttccgagtttgggaaactctggcgccatgaatccaatagtatagcacacgtcgcatgggagaaggcacattccaagagcagatgatccacacacacggtttcagcccggtggcccaacggcgcagctatcaccatccagtaacatccccggaattcacccctgccttctgttctgctgttcaccccgcgtgcgcgttcttcctctcgtgcgacaactgggcgaccgccgccgtcctacggcaggtggtcacttcttcgtcggttccttcgctggcgacgagcacccaccaagccctggaagaagcaaggattcaccctcaagctcgaaactgaacgcaactcccgaagacccggtgaagccatgtctgcggggagaggcgatccaaacacccctgccaacaggcctctgttcctgagtgctggggtgcccaacttaggctgtcacaatgttgcagctccagctgcagcaggcaacagcggctcgatcgcctcgcaagtcttattctccccatgctccacgtctgtcctgaatactattcaggaggttcctgctccacaatctgctctgttgagtccgataaaccgtgcaactgaacaaggtgatgtgccctgcatccagccatcctggaatatgcctgggggttgcacgcaggtgcctattaatatcatagtgttccatagggaactcactagaaggggttcgaggccgcagttgtcgccgtcggccactgccttacctgatgtttcagagggagcttccattcggcttgctgggagtaatttcttgtcacatggaagaacacctagcatcgttgcaggtgatatgacaacgaattcttcacagctagccactgcagataaatacaattcagagcatcggatgaattgtttacatgatgaagcatccaagactgaaaatggaaaaggaagtacccaacttccacaattagcaacagcaattttccgtgacagctacaatgatttggaatcagtggttcctgcagctacctgggaaacacgagtgcaacattctcaagaatcaaccacctgtcttgcagaaagtaccactgatgacaacattcatatgtaccaatctatgcaaaaaaggctcaagacacaaatcaacaagagtgaacacacaccattgtcagcaccaactgtacccaaggagaaaacactgactcaaattgagacgcagctagcaagtgccgagaaaaccgaaatgttcaggaatgaggaaaccccagcgctgaaaatgaaggctcggaagaaaaaacacagaccaaaggtaatcagagagaataagccagccaaagtgcagaaacctgattcaacaccagatggaaaatctccgaaccaaaaggtcaagagaagttatgtccggaagaaaagaaacctcagctctctggagaattgctctggtcctgttagcgatcaatcaatctctggagcaacaggagttgcagctagaagcagaacatcatcagttcgacgaagtctgcaatttgaatccaaagaacaaggattgcagggcggccattcgtcaatggccaacatacaccatcacaactatgagaaacctggccatgctcaaagttctttctactcagagtcagaagtgcagactgggcgtgtgatgcaagaaggtatggagaattcaccaggagaattagctttcgacatgagtcgcagactgaacaaatttttagatgagtacatacatttgccagatatgctaaaacctacacaagaagtttcggctgcaacttctgcatcatttagtacggaactggcaagggaagaagataatgtgggaagaacttgcaaacctgatggcaaaagtaagtgcagtttgtttgctgatgaaagggtggtaaaccccacaatagaagggaacaaaaaggacttggaattaaactattctgatgctgatggtcttgtttcctcagctaggtctttacctcaaatggatcccacaagaagtcagatgggtaaggtgtcggaagtggaaaaccccacacaccatagcaatggttcgctacctggcacacgggactctgttgtcttgagggctgcagctgagatgttcgcatttttccaagcgggtgcaataaaaaagaagcgatctgcccgactccgcagaaattcccccttttatactatggatcttaagaataatactctacaagcatcaacaagactgccacagccatgcatggatgcgctgcatagaagttcttgcattaagtttttgaccaaaaaacgttcagaaaaggcaagaccgcactgttccagtgtaattcaaccaaatgatgagctgaaggacaggctttcagctggaagcactttttatggcgcaactaatggatgcaaaatatcagaagagagttctccaaacttttcatctcagaccctggacaataaaagaatcaacgttgatactcattgtgaagtagcagaagggagatcaaccaacacatcaacaggaccctatatggattacgttcaaggagttgcatcaaagttgaagcatcttgatttgaatactgaacaggtgcagagaactgagatgcatttatctctgaccacaccagctgttatttcttttgagggaacaagtggtccttcaaatgctcttgtcccatatggtggtgtggtgatggttcccaatgagaggcccttgcagttagtcaaaaagcagcggcctcgtgctaaggttgacttggattttgagacgacgagggtttggaaccttttgatggggaaatcagccgagtcttatgggactgatgttgaaaaggagagatggtggcagcaagaaagagaagtgtttcaaagccgtgctaattcgtttatagcacgcatgcgacttgttcaaggggacaggcgcttttctccttggaaaggatctgtagtcgattctgtagtaggagtgttcctcactcagaatgtagctgatcatctttcaagctctgcctatatggcccttgccgcaagttttccttcacggccagtcaacaataattgtaaggatgatggtaccacagaagacaataaacaaaccaccaggatgagtgagctagtaggagagaaaagtgtgtttgaccttttctacaatggtgttagacctgatctagaagtgggatgtgaggaggtatcaatgacttgcaagaagacacacatggaaccaacagacaatactagggatagtgaatttattgaaggtgaaacctattcctttgattacaaatcaacagatgaaagcgtttgcaatcacaaagggataggtatagaacataaagaacaacaattaccagatttctcctcagcagaattaactgtgtctacagaactcgtgcagcagatacaaatccagaagatctcatcctctcaaattttaacttcagaaaccatacaatcaagattatctttgagttctgagatacctagaaattttgtttgtggtggttctgctgcagcttatcagcagctgggaagcaatttcgaccagggaagctcattaacagaaaatgatgccacagccagtgaaattgaatgtcacagactccaaatggctgcaataaatgattatggatttggtaaacctgagattccttctagttcctcaatgccatttttcttggctgttgatcctcaacaactgaaattgagaaatgagacaaatgtttcttcaacatcttccaacattccttcagattctgcatcaccaaacttgaaaaatggcacggatcctcttttgatgccatttaattcctacatggcagattggagcagcgataagataacttacaccactctgaacactccaaaaataagcacagaacttccagtcaagttacaccatgacaaaagtagtagctttgaagcaccaaacctgaaggagcatgaatcagtctttgcaacacatgaaatgacggtagaagcaacaagaaaagaagacgaacacacatcaaaatctagttttacttcctacaatggagtaccagatacagctgcacaagcatcaaagccaaagaaaacaagaaccacaactgcaaagaacacagagaattttgactgggaaaaattacgaaggcaggcttgtagtgaagggcagatgaaacaaagaagttttgaaagaagagactctatagattgggaagcagtacggtgtgcagatgtacgaagaatatctcatgccattcgggagagggggatgaataatgttttagcagagcgaatccagaattttctgaatcgtttggttagagatcatgggagcattgaccttgagtggctaagatatattcccccagactcagcgaaggattacctactaagtatacggggactggggcttaaaagtgttgaatgtgttcgtcttctcacactgcatcatcttgctttccctgttgacaccaatgttggtcgtatatgtgtaagactgggatgggtgcccattcaacctcttcctgaatctctacagctacatctcttggagctatatcctatcttggaaactatacaaaagtatctttggcctcgcctttgtaaactcgatcagcagacactgtatgagctgcattatcagatgattacatttggaaaggtcttttgtaccaaaagacagccaaattgcaatgcatgctatgaattcgactcacctacctcgccttgaggggagtatccattcaagggagtttcttcctaagaattcagagccaataatcgaggagcctgcaagtccaagagaggaaagacctccagaaaccatggaaaatgatattgaagatttttatgaagatggtgaaatcccaacaataaagcttaacatggaagcttttgcacaaaacttggagaattgcattaaagaaagcaataacgaactccagtctgatgatattgcaaaagcattggttgctattagcactgaagcagcttcgattcctgtaccgaaactaaagaatgtgcttaggcttcgaacagaacactatgtgtatgagcttccagatgcacatccacttttacaacagctaggacttgaccaacgggaacatgatgatcctaccccatacttattggccatatggacaccagatggaataaaggaaataactaagacaccaaaaccatgctgtgaccctcaaatgggaggcgatttatgcaataatgaaatgtgccacaattgtactgcagagaaagaaaaccaatctagatatgtcagaggcacaattctggttccttgtcgaacagctatgaggggtagtttcccacttaatggcacttactttcaagtcaatgaggtatttgctgaccacagatctagccacaacccaatccatgtggaaagggagatgctatggaacttgcaaaggcgcatggtctttttcgggacttcagtacccaccatattcaaaggtctaagaacagaagaaatacaacaatgcttctggaggggatttgtctgtgtgcgaggattcgacatggagactagagcaccaaggcctctgtgcccccatttgcacattatagcaaggccgaaggcccgcaagacagcagcaactgagcaagtactctaatcagcaaagatatcagttttatgaacatcatgtttattgtgatatgacatcaatagctctcgacctatgcatggaatcatattacttcctgcctggcgatggccattgtttaggaaatttaagccatggatggggtccgagactgttagttctgagacgagaggactaatgaagcatcaggaagcaccaataattttcacttttttgtttcagatctactgtatgtaaattagcatctagctgttagtccatgtaagatgccattgctatcctttctgagacaaactaccttatcaacatttcatttggttaacatttgttctgagtattgggaagcctgccagaattttgttttcgtacctgt

SEQ ID NO: 210151 - DNA, 5934 bp, Zea Mays
ccaaaaccgagtttgctcgtcccctccagccgtccagcgcccacggtggtgcgtcctctccgagacaccgctcgccggacctcttccgagtttgggaaactctggcgccatgaatccaatagtatagcacacgtcgcatgggagaaggcacattccaagagcagatgatccacacacacggtttcagcccggtggcccaacggcgcagctatcaccatccagccctggaagaagcaaggattcaccctcaagctcgaaactgaacgcaactcccgaagacccggtgaagccatgtctgcggggagaggcgatccaaacacccctgccaacaggcctctgttcctgagtgctggggtgcccaacttaggctgtcacaatgttgcagctccagctgcagcaggcaacagcggctcgatcgcctcgcaagtcttattctccccatgctccacgtctgtcctgaatactattcaggaggttcctgctccacaatctgctctgttgagtccgataaaccgtgcaactgaacaaggtgatgtgccctgcatccagccatcctggaatatgcctgggggttgcacgcaggtgcctattaatatcatagtgttccatagggaactcactagaaggggttcgaggccgcagttgtcgccgtcggccactgccttacctgatgtttcagagggagcttccattcggcttgctgggagtaatttcttgtcacatggaagaacacctagcatcgttgcaggtgatatgacaacgaattcttcacagctagccactgcagataaatacaattcagagcatcggatgaattgtttacatgatgaagcatccaagactgaaaatggaaaaggaagtacccaacttccacaattagcaacagcaattttccgtgacagctacaatgatttggaatcagtggttcctgcagctacctgggaaacacgagtgcaacattctcaagaatcaaccacctgtcttgcagaaagtaccactgatgacaacattcatatgtaccaatctatgcaaaaaaggctcaagacacaaatcaacaagagtgaacacacaccattgtcagcaccaactgtacccaaggagaaaacactgactcaaattgagacgcagctagcaagtgccgagaaaaccgaaatgttcaggaatgaggaaaccccagcgctgaaaatgaaggctcggaagaaaaaacacagaccaaaggtaatcagagagaataagccagccaaagtgcagaaacctgattcaacaccagatggaaaatctccgaaccaaaaggtcaagagaagttatgtccggaagaaaagaaacctcagctctctggagaattgctctggtcctgttagcgatcaatcaatctctggagcaacaggagttgcagctagaagcagaacatcatcagttcgacgaagtctgcaatttgaatccaaagaacaaggattgcagggcggccattcgtcaatggccaacatacaccatcacaactatgagaaacctggccatgctcaaagttctttctactcagagtcagaagtgcagactgggcgtgtgatgcaagaaggtatggagaattcaccaggagaattagctttcgacatgagtcgcagactgaacaaatttttagatgagtacatacatttgccagatatgctaaaacctacacaagaagtttcggctgcaacttctgcatcatttagtacggaactggcaagggaagaagataatgtgggaagaacttgcaaacctgatggcaaaagtaagtgcagtttgtttgctgatgaaagggtggtaaaccccacaatagaagggaacaaaaaggacttggaattaaactattctgatgctgatggtcttgtttcctcagctaggtctttacctcaaatggatcccacaagaagtcagatgggtaaggtgtcggaagtggaaaaccccacacaccatagcaatggttcgctacctggcacacgggactctgttgtcttgagggctgcagctgagatgttcgcatttttccaagcgggtgcaataaaaaagaagcgatctgcccgactccgcagaaattcccccttttatactatggatcttaagaataatactctacaagcatcaacaagactgccacagccatgcatggatgcgctgcatagaagttcttgcattaagtttttgaccaaaaaacgttcagaaaaggcaagaccgcactgttccagtgtaattcaaccaaatgatgagctgaaggacaggctttcagctggaagcactttttatggcgcaactaatggatgcaaaatatcagaagagagttctccaaacttttcatctcagaccctggacaataaaagaatcaacgttgatactcattgtgaagtagcagaagggagatcaaccaacacatcaacaggaccctatatggattacgttcaaggagttgcatcaaagttgaagcatcttgatttgaatactgaacaggtgcagagaactgagatgcatttatctctgaccacaccagctgttatttcttttgagggaacaagtggtccttcaaatgctcttgtcccatatggtggtgtggtgatggttcccaatgagaggcccttgcagttagtcaaaaagcagcggcctcgtgctaaggttgacttggattttgagacgacgagggtttggaaccttttgatggggaaatcagccgagtcttatgggactgatgttgaaaaggagagatggtggcagcaagaaagagaagtgtttcaaagccgtgctaattcgtttatagcacgcatgcgacttgttcaaggggacaggcgcttttctccttggaaaggatctgtagtcgattctgtagtaggagtgttcctcactcagaatgtagctgatcatctttcaagctctgcctatatggcccttgccgcaagttttccttcacggccagtcaacaataattgtaaggatgatggtaccacagaagacaataaacaaaccaccaggatgagtgagctagtaggagagaaaagtgtgtttgaccttttctacaatggtgttagacctgatctagaagtgggatgtgaggaggtatcaatgacttgcaagaagacacacatggaaccaacagacaatactagggatagtgaatttattgaaggtgaaacctattcctttgattacaaatcaacagatgaaagcgtttgcaatcacaaagggataggtatagaacataaagaacaacaattaccagatttctcctcagcagaattaactgtgtctacagaactcgtgcagcagatacaaatccagaagatctcatcctctcaaattttaacttcagaaaccatacaatcaagattatctttgagttctgagatacctagaaattttgtttgtggtggttctgctgcagcttatcagcagctgggaagcaatttcgaccagggaagctcattaacagaaaatgatgccacagccagtgaaattgaatgtcacagactccaaatggctgcaataaatgattatggatttggtaaacctgagattccttctagttcctcaatgccatttttcttggctgttgatcctcaacaactgaaattgagaaatgagacaaatgtttcttcaacatcttccaacattccttcagattctgcatcaccaaacttgaaaaatggcacggatcctcttttgatgccatttaattcctacatggcagattggagcagcgataagataacttacaccactctgaacactccaaaaataagcacagaacttccagtcaagttacaccatgacaaaagtagtagctttgaagcaccaaacctgaaggagcatgaatcagtctttgcaacacatgaaatgacggtagaagcaacaagaaaagaagacgaacacacatcaaaatctagttttacttcctacaatggagtaccagatacagctgcacaagcatcaaagccaaagaaaacaagaaccacaactgcaaagaacacagagaattttgactgggaaaaattacgaaggcaggcttgtagtgaagggcagatgaaacaaagaagttttgaaagaagagactctatagattgggaagcagtacggtgtgcagatgtacgaagaatatctcatgccattcgggagagggggatgaataatgttttagcagagcgaatccagaattttctgaatcgtttggttagagatcatgggagcattgaccttgagtggctaagatatattcccccagactcagcgaaggattacctactaagtatacggggactggggcttaaaagtgttgaatgtgttcgtcttctcacactgcatcatcttgctttccctgttgacaccaatgttggtcgtatatgtgtaagactgggatgggtgcccattcaacctcttcctgaatctctacagctacatctcttggagctatatcctatcttggaaactatacaaaagtatctttggcctcgcctttgtaaactcgatcagcagacactgtatgagctgcattatcagatgattacatttggaaaggtcttttgtaccaaaagacagccaaattgcaatgcatgcccaatgaggagtgagtgcaagcattttgcaagtgcatttgcaagaatagcagcatgcatgctatgaattcgactcacctacctcgccttgaggggagtatccattcaagggagtttcttcctaagaattcagagccaataatcgaggagcctgcaagtccaagagaggaaagacctccagaaaccatggaaaatgatattgaagatttttatgaagatggtgaaatcccaacaataaagcttaacatggaagcttttgcacaaaacttggagaattgcattaaagaaagcaataacgaactccagtctgatgatattgcaaaagcattggttgctattagcactgaagcagcttcgattcctgtaccgaaactaaagaatgtgcttaggcttcgaacagaacactatgtgtatgagcttccagatgcacatccacttttacaacagctaggacttgaccaacgggaacatgatgatcctaccccatacttattggccatatggacaccagatggaataaaggaaataactaagacaccaaaaccatgctgtgaccctcaaatgggaggcgatttatgcaataatgaaatgtgccacaattgtactgcagagaaagaaaaccaatctagatatgtcagaggcacaattctggttccttgtcgaacagctatgaggggtagtttcccacttaatggcacttactttcaagtcaatgaggtatttgctgaccacagatctagccacaacccaatccatgtggaaagggagatgctatggaacttgcaaaggcgcatggtctttttcgggacttcagtacccaccatattcaaaggtctaagaacagaagaaatacaacaatgcttctggaggggatttgtctgtgtgcgaggattcgacatggagactagagcaccaaggcctctgtgcccccatttgcacattatagcaaggccgaaggcccgcaagacagcagcaactgagcaagtactctaatcagcaaagatatcagttttatgaacatcatgtttattgtgatatgacatcaatagctctcgacctatgcatggaatcatattacttcctgcctggcgatggccattgtttaggaaatttaagccatggatggggtccgagactgttagttctgagacgagaggactaatgaagcatcaggaagcaccaataattttcacttttttgtttcagatctactgtatgtaaattagcatctagctgttagtccatgtaagatgccattgctatcctttctgagacaaactaccttatcaacatttcatttggttaacatttgttctgagtattgggaagcctgccagaattttgttttcgtacctgt

SEQ ID NO: 210152 - DNA, 3896 bp, Zea Mays
ctcgtcccctccagccgtccagcgcccacggtggtgcgtcctctccgagacaccgctcgccggacctcttccgagtttgggaaactctggcgccatgaatccaatagtatagcacacgtcgcatgggagaaggcacattccaagagcagatgatccacacacacggtttcagcccggtggcccaacggcgcagctatcaccatccagtaacatccccggaattcacccctgccttctgttctgctgttcaccccgcgtgcgcgttcttcctctcgtgcgacaactgggcgaccgccgccgtcctacggcaggtggtcacttcttcgtcggttccttcgctggcgacgagcacccaccaagccctggaagaagcaaggattcaccctcaagctcgaaactgaacgcaactcccgaagacccggtgaagccatgtctgcggggagaggcgatccaaacacccctgccaacaggcctctgttcctgagtgctggggtgcccaacttaggctgtcacaatgttgcagctccagctgcagcaggcaacagcggctcgatcgcctcgcaagtcttattctccccatgctccacgtctgtcctgaatactattcaggaggttcctgctccacaatctgctctgttgagtccgataaaccgtgcaactgaacaaggtgatgtgccctgcatccagccatcctggaatatgcctgggggttgcacgcaggtgcctattaatatcatagtgttccatagggaactcactagaaggggttcgaggccgcagttgtcgccgtcggccactgccttacctgatgtttcagagggagcttccattcggcttgctgggagtaatttcttgtcacatggaagaacacctagcatcgttgcaggtgatatgacaacgaattcttcacagctagccactgcagataaatacaattcagagcatcggatgaattgtttacatgatgaagcatccaagactgaaaatggaaaaggaagtacccaacttccacaattagcaacagcaattttccgtgacagctacaatgatttggaatcagtggttcctgcagctacctgggaaacacgagtgcaacattctcaagaatcaaccacctgtcttgcagaaagtaccactgatgacaacattcatatgtaccaatctatgcaaaaaaggctcaagacacaaatcaacaagagtgaacacacaccattgtcagcaccaactgtacccaaggagaaaacactgactcaaattgagacgcagctagcaagtgccgagaaaaccgaaatgttcaggaatgaggaaaccccagcgctgaaaatgaaggctcggaagaaaaaacacagaccaaaggtaatcagagagaataagccagccaaagtgcagaaacctgattcaacaccagatggaaaatctccgaaccaaaaggtcaagagaagttatgtccggaagaaaagaaacctcagctctctggagaattgctctggtcctgttagcgatcaatcaatctctggagcaacaggagttgcagctagaagcagaacatcatcagttcgacgaagtctgcaatttgaatccaaagaacaaggattgcagggcggccattcgtcaatggccaacatacaccatcacaactatgagaaacctggccatgctcaaagttctttctactcagagtcagaagtgcagactgggcgtgtgatgcaagaaggtatggagaattcaccaggagaattagctttcgacatgagtcgcagactgaacaaatttttagatgagtacatacatttgccagatatgctaaaacctacacaagaagtttcggctgcaacttctgcatcatttagtacggaactggcaagggaagaagataatgtgggaagaacttgcaaacctgatggcaaaagtaagtgcagtttgtttgctgatgaaagggtggtaaaccccacaatagaagggaacaaaaaggacttggaattaaactattctgatgctgatggtcttgtttcctcagctaggtctttacctcaaatggatcccacaagaagtcagatgggtaaggtgtcggaagtggaaaaccccacacaccatagcaatggttcgctacctggcacacgggactctgttgtcttgagggctgcagctgagatgttcgcatttttccaagcgggtgcaataaaaaagaagcgatctgcccgactccgcagaaattcccccttttatactatggatcttaagaataatactctacaagcatcaacaagactgccacagccatgcatggatgcgctgcatagaagttcttgcattaagtttttgaccaaaaaacgttcagaaaaggcaagaccgcactgttccagtgtaattcaaccaaatgatgagctgaaggacaggctttcagctggaagcactttttatggcgcaactaatggatgcaaaatatcagaagagagttctccaaacttttcatctcagaccctggacaataaaagaatcaacgttgatactcattgtgaagtagcagaagggagatcaaccaacacatcaacaggaccctatatggattacgttcaaggagttgcatcaaagttgaagcatcttgatttgaatactgaacaggtgcagagaactgagatgcatttatctctgaccacaccagctgttatttcttttgagggaacaagtggtccttcaaatgctcttgtcccatatggtggtgtggtgatggttcccaatgagaggcccttgcagttagtcaaaaagcagcggcctcgtgctaaggttgacttggattttgagacgacgagggtttggaaccttttgatggggaaatcagccgagtcttatgggactgatgttgaaaaggagagatggtggcagcaagaaagagaagtgtttcaaagccgtgctaattcgtttatagcacgcatgcgacttgttcaaggggacaggcgcttttctccttggaaaggatctgtagtcgattctgtagtaggagtgttcctcactcagaatgtagctgatcatctttcaagctctgcctatatggcccttgccgcaagttttccttcacggccagtcaacaataattgtaaggatgatggtaccacagaagacaataaacaaaccaccaggatgagtgagctagtaggagagaaaagtgtgtttgaccttttctacaatggtgttagacctgatctagaagtgggatgtgaggaggtatcaatgacttgcaagaagacacacatggaaccaacagacaatactagggatagtgaatttattgaagcttatcagcagctgggaagcaatttcgaccagggaagctcattaacagaaaatgatgccacagccagtgaaattgaatgtcacagactccaaatggctgcaataaatgattatggatttggtaaacctgagattccttctagttcctcaatgccatttttcttggctgttgatcctcaacaactgaaattgagaaatgagacaaatgtttcttcaacatcttccaacattccttcagattctgcatcaccaaacttgaaaaatggcacggatcctcttttgatgccatttaattcctacatggcagattggagcagcgataagataacttacaccactctgaacactccaaaaataagcacagaacttccagtcaagttacaccatgacaaaagtagtagctttgaagcaccaaacctgaaggagcatgaatcagtctttgcaacacatgaaatgacggtagaagcaacaagaaaagaagacgaacacacatcaaaatctagttttacttcctacaatggagtaccagatacagctgcacaagcatcaaagccaaagaaaacaagaaccacaactgcaaagaacacagagaattttgactggga

SEQ ID NO: 210153 - DNA, 754 bp, Zea Mays
aaaaaaaatgaacctgtgccacacccacgctcgctccatgctatggtcaaccacgaccgaatccccctgaccccaccgcatggctccaagccatcccaggtgccccaaccgctcgaaccctaatccaaagtcgccgccgcgtgcagccatctctgcccctcgccgcgccgtctaggtgcatcacccatagtcgctcggtacaccgtcgtctccgtctccttccccgcgcactttcatccagcgcgcacccgtagccgatatccacgacgaatttgtcctccctctcgccaaattgtttgcctactacaggatttggagacaagagtgaccaagagaagcacctgcccctgcatgcacaagaaatcggaaccgatcggccaggatgcgccgacgaaccgcttcagcctcacgtggatcccaatccgcggtgtcggcgctcaggatgctctgcttctcgaaggaagaggttgacgcactggtggagcatatgaatggcgatatgcgcgtcagatttgttggtgttcctgtggcgctgaacaaggaatcataaaagcatatggaggaactatgtataagctacaaagaagcatttttatagcagaagccaagtgttctgatgattttgttttttcaattgtgttttctgttattggtttagcatgcacatatattgaaatgatttatggcatcgcatctgctatctttgttatatttatgacatcgttcttgattgatgtgtgcgatatgaatgatg

SEQ ID NO: 210154 - DNA, 663 bp, Zea Mays
ctgtgccacacccacgctcgctccatgctatggtcaaccacgaccgaatccccctgaccccaccgcatggctccaagccatcccaggtgccccaaccgctcgaaccctaatccaaagtcgccgccgcgtgcagccatctctgcccctcgccgcgccgtctaggtgcatcacccatagtcgctcggtacaccgtcgtctccgtctccttccccgcgcactttcatccagcgcgcacccgtagccgatatccacgacgaatttgtcctccctctcgccaaattgtttgcctactacaggatttggagacaagagtgaccaagagaagcacctgcccctgcatgcacaagaaatcggaaccgatcggccaggatgcgccgacgaaccgcttcaggtatcgcctccttactcactccagcggcatctaaagacagaggtggcatgcgctgataagatctggctgagattgtgggctagttccatgctagcctcacgtggatcccaatccgcggtgtcggcgctcaggatgctctgcttctcgaaggaagaggttgacgcactggtggagcatatgaatggcgatatgcgcgtcagatttgttggtgttcctgtggcgctgaacaagaaatggaattgagggtatccatggagatgcatgtagctgaa

SEQ ID NO: 210155 - DNA, 494 bp, Zea Mays
cgcgtgcagccatctctgcccctcgccgcgccgtctaggtgcatcacccatagtcgctcggtacaccgtcgtctccgtctccttccccgcgcactttcatccagcgcgcacccgtagccgatatccacgacgaatttgtcctccctctcgccaaattgtttgcctactacaggatttggagacaagagtgaccaagagaagcacctgcccctgcatgcacaagaaatcggaaccgatcggccaggatgcgccgacgaaccgcttcagttccatgctagcctcacgtggatcccaatccgcggtgtcggcgctcaggatgctctgcttctcgaaggaagaggttgacgcactggtggagcatatgaatggcgatatgcgcgtcagatttgttggtgttcctgtggcgctgaacaaggcatgcatgttcattgactgcatgagacatatcaaggtaatccgtaagtaggagttgaattgtttgttctctaccactc

SEQ ID NO: 210156 - DNA, 2017 bp, Zea Mays
atgttcagtcgccgtcgcccgtcgcgccgcacgggtcaggaactcccagaaaagccgaggaggcagcctcgctgtgctcctgctgctgctccgcccttccgaccgatcgaggtggcgcaaagcagaggaaaaccccaggccgcaaccctcgcaaacactcaagtcctcgtcccttccgcactctcctcttcaactccagccgctttcaccgccaatcagaggtccaccaccaccaccaccacatctcttcgcatccaaccgccccgtaggatcacaggaaacggggatggcgagcggcggggcggtgagggaggtgggctcggccgccgagctgcaggcggcggtggccggggcgcgggcggcggcggtgcacttctgggcgtcctggtgcgaggcgtccaagcagatggacgaggtcttcgcgcacctcgccgtcgacttcccccacgcggccttcctccgggttgaagctgaagaacaacctgaaatatcagaggcgtatggagttacagcggtgccatattttgttttctgcaaggaaggcaaaactgtcgatactttggagggagcaaacccagccagcttagccaataaggttgcaaaagtagctgggcctgctagtgttgctgagtctgctgtacctgctagccttggagttgctgctggacctgctgtacttgaaaacatccaaaagatggcacagcgaaatggatcttctgctgttgaaagcataagctctggtagcacagaagatgcattgaataagcgattggagcagcttgtcaattcccatcccgtgtttttatttatgaagggaaccccagagcaaccaaggtgtggtttcagccgtaaagtgattgacattttgaagcaggaaggggtgaaatttgggagctttgacattcttacagacaatgatgttcgcgaaggcatgaagaaattctccaactggcccactttccctcaactctactgcaaaggtgagctgcttggtggatgtgatattgttgttgctatgcacgaaagtggtgaattgaaggatgtttttgaggagcacaacattacccttaaaccacagggaagcaaaaatgaagaagcaggtgaacctgagtctgcaactgagaagggcagtgcagtttctgaatcaatcaagcttactgatgctcagaaaactcgtttggaaagccttattaactccagcccggtgatggtattcatcaaaggtacacctgaggaaccaaagtgtgggttcagtgggaagctggttcacatacttaagcaagagaacattcctttctccagttttgacatcctttcagatgatgaagttagacaggggctgaaggtcttctcaaactggcctagttaccctcaactgtacataaaaggtgaactggttggcggctcagacatagtgatggagatgcataagagtggtgagctgaagaagatactatctgagaaaggggttcgtcaaaaaggaaatctggaggacagattgaagtccctgatttcctctgccccggtgatgcttttcatgaagggcaccccagatgctccacgttgcggcttcagttcgaaagttgtgaacgccttgaagaaggaaggggtcagctttgggtcctttgacatcttatctgacgaggaagttcgacagggtttgaagacatactccaactggcctaccttcccccaactctactacaagtcggagctgattggtggctgtgacatcattcttgagatggagaagagcggagagctgaagtcgaccctgtcaatgtagacacctaacctagcattcttgcctcgctggcgttcctatcatattgcctgcattggatcattctactatgacgtttgtgccaatgtattcatagatccacgtttggtgcctgcagtgccacattgctagaatcgtgacatctgcagatggaataacttgagagcttgttcggtactgattgctcttttatcaccagtctatttagcggatgagagttttttttaaaaaaca

SEQ ID NO: 210157 - DNA, 854 bp, Zea Mays
gtgcggaacacagattttagacatcgacctcacctggcgcatgcacaaggcatcagatggtcagaggagacgtgtccagatttgcatgggacttcttaagtcattcaaggttcttcttcttgatgagatcacagttgatcttgatgttctggcaagatcaaatctgttatcgtatcttaaaaaggaatgtgaggaaagaggtgcaacaatcatctatgccacacatatttttgatggtcttgatgattggccaacacacattgtttacattgctcatgggaaactgcaattagcagtgcctttggaaaaggtgaaagaaatgagtcagttatctctcatgaggactgtggagagctggttgaggaaagaaagaaatgaggacaggaggaggagaaaggagcgaaaggagaaaggcctcccagaattcgacaaggttgtcgagggtagtcgggttataggtgatccagcaaagaacgcagacagagttataaacaacgggtgggcagctggacggcttacctcgacgattgcaggagaggaaaatttcgtcttcagctctaacagcgtacttaggcaatgatctagctttgttttcctttatctatacattgaaaacggtaaataatagtcttgcggatccaatagagatatcgttggagctttgtcatttatagcgaaagttctgtcaggaaaggagaattcactctatatagtttggatttgaggatttacactgtaattttattcgcagctgagtgttcgagaaaaagaaattgcactgtaacaacatatatatactgcaccaaatatttgtgtggtcatatttatttctacaggggctacgcataacttgg

SEQ ID NO: 210158 - DNA, 1407 bp, Zea Mays
cggacgcgcagcccaaaccctaaaccccaccgccgattctccctattgcttcgctgtcgcctgggagacgccggaggcggcgatggcgaagaagctagggaagaaggcgcgcaagttcgcgcgcaagaacctgcagtctgccgccaagcgcaaccgcaagatccgcaaccagttcaagcaccgccgaggaccccgcggaggtgggagcgccggccgggaggatggggacgagcacgtgctgcagcgggtcctcgatcccaccatggttaccgacgatgctgctgctactttgatccacggtttggagtttccagaggacgatgctgaactagatgctgatctgtctgacagtgatggttatctttctgaggatcctggatgtccatactattctgacagtgaggatgagaaagctgccaaagattgtatcatggaagaaggtttggacagacagaatgatgacatgaatcgagatatcaagaagcaaaagaaaaagttgaagaagttgctggataaggaccctgaatttgcaaattttctcgaaaaatggcagtcggagttggagagctccagaagtaaaggagattctgatgaagagggtatggattctatggatgatgacgatgactccaatgatgggaatttaccaaatgctaaggtccttacaagaaagacgataagtgaatggtgccagttagtgtcaaaggaacctaaagcacctgccttgcgtaatctactaaatgcttttcgagatgcttgtcgatatggtgttcactctgatgggcccttgatgcagagatttcaaagtgccagggtgttttatcaaataataatgtttgttctttctgagtcggacaacattttccgtgctcttttggaaattcaagatgacgttaacaaaggaaaaattatgaacctgagaaattcaaagaaatggctaactgttgattctctcataaagtcctacttatcaagttctcttgatcttcttagtcaacttacagacaacaagatacttgcctttgttttgactcggttgagggtatcagtggtccttttttctgcatatccatcaacatcaagtaggcttgtcaagattttatttcgcttgtgggcaagtggtgatcggagtttgtctctgtcggcatttcttatgatccgagaagtagcttcactgttacctgactgtttggatcactgtttaactaaatcctacaatacataccttgccagtaccaatcttgtgaatgacagaaacacaaagcatatttattttctgatggactgcctggtagagctgtattctcttgatgttcagaaatcatatgagagggcaataatctccgtggagcaactgaatgctattcttagacaggcttctaaaaccaaggaaaagtgtcatagggc

SEQ ID NO: 210159 - DNA, 2315 bp, Zea Mays
cccaaaccctaaaccccaccgccgattctccctattgcttcgctgtcgcctgggagacgccggaggcggcgatggcgaagaagctagggaagaaggcgcgcaagttcgcgcgcaagaacctgcagtctgccgccaagcgcaaccgcaagatccgcaaccagttcaagcaccgccgaggaccccgcggaggtgggagcgccggccgggaggatggggacgagcacgtgctgcagcgggtcctcgatcccaccatggttaccgacgatgctgctgctactttgatccacggtttggagtttccagaggacgatgctgaactagatgctgatctgtctgacagtgatggttatctttctgaggatcctggatgtccatactattctgacagtgaggatgagaaagctgccaaagattgtatcatggaagaaggtttggacagacagaatgatgacatgaatcgagatatcaagaagcaaaagaaaaagttgaagaagttgctggataaggaccctgaatttgcaaattttctcgaaaaatggcagtcggagttggagagctccagaagtaaaggagattctgatgaagagggtatggattctatggatgatgacgatgactccaatgatgggaatttaccaaatgctaagagatttcaaagtgccagggtgttttatcaaataataatgtttgttctttctgagtcggacaacattttccgtgctcttttggaaattcaagatgacgttaacaaaggaaaaattatgaacctgagaaattcaaagaaatggctaactgttgattctctcataaagtcctacttatcaagttctcttgatcttcttagtcaacttacagacaacaagatacttgcctttgttttgactcggttgagggtatcagtggtccttttttctgcatatccatcaacatcaagtaggcttgtcaagattttatttcgcttgtgggcaagtggtgatcggagtttgtctctgtcggcatttcttatgatccgagaagtagcttcactgttacctgactgtttggatcactgtttaactaaatcctacaatacataccttgccagtaccaatcttgtgaatgacagaaacacaaagcatatttattttctgatggactgcctggtagagctgtattctcttgatgttcagaaatcatatgagagggcaataatctccgtggagcaactgaatgctattcttagacaggcttctaaaaccaaggaaaaggaagatctcaggaagatagataactggcaatatattagttgtgtcaacctatgggttcggtttctgtgttgtcactataaggattacaatctccatcccttattttctcaagttcttcaagtaataagaggagtggctcacttattcccaggcacaaggtacttaccgttgagactgaagcttgtgcagatgctgaacgagctttccacttgcagtcagatgttctatccaattccatcgttgctctttgactgcctagaattaagagaagtttctcagaaagaacaaacacaaagaacaaagatcaacttttcgtcgttgttgaaggtgccaaagaacctgctgaaatcaagggattttcaagaggagtgtattctttcagcgattcagattctatcagcacattttgcccagtggagttaccatgtttccttcccagaagtagccaccattcctcttgtcctcttgaagaggctacatgagcagacaacagtcgaatcacttcgccgtcctattaagcgtttgatagaccaggtgacggagaacaaggattttatagaaaggaaaagagaggttgtatccttttcaccaaatgataaggcgtcagttgatagcttccttcaggaggagaaggtcagcagaaccgcttcattcactcggttctatgcatccgtagctgaaaaccgtcaaccaaaatggagaaaaacactttaaaataccaagggaatttctgagagacatctcacatctggaatcggttggtttccaagtgagggccacgaagaaccacatcaatgtagaacattttagtgcagatatacgccgaggcagctattgtgtaacctctagtgagactgattcctacgagtcctcgagtgctcaacaattttgtacgattgtaaccttaattccgaagtgagttgtcaagtgatgaatgaaatttgctgttgcttttgaatctgttgtcactgtgcccgtagtacagagtatggactgttgtcatttcctactatgggggaagggatttaatcttactcaatccactctaatccctgttttagcttatca

SEQ ID NO: 210160 - DNA, 1083 bp, Zea Mays
atgaattccatctaggaagatctcaggaagatagataactggcaatatattagttgtgtcaacctatgggttcggtttctgtgttgtcactataaggattacaatctccatcccttattttctcaagttcttcaagtaataagaggagtggctcacttattcccaggcacaaggtacttaccgttgagactgaagcttgtgcagatgctgaacgagctttccacttgcagtcagatgttctatccaattccatcgttgctctttgactgcctagaattaagagaagtttctcagaaagaacaaacacaaagaacaaagatcaacttttcgtcgttgttgaaggtgccaaagaacctgctgaaatcaagggattttcaagaggagtgtattctttcagcgattcagattctatcagcacattttgcccagtggagttaccatgtttccttcccagaagtagccaccattcctcttgtcctcttgaagaggctacatgagcagacaacagtcgaatcacttcgccgtcctattaagcgtttgatagaccaggtgacggagaacaaggattttatagaaaggaaaagagaggttgtatccttttcaccaaatgataaggcgtcagttgatagcttccttcaggaggagaaggtcagcagaaccgcttcattcactcggttctatgcatccgtagctgaaaaccgtcaaccaaaatggagaaaaacactttaaaataccaagggaatttctgagagacatctcacatctggaatcggttggtttccaagtgagggccacgaagaaccacatcaatgtagaacattttagtgcagatatacgccgaggcagctattgtgtaacctctagtgagactgattcctacgagtcctcgagtgctcaacaattttgtacgattgtaaccttaattccgaagtgagttgtcaagtgatgaatgaaatttgctgttgcttttgaatctgttgtcactgtgcccgtagtacagagtatggactgttgtcatttcctactatgggggaagggatttaatcttactcaatccactctaatccctgttttagcttatca

SEQ ID NO: 210161 - DNA, 1202 bp, Zea Mays
ggaagaagcagcttgagcagctcaagaatcctgatattactggactcgctacccttgtagtaaagaaatgaggggttgtgacttgtatattgtcaaggatcacttggatgtggtaaatgctatactggacactgatgatagctgcataaggattgtgcggaaaaacgggaagacatccctacatactgctgcaaggattggataccatcgtattgtcaaggcactcatagagagggatccaggaattgttccgatcaaggataggaagggacaaactgcacttcacatggctgtgaaaggcaagaacacagatgtagtggaagagttactgatggctgatgtttccattctcaatgtgcgagacaagaagggaaatactgctttgcacatagctacacggaaatggaggccccaggtatggttcttttcaggtgtcttttacaagtagtttgctatttcagttttagctgactataacctgcattgagagctataacgctgttatatctgtaaggcgtggtttcaatgtgtagccaattttttatttatttgcccttattttagagttacatctgcgtggacatattgttttcttacagctgtctgaagtttagtagctgtctgaagtttagtagctgtctatcttgtttttcagggatctggaataacaggagcctgatggttgcatcagtagagttgaccacttctcagtattgcgagatgcatcttacatggtccagaagataattcctattctgaactacttgctcgtgttgatcagttttgcctagtcccagtaccatacaaagatgttcagctggatataaacatttctccacgtctctcttctgaatacataagttatctggaaaatcctgttgagttgctcaatgaagcggcaaaagctgcagagaaagatctatggaaaatcctgttgagttgctcaatgaaggcttttgcgaatcacttgaagtgttagtacttttgtgaatgattttgtaaagtgtttgtaaatatgtgcaaaacataataacatgtgtaggttttgtgaatgattttgttgtggtgcttgttgatggtttatgtgatgtggatctatcattgtgcaatactaattaaatttgtatatctatgtgattatgtgtataaaaattggtgatttgtgatgcttttgtatatataacagttgttgaaagctaatt

SEQ ID NO: 210162 - DNA, 1405 bp, Zea Mays
agaaatcccatgatttgggggaagacgaagtccaagcacaacccccgccaatcgctcgatgaaaaatctaaaccaaaaccctcagcgttttcatgggttccggagggattttatgttggctttgatgattgctgtacaaggatgatatggcctctcgcccaaagctgtctggtattcagaagcaggttttggcactgtacaggggattccttcggacagcacgccttaaggcccctgaagaacgccgcaggatcgagtctgttatcttggcagagttccgtgacaacgcaaggagtgttgaccgcttgtactggggttgtgacttgtatattgtcaaggatcacttggatgtggtaaatgctatactggacactgatgatagctgcataaggattgtgcggaaaaacgggaagacatccctacatactgctgcaaggattggataccatcgtattgtcaaggcactcatagagagggatccaggaattgttccgatcaaggataggaagggacaaactgcacttcacatggctgtgaaaggcaagaacacagatgtagtggaagagttactgatggctgatgtttccattctcaatgtgcgagacaagaagggaaatactgctttgcacatagctacacggaaatggaggccccaggtatggttcttttcaggtgtcttttacaagtagtttgctatttcagttttagctgactataacctgcattgagagctataacgctgttatatctgtaaggcgtggtttcaatgtgtagccaattttttatttatttgcccttattttagagttacatctgcgtggacatattgttttcttacagctgtctgaagtttagtagctgtctgaagtttagtagctgtctatcttgtttttcagggatctggaataacaggagcctgatggttgcatcagtagagttgaccacttctcagtattgcgagatgcatcttacatggttgatcagttttgcctagtcccagtaccatacaaagatgttcagctggatataaacatttctccacgtctctcttctgaatacataagttatctggaaaatcctgttgagttgctcaatgaagcggcaaaagctgcagagaaagatctatggaaaatcctgttgagttgctcaatgaaggcttttgcgaatcacttgaagtgttagtacttttgtgaatgattttgtaaagtgtttgtaaatatgtgcaaaacataataacatgtgtaggttttgtgaatgattttgttgtggtgcttgttgatggtttatgtgatgtggatctatcattgtgcaatactaattaaatttgtatatctatgtgattatgtgtataaaaattggtgatttgtgatgcttttgtatatataacagttgttgaaagctaatt

SEQ ID NO: 210163 - DNA, 1389 bp, Zea Mays
gagaaatcccatgatttgggggaagacgaagtccaagcacaacccccgccaatcgctcgatgaaaaatctaaaccaaaaccctcagcgttttcatgggttccggagggattttatgttggtaaggatgatatggcctctcgcccaaagctgtctggtattcagaagcaggttttggcactgtacaggggattccttcggacagcacgccttaaggcccctgaagaacgccgcaggatcgagtctgttatcttggcagagttccgtgacaacgcaaggagtgttgaccgcttgtactggggttgtgacttgtatattgtcaaggatcacttggatgtggtaaatgctatactggacactgatgatagctgcataaggattgtgcggaaaaacgggaagacatccctacatactgctgcaaggattggataccatcgtattgtcaaggcactcatagagagggatccaggaattgttccgatcaaggataggaagggacaaactgcacttcacatggctgtgaaaggcaagaacacagatgtagtggaagagttactgatggctgatgtttccattctcaatgtgcgagacaagaagggaaatactgctttgcacatagctacacggaaatggaggccccaggtatggttcttttcaggtgtcttttacaagtagtttgctatttcagttttagctgactataacctgcattgagagctataacgctgttatatctgtaaggcgtggtttcaatgtgtagccaattttttatttatttgcccttattttagagttacatctgcgtggacatattgttttcttacagctgtctgaagtttagtagctgtctgaagtttagtagctgtctatcttgtttttcagggatctggaataacaggagcctgatggttgcatcagtagagttgaccacttctcagtattgcgagatgcatcttacatggttgatcagttttgcctagtcccagtaccatacaaagatgttcagctggatataaacatttctccacgtctctcttctgaatacataagttatctggaaaatcctgttgagttgctcaatgaagcggcaaaagctgcagagaaagatctatggaaaatcctgttgagttgctcaatgaaggcttttgcgaatcacttgaagtgttagtacttttgtgaatgattttgtaaagtgtttgtaaatatgtgcaaaacataataacatgtgtaggttttgtgaatgattttgttgtggtgcttgttgatggtttatgtgatgtggatctatcattgtgcaatactaattaaatttgtatatctatgtgattatgtgtataaaaattggtgatttgtgatgcttttgtatatataacagttgttgaaagctaatt

SEQ ID NO: 210164 - DNA, 1360 bp, Zea Mays
gagaaatcccatgatttgggggaagacgaagtccaagcacaacccccgccaatcgctcgatgaaaaatctaaaccaaaaccctcagcgttttcatgggttccggagggattttatgttggggattccttcggacagcacgccttaaggcccctgaagaacgccgcaggatcgagtctgttatcttggcagagttccgtgacaacgcaaggagtgttgaccgcttgtactggggttgtgacttgtatattgtcaaggatcacttggatgtggtaaatgctatactggacactgatgatagctgcataaggattgtgcggaaaaacgggaagacatccctacatactgctgcaaggattggataccatcgtattgtcaaggcactcatagagagggatccaggaattgttccgatcaaggataggaagggacaaactgcacttcacatggctgtgaaaggcaagaacacagatgtagtggaagagttactgatggctgatgtttccattctcaatgtgcgagacaagaagggaaatactgctttgcacatagctacacggaaatggaggccccaggtatggttcttttcaggtgtcttttacaagtagtttgctatttcagttttagctgactataacctgcattgagagctataacgctgttatatctgtaaggcgtggtttcaatgtgtagccaattttttatttatttgcccttattttagagttacatctgcgtggacatattgttttcttacagctgtctgaagtttagtagctgtctgaagtttagtagctgtctatcttgtttttcagggatctggaataacaggagcctgatggttgcatcagtagagttgaccacttctcagtattgcgagatgcatcttacatggtccagaagataattcctattctgaactacttgctcgtgttgatcagttttgcctagtcccagtaccatacaaagatgttcagctggatataaacatttctccacgtctctcttctgaatacataagttatctggaaaatcctgttgagttgctcaatgaagcggcaaaagctgcagagaaagatctatggaaaatcctgttgagttgctcaatgaaggcttttgcgaatcacttgaagtgttagtacttttgtgaatgattttgtaaagtgtttgtaaatatgtgcaaaacataataacatgtgtaggttttgtgaatgattttgttgtggtgcttgttgatggtttatgtgatgtggatctatcattgtgcaatactaattaaatttgtatatctatgtgattatgtgtataaaaattggtgatttgtgatgcttttgtatatataacagttgttgaaagctaatt

SEQ ID NO: 210165 - DNA, 1524 bp, Zea Mays
atggccgccgccgccccagccatctccctggtggccgacctcgcccctgccccagccacagctcccccttcggccctgctgctgcaagcactcagcctctcccatggcacacggagaaatcccatgatttgggggaagacgaagtccaagcacaacccccgccaatcgctcgatgaaaaatctaaaccaaaaccctcagcgttttcatgggttccggagggattttatgttggtaaggctttgatgattgctgtacaaggatgatatggcctctcgcccaaagctgtctggtattcagaagcaggttttggcactgtacaggggattccttcggacagcacgccttaaggcccctgaagaacgccgcaggatcgagtctgttatcttggcagagttccgtgacaacgcaaggagtgttgaccgcttgtactggggttgtgacttgtatattgtcaaggatcacttggatgtggtaaatgctatactggacactgatgatagctgcataaggattgtgcggaaaaacgggaagacatccctacatactgctgcaaggattggataccatcgtattgtcaaggcactcatagagagggatccaggaattgttccgatcaaggataggaagggacaaactgcacttcacatggctgtgaaaggcaagaacacagatgtagtggaagagttactgatggctgatgtttccattctcaatgtgcgagacaagaagggaaatactgctttgcacatagctacacggaaatggaggccccaggtatggttcttttcaggtgtcttttacaagtagtttgctatttcagttttagctgactataacctgcattgagagctataacgctgttatatctgtaaggcgtggtttcaatgtgtagccaattttttatttatttgcccttattttagagttacatctgcgtggacatattgttttcttacagctgtctgaagtttagtagctgtctgaagtttagtagctgtctatcttgtttttcagggatctggaataacaggagcctgatggttgcatcagtagagttgaccacttctcagtattgcgagatgcatcttacatggttgatcagttttgcctagtcccagtaccatacaaagatgttcagctggatataaacatttctccacgtctctcttctgaatacataagttatctggaaaatcctgttgagttgctcaatgaagcggcaaaagctgcagagaaagatctatggaaaatcctgttgagttgctcaatgaaggcttttgcgaatcacttgaagtgttagtacttttgtgaatgattttgtaaagtgtttgtaaatatgtgcaaaacataataacatgtgtaggttttgtgaatgattttgttgtggtgcttgttgatggtttatgtgatgtggatctatcattgtgcaatactaattaaatttgtatatctatgtgattatgtgtataaaaattggtgatttgtgatgcttttgtatatataacagttgttgaaagctaatt

SEQ ID NO: 210166 - DNA, 2183 bp, Zea Mays
ctttactggaaatgtctcccgttcacaaaaaagaaggacatgagaagtggggggtggtgactctggctccaaaagaccaaagtttgagcaggatggagcaggagatattgttatggagccacacttaaccgaggataaacctgtgcggatagaccaagaatcatcgtcaacatctaatagggatgctgaggcaagcacatctactagcatgaaacctgttaaaactgaagaagcaggagcagatcttcttcccaaagagatgaatattatgacaattagcgacgataaagctgatggccataatgataaggaaggtgagggtgttacacttgatgggactggaacagagacagggcagataattgtgacaacaataggaggtcacaatgggaagccaaagcagaaggtctcatacatggcagaattggttgttggtactggttcgtttggtattgttttccaggcgaaatgcttggaaactgacgagacggtggcgataaaaaaggtgttacaagataagcgctacaagaatagagagctccagactatgcagttacatgaccacccgaatgtagttcagctgaagcatcacttcttttcaacaactcaaaagggagaagtttacctcaaccttgtacttgaatttgtatccgagacagtttatcgtgttgccaaatactacaaccggatgaaccagcgtgtacccataatatatgttaagttgtatgcatatcagatgtgccgtgcgcttgcttacatccatcgagttgtcggtgtgtgtcatcgtgatattaaacctcaaaatctactggtaagttcccagatccacttttcctcgaagcagtttgtgtggttgttagtgttgcaagtattctgttattcccattttggaccattttgctaccatcttgcttgtaagttgtaacacctgtcaacgcagaaatactgtgtaagtgcacatctgcaggtttgtcatgcaaaatgtctcttaaatctttggagtattttttttgttcagttttacgctaactgctgaaaatgttccttattgcaacttgattaaccttccaggtcaatcctcatacacatcaacttaagatttgtgattttgggagcgctaaaaaattgggctcctgaactaatatttggagctacggagtataccactgcgatcgatatctggtctgttggctgtgtagtggctgagcttctgattggtcagcctttgtttcctggtgaaagtggtgttgaccaactggtggaaataataaagattttgggtactccaacaagagaggagatcaggtgcatgaatccaaattattccgaattcaagttccctcagataaaagcccatccatggcacaagctttttggtaagcgcatgccacccgaggctgtcgatctcgtgtcaaggctgctccagtactcaccgaacctgcgctgcactgctgtcgacgcctgtgcccatccgttcttcgatgagctgcgggaccccaaggcttgcctgccgaacggacggccaatgccaccgttgttcgacttcacagcagccgaactcgaagggctccccgccgagcttgtccaccggatcgttcctgaacacatgaggaaggaagtgaattaggtggacggacgtactggggcaaaaaaaaaaaaaaaactccctgtttctctgttggttctgagagatgtgtgagggcacggatatggaggagcggtggtgtattgtaattgtaaagagggctgaaagaaaggtccctctggttgggcgtgtcaccaaagagtggccctagaggcaaaccttacgtttgctcgttgcccttggtgtgtacccagatgtgtatcgatgacataggctggctgctgtatcatcatcagggttgacgctgaacaagagaaattcaagcagggtgctgctagctcgcttcctcccgtagctggaaaccccagaatgccagtttccatcactgcacgtcgtcgcgctgtccactggtgtcccgtaagcatatagagctctgccggctccgctattggcttgcgtgtgtctatcgataatgacttctacggacgctaccaaaaaataaaaataaaaaaacaagcggatggctacacgtccataaactgacaagaagacggtacaaaaaacgagcggttggcttgcgatgtgcgttaatagattg

SEQ ID NO: 210167 - DNA, 2045 bp, Zea Mays
ggcaactgagcttcataggaccatgaagaaaatggacagtagcctattaactgagagtctgagactttactgaggttaatcaggaaatgtctcccgttcacaaaaaagaaggacatgagaagtggggggtggtgactctggctccaaaagaccaaagtttgagcaggatggagcaggagatattgttatggagccacacttaaccgaggataaacctgtgcggatagaccaagaatcatcgtcaacatctaatagggatgctgaggcaagcacatctactagcatgaaacctgttaaaactgaagaagcaggagcagatcttcttcccaaagagatgaatattatgacaattagcgacgataaagctgatggccataatgataaggaaggtgagggtgttacacttgatgggactggaacagagacagggcagataattgtgacaacaataggaggtcacaatgggaagccaaagcagaaggtctcatacatggcagaattggttgttggtactggttcgtttggtattgttttccaggcgaaatgcttggaaactgacgagacggtggcgataaaaaaggtgttacaagataagcgctacaagaatagagagctccagactatgcagttacatgaccacccgaatgtagttcagctgaagcatcacttcttttcaacaactcaaaagggagaagtttacctcaaccttgtacttgaatttgtatccgagacagtttatcgtgttgccaaatactacaaccggatgaaccagcgtgtacccataatatatgttaagttgtatgcatatcagatgtgccgtgcgcttgcttacatccatcgagttgtcggtgtgtgtcatcgtgatattaaacctcaaaatctactggtcaatcctcatacacatcaacttaagatttgtgattttgggagcgctaaaaaattggtccctggtgagcctaacatatcgtacatttgctcgcggtattatagggctcctgaactaatatttggagctacggagtataccactgcgatcgatatctggtctgttggctgtgtagtggctgagcttctgattggtcagcctttgtttcctggtgaaagtggtgttgaccaactggtggaaataataaagattttgggtactccaacaagagaggagatcaggtgcatgaatccaaattattccgaattcaagttccctcagataaaagcccatccatggcacaagctttttggtaagcgcatgccacccgaggctgtcgatctcgtgtcaaggctgctccagtactcaccgaacctgcgctgcactgctgtcgacgcctgtgcccatccgttcttcgatgagctgcgggaccccaaggcttgcctgccgaacggacggccaatgccaccgttgttcgacttcacagcagccgaactcgaagggctccccgccgagcttgtccaccggatcgttcctgaacacatgaggaaggaagtgaattaggtggacggacgtactggggcaaaaaaaaaaaaaaaactccctgtttctctgttggttctgagagatgtgtgagggcacggatatggaggagcggtggtgtattgtaattgtaaagagggctgaaagaaaggtccctctggttgggcgtgtcaccaaagagtggccctagaggcaaaccttacgtttgctcgttgcccttggtgtgtacccagatgtgtatcgatgacataggctggctgctgtatcatcatcagggttgacgctgaacaagagaaattcaagcagggtgctgctagctcgcttcctcccgtagctggaaaccccagaatgccagtttccatcactgcacgtcgtcgcgctgtccactggtgtcccgtaagcatatagagctctgccggctccgctattggcttgcgtgtgtctatcgataatgacttctacggacgctaccaaaaaataaaaataaaaaaacaagcggatggctacacgtccataaactgacaagaagacggtacaaaaaacgagcggttggcttgcgatgtgcgttaatagattg

SEQ ID NO: 210168 - DNA, 2030 bp, Zea Mays
gcctcatcaggtgtggttttggctgtaatgcgttggcaactgagcttcataggaccatgaagaaaatggacagtagcctattaactgagagtctgagactttactggttaatcaggaaatgtctcccgttcacaaaaaagaaggacatgagaagtggggggtggtgactctggctccaaaagaccaaagtttgagcaggatggagcaggagatattgttatggagccacacttaaccgaggataaacctgtgcggatagaccaagaatcatcgtcaacatctaatagggatgctgaggcaagcacatctactagcatgaaacctgttaaaactgaagaagcaggagcagatcttcttcccaaagagatgaatattatgacaattagcgacgataaagctgatggccataatgataaggaaggtgagggtgttacacttgatgggactggaacagagacagggcagataattgtgacaacaataggaggtcacaatgggaagccaaagcagaaggtctcatacatggcagaattggttgttggtactggttcgtttggtattgttttccaggcgaaatgcttggaaactgacgagacggtggcgataaaaaaggtgttacaagataagcgctacaagaatagagagctccagactatgcagttacatgaccacccgaatgtagttcagctgaagcatcacttcttttcaacaactcaaaagggagaagtttacctcaaccttgtacttgaatttgtatccgagacagtttatcgtgttgccaaatactacaaccggatgaaccagcgtgtacccataatatatgttaagttgtatgcatatcagatgtgccgtgcgcttgcttacatccatcgagttgtcggtgtgtgtcatcgtgatattaaacctcaaaatctactggtcaatcctcatacacatcaacttaagatttgtgattttgggagcgctaaaaaattgggctcctgaactaatatttggagctacggagtataccactgcgatcgatatctggtctgttggctgtgtagtggctgagcttctgattggtcagcctttgtttcctggtgaaagtggtgttgaccaactggtggaaataataaagattttgggtactccaacaagagaggagatcaggtgcatgaatccaaattattccgaattcaagttccctcagataaaagcccatccatggcacaagctttttggtaagcgcatgccacccgaggctgtcgatctcgtgtcaaggctgctccagtactcaccgaacctgcgctgcactgctgtcgacgcctgtgcccatccgttcttcgatgagctgcgggaccccaaggcttgcctgccgaacggacggccaatgccaccgttgttcgacttcacagcagccgaactcgaagggctccccgccgagcttgtccaccggatcgttcctgaacacatgaggaaggaagtgaattaggtggacggacgtactggggcaaaaaaaaaaaaaaaactccctgtttctctgttggttctgagagatgtgtgagggcacggatatggaggagcggtggtgtattgtaattgtaaagagggctgaaagaaaggtccctctggttgggcgtgtcaccaaagagtggccctagaggcaaaccttacgtttgctcgttgcccttggtgtgtacccagatgtgtatcgatgacataggctggctgctgtatcatcatcagggttgacgctgaacaagagaaattcaagcagggtgctgctagctcgcttcctcccgtagctggaaaccccagaatgccagtttccatcactgcacgtcgtcgcgctgtccactggtgtcccgtaagcatatagagctctgccggctccgctattggcttgcgtgtgtctatcgataatgacttctacggacgctaccaaaaaataaaaataaaaaaacaagcggatggctacacgtccataaactgacaagaagacggtacaaaaaacgagcggttggcttgcgatgtgcgttaatagattg

SEQ ID NO: 210169 - DNA, 2651 bp, Zea Mays
ctcccagcttttgccattttggcgaccagctccaacaaccggagagggggagagagagagagctcgagtcacaaagctaaaaaaagcaccgagaaatctagtggtgcagcgagcgaatccgtccggccgtccccttcctccgccacccatccccaaaattttcaccgcacgtcgcctccccgcgacgacgacgcccgaagcttccagggccctcccctcccccccgcggccgcccctccctagatcgccgcctccggcagcggcgaggctgcatcgcgagggcggcggaggagccgggcgacggggtcgacgaaggcggggaagacgaggctagggttcggggtcgctgctgctgggctgcgtctgagggaggaggatgcatatgatgcggcggctcaagagcatcgcctccggccgctcgtcggtctccgatccgcgtctgttcatttcgtttgcttgcttcgtcgtggctgcctcccctttatagaaaggctaaagcgttgcacggtctgttgcctcatcaggtgccaagcgctttattttgctttagtcgatttggcattcggctccttgcactttaatggcgacatgttgttcgtttttgctcaagtatttatttcaccagtttgtctaataggtgtggttttggctgtaatgcgttggcaactgagcttcataggaccatgaagaaaatggacagtagcctattaactgagagtctgagactttactgggtggtgactctggctccaaaagaccaaagtttgagcaggatggagcaggagatattgttatggagccacacttaaccgaggataaacctgtgcggatagaccaagaatcatcgtcaacatctaatagggatgctgaggcaagcacatctactagcatgaaacctgttaaaactgaagaagcaggagcagatcttcttcccaaagagatgaatattatgacaattagcgacgataaagctgatggccataatgataaggaaggtgagggtgttacacttgatgggactggaacagagacagggcagataattgtgacaacaataggaggtcacaatgggaagccaaagcagaaggtctcatacatggcagaattggttgttggtactggttcgtttggtattgttttccaggcgaaatgcttggaaactgacgagacggtggcgataaaaaaggtgttacaagataagcgctacaagaatagagagctccagactatgcagttacatgaccacccgaatgtagttcagctgaagcatcacttcttttcaacaactcaaaagggagaagtttacctcaaccttgtacttgaatttgtatccgagacagtttatcgtgttgccaaatactacaaccggatgaaccagcgtgtacccataatatatgttaagttgtatgcatatcagatgtgccgtgcgcttgcttacatccatcgagttgtcggtgtgtgtcatcgtgatattaaacctcaaaatctactggtcaatcctcatacacatcaacttaagatttgtgattttgggagcgctaaaaaattggtccctggtgagcctaacatatcgtacatttgctcgcggtattatagggctcctgaactaatatttggagctacggagtataccactgcgatcgatatctggtctgttggctgtgtagtggctgagcttctgattggtcagcctttgtttcctggtgaaagtggtgttgaccaactggtggaaataataaagattttgggtactccaacaagagaggagatcaggtgcatgaatccaaattattccgaattcaagttccctcagataaaagcccatccatggcacaagctttttggtaagcgcatgccacccgaggctgtcgatctcgtgtcaaggctgctccagtactcaccgaacctgcgctgcactgctgtcgacgcctgtgcccatccgttcttcgatgagctgcgggaccccaaggcttgcctgccgaacggacggccaatgccaccgttgttcgacttcacagcagccgaactcgaagggctccccgccgagcttgtccaccggatcgttcctgaacacatgaggaaggaagtgaattaggtggacggacgtactggggcaaaaaaaaaaaaaaaactccctgtttctctgttggttctgagagatgtgtgagggcacggatatggaggagcggtggtgtattgtaattgtaaagagggctgaaagaaaggtccctctggttgggcgtgtcaccaaagagtggccctagaggcaaaccttacgtttgctcgttgcccttggtgtgtacccagatgtgtatcgatgacataggctggctgctgtatcatcatcagggttgacgctgaacaagagaaattcaagcagggtgctgctagctcgcttcctcccgtagctggaaaccccagaatgccagtttccatcactgcacgtcgtcgcgctgtccactggtgtcccgtaagcatatagagctctgccggctccgctattggcttgcgtgtgtctatcgataatgacttctacggacgctaccaaaaaataaaaataaaaaaacaagcggatggctacacgtccataaactgacaagaagacggtacaaaaaacgagcggttggcttgcgatgtgcgttaatagattg

SEQ ID NO: 210170 - DNA, 747 bp, Zea Mays
tgctgctctactcacacctcgatgcttgcacactgggggatcatgttccaggacatcacgacgttgctgctcgatcccaaggcgttccgtgacaccatcgacctctttgtcgagcggtacaaggaccaagggatcaccgtggttgctggcgaggtgatctccgaagagtattctttggaatatggaactgacaagatagaaatgcatgtcggagctgtacaggccaacgaccgggctcttgtagtcgatgatcttattgctaccggtggaacactatgtgcagctgtcaaacttattgaacgtgttggagcaaaggttgttgagtgtgcttgtgtcattgaattgccagaactgaagggccgagacaagcttggggacaggccagtttttgtccttgtggaagcagacgcctgagcggaacttgggacttctcagagagtttggcgccgtcgatgctccctctctggagacaacacagtttcccatgttaccatgttggctattttctggctgacgcgtaataaagttttattccaaattgtgatcccctgaatgatttgtcaatgtagacatgattgctgatctttgtaaactgtggcttatgttttgtcaaaatggttctaattattcacatcaattaaggataaatcctgattggagcttgttgtttgttctagtaatgttgctttattgctttgtttgtgcaaccattgatgaaataaagttgccatcgcaataactgaataa

SEQ ID NO: 210171 - DNA, 2207 bp, Zea Mays
ctcctcgcttccaccaccgtcctccgcctccgcctccgccccgcgcccagcactcgtcccttgctttctccctctctctctctctctctctctctctccgcgcgcgcacccacgcacgcagtttgagagggtgtgcggcgctcgaggggcgaggagcggggtgggtcatggcagaggcagactgttccgcggcgaggaccaggacggcggggctcgccgccgccgccgccgcggcggcgttcctcgtgctcgtggtggtcgccggcagcgcggtgctccctggcgcgcgggtgagggtcctcgacggcctccggggcagggccgacgacggcgacgccggcgggccatcgagggccgtcaccggcgcggtggaggatccggaggccgtggccaacgacgtgcacgtgtccatcaggaacagcacggcccggcgaaacctcgggtacctgtcgtgcgggacaggcaacccgatcgacgactgctggcgctgcgactcggactggcacagcaaccggcagcggctggccgactgcggcatcgggttcggccgcaacgccatcggcggccgcgacggcaaggtgtacgtggtgacggacccgagcgacgacgatcccgtgaacccgcgcgagggcaccctccggcacgccgtcatccaggaggagccgctgtggatcatcttcaagcgggacatggtgatcacgctgagggaggagctcatcatgaacagcttcaagaccatcgacgggcgcggcgccaacgtgcacatcgccaacggcgcctgcgtcaccatccagtacgtgaccaacgtcatcatccacgggctccacatccacgactgcaggcccacggggaacgccatggtgcgcagctccccgagccactacggctggcgcaccatggccgacggggacggcgtgtccatcttcggttccagccacgtctgggtggaccactgctcgctctccaactgcgccgacggcctcatcgacgccatcatgggatccacggccatcactctgtccaacaactacttcacccaccacaacgaggtgatgctcctgggccacagtgactcctatgtgaaggacaaggcgatgcaggtcacgatagccttcaaccatttcggcgaaggcctcattcagagaatgccaaggtgccggcacggctacttccacgttgtgaacaacgactacacccactgggagatgtacgccattgggggcagcgcggagccaaccatcaacagccagggcaaccgctaccttgctccgacgaacccgttcgccaaggaggtgaccaagagggtggagactgcccagaccgtgtggaagagctggaactggaggtcagagggcgacctgctgctgaacggcgcctacttcaccccgtccggcgcgggcgcctcggccagctactcgcgcgcgtccagcctcggcgccaagtcgtcgtccatggtcggcaccatcacctcggacgccggcgcactgtcgtgccgcaagggcgcggcctgctagcgcggatcgcgctccctctccagcaacaggaaaagaaacaggacaacaggaaactaagccacctcaacaccaccaccaccatggttacagtttcttcttcccttctttttaggggtcgcttttgacaagggttatattatatatatatatgatggtcctccttgatattttcaccatttgctcaacctcccccctgctcccgacatggaaagctacctggagcagcaggcgtgaagcgttgctgattggtcgctcggtctctctattagtcgtctgatctgagtgttgcgtgttgttccctctgcctacaagcaagtggtgtatgttgagggcagggggtgcgtgcgtgcgtgttgtgtgtgatacttactcacttggttgttgtgttgagaaaaaaagggtcagattgttagtagtggtagtactacatgttacgcctggacagactgggatggaatggatgtacaagacatggaggaatacccatgttcttaactcttcttcttcttcagtgaaaaaagctaaaacgttacagtttagctgaatattttgatctcgaagaacagcatgtgctgcttcggaaaggacactagcaccagcacattgatatgcccagttccatatcaagttttttcactatcctcggaagtagtacttgtgtacatgaggagggatcggggatggatctggcgg

SEQ ID NO: 210172 - DNA, 1120 bp, Zea Mays
gtgagatctgttcagagggaaactgaatatcttgatataatggtgtccgaaggcttggaaataacacaacctgctctggaccctgatctatcaactgatatccaccatcgaatcacaatccgtaataagatggcaaaagttcacaggagaatatacgacaatcggcctagtatgaattgttctgacgagagcaaaggacctccatgtacaggaatgatcttattcatggatggggtcttgacatgaagcttggatattgcgctcagggtgatcgaacagagaaagttggtgttattgacagtgagtatgtagttcatcaagggataccatcattaggagggccatcacttagcagcaagacacctcgaagatcattggatttgaggacccacatacgaagacaatcatcggctgagctggagaagttcaaggagaggtggaacagggctgtaagggaagatgaaggatggagggatccttttgattcttgattacttggaaagcagagtgtgacacttctgataacaaaactggccagtggccacagtcacagcagtagagtttggaagcggagagcatcttctgcttcatgtcaaaaacacttgtttggttataggatgacgagacggttggttggttataggatgatgacttacatacacacacacacatcataactttatccacatgagttaaaagcgggaacattatcgtcaatacaaggagctgatggagaagttgaaactaacaaagtaacagggggtttccgaaagtgctgtaattttccgttggaaatatctgttcgggagagttgtatagtgtcatgatatacacacttgtgcagttatttgatgaggaaacttacatagcctagagcagatgtgtttcctatattattattgccttgtacaatgtaagatgaattccatgagtcagaaatagcatcaggtctctatgcttatacttggacaagttaagaggatggcacggcatattttttgtgtcaccgcaccgaggttgtcgctctctttatgtgtatcaaaaatataaaagctcttgtttatgtacatgaacgatgttttgggtgtcattggaactttgcattctttcattttagtgg

SEQ ID NO: 210173 - DNA, 2198 bp, Zea Mays
acggaccgaccggcgaccgcacccaatgcaagcaatttttgcggacagggggaccttcctcttcttcttcctcgtccccggcccctgcccctctcccctgcggagacggagcgccaccttcctcaccttctagaaagaactagaaccctccctccagaaccttgaagaccagcccagaccagaccagccccgaagctctccgccggccccgcccttgacgacatgaagcaccagccgccgcgccgctggggcgtcgtggcggcggtcgtcgcactcgtcctcctcgcctgcctccagatccagtaccaccacctcaaggtggatctcggcaaggccggctttgcctctgccacgcaagagaataacgcgatccgcagccgcaatcgcattcgctggggccccgacaggaacggcgcccactccttgccgcgcgggattgtccaccgccactccgacatgtccctccgcccgctctgggaggacgacactgcttccacccacaagaataaaaacagtgactacagtgctctcctcgccatggcagtcggcatctcccaaataaaaaacattgacactatggcccgtaagtttctgaaggaaaactatgcagtcatgctcttccattatgatggaaatgtagatggatggcgtcatcttgagtggagtgataaggccatacacatccttgctcacaaccaaacaaaatggtggtttgctaagcgttttctgcatcctgatgtcatggctatctatgatttcatttttctatgggatgaagaccttggagtggagaacttcaaccctagaagaatgggaatatgtgcagccagtttgagcctcttttcgtaactgtttagtgagatctgttcagagggaaactgaatatcttgatataatggtgtccgaaggcttggaaataacacaacctgctctggaccctgatctatcaactgatatccaccatcgaatcacaatccgtaataagatggcaaaagttcacaggagaatatacgacaatcggcctagtatgaattgttctgacgagagcaaaggacctccatgtacagggtgggtagagggcatggcaccagttttttctcgcactgcttggaaatgtgtatggcatctaattcagaatgatcttattcatggatggggtcttgacatgaagcttggatattgcgctcaggttctcaatatatgttaacagtcttaaaagatattttgataggatgtctgttgactattgaggcatgctatttcagcttccatgtcctttgttaaacacggtggagcatgggcatgctatttcaggttgattgacacagtcacatgatatttcagggtgatcgaacagagaaagttggtgttattgacagtgagtatgtagttcatcaagggataccatcattaggagggccatcacttagcagcaagacacctcgaagatcattggatttgaggacccacatacgaagacaatcatcggctgagctggagaagttcaaggagaggtggaacagggctgtaagggaagatgaaggatggagggatccttttgattcttgattacttggaaagcagagtgtgacacttctgataacaaaactggccagtggccacagtcacagcagtagagtttggaagcggagagcatcttctgcttcatgtcaaaaacacttgtttggttataggatgacgagacggttggttggttataggatgatgacttacatacacacacacacatcataactttatccacatgagttaaaagcgggaacattatcgtcaatacaaggagctgatggagaagttgaaactaacaaagtaacagggggtttccgaaagtgctgtaattttccgttggaaatatctgttcgggagagttgtatagtgtcatgatatacacacttgtgcagttatttgatgaggaaacttacatagcctagagcagatgtgtttcctatattattattgccttgtacaatgtaagatgaattccatgagtcagaaatagcatcaggtctctatgcttatacttggacaagttaagaggatggcacggcatattttttgtgtcaccgcaccgaggttgtcgctctctttatgtgtatcaaaaatataaaagctcttgtttatgtacatgaacgatgttttgggtgtcattggaactttgcattctttcattttagtgg

SEQ ID NO: 210174 - DNA, 2672 bp, Zea Mays
acggaccgaccggcgaccgcacccaatgcaagcaatttttgcggacagggggaccttcctcttcttcttcctcgtccccggcccctgcccctctcccctgcggagacggagcgccaccttcctcaccttctagaaagaactagaaccctccctccagaaccttgaagaccagcccagaccagaccagccccgaagctctccgccggccccgcccttgacgacatgaagcaccagccgccgcgccgctggggcgtcgtggcggcggtcgtcgcactcgtcctcctcgcctgcctccagatccagtaccaccacctcaaggtggatctcggcaaggccggctttgcctctgccacgcaagagaataacgcgatccgcagccgcaatcgcattcgctggggccccgacaggaacggcgcccactccttgccgcgcgggattgtccaccgccactccgacatgtccctccgcccgctctgggaggacgacactgcttccacccacaagaataaaaacagtgactacagtgctctcctcgccatggcagtcggcatctcccaaataaaaaacattgacactatggccctttctgaaggaaaactatgcagtcatgctcttccattatgatggaaatgtagatggatggcgtcatcttgagtggagtgataaggccatacacatccttgctcacaaccaaacaaaatggtggtttgctaagcgttttctgcatcctgatgtcatggctatctatgatttcatttttctatgggatgaagaccttggagtggagaacttcaaccctagaaggtatgcattatggacataataattctttccctatagtcagacacactactcagttgtcacggtggaaccaaaacttaccatattgtcatccaagtgctggatatcagccattttagagcagatcaactaattgattctcatactcttttttgctatggcctggtagttatcaaacattaatcagatattatttattagaatgggaatatgtgcagccagtttgagcctcttttcgtaactgtttagtgagatctgttcagagggaaactgagtaagaacttcaaacaatgtcatcttcacttcctttctactgtagaagcttcctgtgaatacatctatgatttaattgtgtttttatgtgcaaatacgcttcctcatctttcgtgttgtttggtcctagatatcttgatataatggtgtccgaaggcttggaaataacacaacctgctctggaccctgatctatcaactgatatccaccatcgaatcacaatccgtaataagatggcaaaagttcacaggagaatatacgacaatcggcctagtatgaattgttctgacgagagcaaaggacctccatgtacagggtgggtagagggcatggcaccagttttttctcgcactgcttggaaatgtgtatggcatctaattcagaatgatcttattcatggatggggtcttgacatgaagcttggatattgcgctcaggttctcaatatatgttaacagtcttaaaagatattttgataggatgtctgttgactattgagggtgatcgaacagagaaagttggtgttattgacagtgagtatgtagttcatcaagggataccatcattaggagggccatcacttagcagcaaggtgcttgacatctcagcaacaaactatttttttagaaacttggagtccggtaggaccaaggatgaagtgtactgattcatccaaactttgtttgaaaaaaaaactaccagagcatcgattttccttgtgtgcttttcttttaccctagttggcatatacctgcatgatagtaatgttaggtgtcatgaattcatgatcgttcaataaaatttgcatgtgccgctactgacatcttgttgacgcagacacctcgaagatcattggatttgaggacccacatacgaagacaatcatcggctgagctggagaagttcaaggagaggtggaacagggctgtaagggaagatgaaggatggagggatccttttgattcttgattacttggaaagcagagtgtgacacttctgataacaaaactggccagtggccacagtcacagcagtagagtttggaagcggagagcatcttctgcttcatgtcaaaaacacttgtttggttataggatgacgagacggttggttggttataggatgatgacttacatacacacacacacatcataactttatccacatgagttaaaagcgggaacattatcgtcaatacaaggagctgatggagaagttgaaactaacaaagtaacagggggtttccgaaagtgctgtaattttccgttggaaatatctgttcgggagagttgtatagtgtcatgatatacacacttgtgcagttatttgatgaggaaacttacatagcctagagcagatgtgtttcctatattattattgccttgtacaatgtaagatgaattccatgagtcagaaatagcatcaggtctctatgcttatacttggacaagttaagaggatggcacggcatattttttgtgtcaccgcaccgaggttgtcgctctctttatgtgtatcaaaaatataaaagctcttgtttatgtacatgaacgatgttttgggtgtcattggaactttgcattctttcattttagtgg

SEQ ID NO: 210175 - DNA, 1965 bp, Zea Mays
acggaccgaccggcgaccgcacccaatgcaagcaatttttgcggacagggggaccttcctcttcttcttcctcgtccccggcccctgcccctctcccctgcggagacggagcgccaccttcctcaccttctagaaagaactagaaccctccctccagaaccttgaagaccagcccagaccagaccagccccgaagctctccgccggccccgcccttgacgacatgaagcaccagccgccgcgccgctggggcgtcgtggcggcggtcgtcgcactcgtcctcctcgcctgcctccagatccagtaccaccacctcaaggtggatctcggcaaggccggctttgcctctgccacgcaagagaataacgcgatccgcagccgcaatcgcattcgctggggccccgacaggaacggcgcccactccttgccgcgcgggattgtccaccgccactccgacatgtccctccgcccgctctgggaggacgacactgcttccacccacaagaataaaaacagtgactacagtgctctcctcgccatggcagtcggcatctcccaaataaaaaacattgacactatggcccgtaagtttctgaaggaaaactatgcagtcatgctcttccattatgatggaaatgtagatggatggcgtcatcttgagtggagtgataaggccatacacatccttgctcacaaccaaacaaaatggtggtttgctaagcgttttctgcatcctgatgtcatggctatctatgatttcatttttctatgggatgaagaccttggagtggagaacttcaaccctagaagatatcttgatataatggtgtccgaaggcttggaaataacacaacctgctctggaccctgatctatcaactgatatccaccatcgaatcacaatccgtaataagatggcaaaagttcacaggagaatatacgacaatcggcctagtatgaattgttctgacgagagcaaaggacctccatgtacaggaatgatcttattcatggatggggtcttgacatgaagcttggatattgcgctcaggttctcaatatatgttaacagtcttaaaagatattttgataggatgtctgttgactattgagggtgatcgaacagagaaagttggtgttattgacagtgagtatgtagttcatcaagggataccatcattaggagggccatcacttagcagcaagacacctcgaagatcattggatttgaggacccacatacgaagacaatcatcggctgagctggagaagttcaaggagaggtggaacagggctgtaagggaagatgaaggatggagggatccttttgattcttgattacttggaaagcagagtgtgacacttctgataacaaaactggccagtggccacagtcacagcagtagagtttggaagcggagagcatcttctgcttcatgtcaaaaacacttgtttggttataggatgacgagacggttggttggttataggatgatgacttacatacacacacacacatcataactttatccacatgagttaaaagcgggaacattatcgtcaatacaaggagctgatggagaagttgaaactaacaaagtaacagggggtttccgaaagtgctgtaattttccgttggaaatatctgttcgggagagttgtatagtgtcatgatatacacacttgtgcagttatttgatgaggaaacttacatagcctagagcagatgtgtttcctatattattattgccttgtacaatgtaagatgaattccatgagtcagaaatagcatcaggtctctatgcttatacttggacaagttaagaggatggcacggcatattttttgtgtcaccgcaccgaggttgtcgctctctttatgtgtatcaaaaatataaaagctcttgtttatgtacatgaacgatgttttgggtgtcattggaactttgcattctttcattttagtgg

SEQ ID NO: 210176 - DNA, 2231 bp, Zea Mays
gttcatttcactcatcacggaccgaccggcgaccgcacccaatgcaagcaatttttgcggacagggggaccttcctcttcttcttcctcgtccccggcccctgcccctctcccctgcggagacggagcgccaccttcctcaccttctagaaagaactagaaccctccctccagaaccttgaagaccagcccagaccagaccagccccgaagctctccgccggccccgcccttgacgacatgaagcaccagccgccgcgccgctggggcgtcgtggcggcggtcgtcgcactcgtcctcctcgcctgcctccagatccagtaccaccacctcaaggtggatctcggcaaggccggctttgcctctgccacgcaagagaataacgcgatccgcagccgcaatcgcattcgctggggccccgacaggaacggcgcccactccttgccgcgcgggattgtccaccgccactccgacatgtccctccgcccgctctgggaggacgacactgcttccacccacaagaataaaaacagtgactacagtgctctcctcgccatggcagtcggcatctcccaaataaaaaacattgacactatggcccgtaagtttctgaaggaaaactatgcagtcatgctcttccattatgatggaaatgtagatggatggcgtcatcttgagtggagtgataaggccatacacatccttgctcacaaccaaacaaaatggtggtttgctaagcgttttctgcatcctgatgtcatggctatctatgatttcatttttctatgggatgaagaccttggagtggagaacttcaaccctagaagatatcttgatataatggtgtccgaaggcttggaaataacacaacctgctctggaccctgatctatcaactgatatccaccatcgaatcacaatccgtaataagatggcaaaagttcacaggagaatatacgacaatcggcctagtatgaattgttctgacgagagcaaaggacctccatgtacagggtgggtagagggcatggcaccagttttttctcgcactgcttggaaatgtgtatggcatctaattcagaatgatcttattcatggatggggtcttgacatgaagcttggatattgcgctcagggtgatcgaacagagaaagttggtgttattgacagtgagtatgtagttcatcaagggataccatcattaggagggccatcacttagcagcaaggtgcttgacatctcagcaacaaactatttttttagaaacttggagtccggtaggaccaaggatgaagtgtactgattcatccaaactttgtttgaaaaaaaaactaccagagcatcgattttccttgtgtgcttttcttttaccctagttggcatatacctgcatgatagtaatgttaggtgtcatgaattcatgatcgttcaataaaatttgcatgtgccgctactgacatcttgttgacgcagacacctcgaagatcattggatttgaggacccacatacgaagacaatcatcggctgagctggagaagttcaaggagaggtggaacagggctgtaagggaagatgaaggatggagggatccttttgattcttgattacttggaaagcagagtgtgacacttctgataacaaaactggccagtggccacagtcacagcagtagagtttggaagcggagagcatcttctgcttcatgtcaaaaacacttgtttggttataggatgacgagacggttggttggttataggatgatgacttacatacacacacacacatcataactttatccacatgagttaaaagcgggaacattatcgtcaatacaaggagctgatggagaagttgaaactaacaaagtaacagggggtttccgaaagtgctgtaattttccgttggaaatatctgttcgggagagttgtatagtgtcatgatatacacacttgtgcagttatttgatgaggaaacttacatagcctagagcagatgtgtttcctatattattattgccttgtacaatgtaagatgaattccatgagtcagaaatagcatcaggtctctatgcttatacttggacaagttaagaggatggcacggcatattttttgtgtcaccgcaccgaggttgtcgctctctttatgtgtatcaaaaatataaaagctcttgtttatgtacatgaacgatgttttgggtgtcattggaactttgcattctttcattttagtgg

SEQ ID NO: 210177 - DNA, 2040 bp, Zea Mays
gttcatttcactcatcacggaccgaccggcgaccgcacccaatgcaagcaatttttgcggacagggggaccttcctcttcttcttcctcgtccccggcccctgcccctctcccctgcggagacggagcgccaccttcctcaccttctagaaagaactagaaccctccctccagaaccttgaagaccagcccagaccagaccagccccgaagctctccgccggccccgcccttgacgacatgaagcaccagccgccgcgccgctggggcgtcgtggcggcggtcgtcgcactcgtcctcctcgcctgcctccagatccagtaccaccacctcaaggtggatctcggcaaggccggctttgcctctgccacgcaagagaataacgcgatccgcagccgcaatcgcattcgctggggccccgacaggaacggcgcccactccttgccgcgcgggattgtccaccgccactccgacatgtccctccgcccgctctgggaggacgacactgcttccacccacaagaataaaaacagtgactacagtgctctcctcgccatggcagtcggcatctcccaaataaaaaacattgacactatggcccgtaagtttctgaaggaaaactatgcagtcatgctcttccattatgatggaaatgtagatggatggcgtcatcttgagtggagtgataaggccatacacatccttgctcacaaccaaacaaaatggtggtttgctaagcgttttctgcatcctgatgtcatggctatctatgatttcatttttctatgggatgaagaccttggagtggagaacttcaaccctagaagatatcttgatataatggtgtccgaaggcttggaaataacacaacctgctctggaccctgatctatcaactgatatccaccatcgaatcacaatccgtaataagatggcaaaagttcacaggagaatatacgacaatcggcctagtatgaattgttctgacgagagcaaaggacctccatgtacaggagggcatggcaccagttttttctcgcactgcttggaaatgtgtatggcatctaattcagaatgatcttattcatggatggggtcttgacatgaagcttggatattgcgctcaggttctcaatatatgttaacagtcttaaaagatattttgataggatgtctgttgactattgagggtgatcgaacagagaaagttggtgttattgacagtgagtatgtagttcatcaagggataccatcattaggagggccatcacttagcagcaagacacctcgaagatcattggatttgaggacccacatacgaagacaatcatcggctgagctggagaagttcaaggagaggtggaacagggctgtaagggaagatgaaggatggagggatccttttgattcttgattacttggaaagcagagtgtgacacttctgataacaaaactggccagtggccacagtcacagcagtagagtttggaagcggagagcatcttctgcttcatgtcaaaaacacttgtttggttataggatgacgagacggttggttggttataggatgatgacttacatacacacacacacatcataactttatccacatgagttaaaagcgggaacattatcgtcaatacaaggagctgatggagaagttgaaactaacaaagtaacagggggtttccgaaagtgctgtaattttccgttggaaatatctgttcgggagagttgtatagtgtcatgatatacacacttgtgcagttatttgatgaggaaacttacatagcctagagcagatgtgtttcctatattattattgccttgtacaatgtaagatgaattccatgagtcagaaatagcatcaggtctctatgcttatacttggacaagttaagaggatggcacggcatattttttgtgtcaccgcaccgaggttgtcgctctctttatgtgtatcaaaaatataaaagctcttgtttatgtacatgaacgatgttttgggtgtcattggaactttgcattctttcattttagtgg

SEQ ID NO: 210178 - DNA, 2321 bp, Zea Mays
cagagggtagggttcatttcactcatcacggaccgaccggcgaccgcacccaatgcaagcaatttttgcggacagggggaccttcctcttcttcttcctcgtccccggcccctgcccctctcccctgcggagacggagcgccaccttcctcaccttctagaaagaactagaaccctccctccagaaccttgaagaccagcccagaccagaccagccccgaagctctccgccggccccgcccttgacgacatgaagcaccagccgccgcgccgctggggcgtcgtggcggcggtcgtcgcactcgtcctcctcgcctgcctccagatccagtaccaccacctcaaggtggatctcggcaaggccggctttgcctctgccacgcaagagaataacgcgatccgcagccgcaatcgcattcgctggggccccgacaggaacggcgcccactccttgccgcgcgggattgtccaccgccactccgacatgtccctccgcccgctctgggaggacgacactgcttccacccacaagaataaaaacagtgactacagtgctctcctcgccatggcagtcggcatctcccaaataaaaaacattgacactatggcccgtaagtttctgaaggaaaactatgcagtcatgctcttccattatgatggaaatgtagatggatggcgtcatcttgagtggagtgataaggccatacacatccttgctcacaaccaaacaaaatggtggtttgctaagcgttttctgcatcctgatgtcatggctatctatgatttcatttttctatgggatgaagaccttggagtggagaacttcaaccctagaagatatcttgatataatggtgtccgaaggcttggaaataacacaacctgctctggaccctgatctatcaactgatatccaccatcgaatcacaatccgtaataagatggcaaaagttcacaggagaatatacgacaatcggcctagtatgaattgttctgacgagagcaaaggacctccatgtacagggtgggtagagggcatggcaccagttttttctcgcactgcttggaaatgtgtatggcatctaattcagaatgatcttattcatggatggggtcttgacatgaagcttggatattgcgctcagcttccatgtcctttgttaaacacggtggagcatgggcatgctatttcaggttgattgacacagtcacatgatatttcagggtgatcgaacagagaaagttggtgttattgacagtgagtatgtagttcatcaagggataccatcattaggagggccatcacttagcagcaaggtgcttgacatctcagcaacaaactatttttttagaaacttggagtccggtaggaccaaggatgaagtgtactgattcatccaaactttgtttgaaaaaaaaactaccagagcatcgattttccttgtgtgcttttcttttaccctagttggcatatacctgcatgatagtaatgttaggtgtcatgaattcatgatcgttcaataaaatttgcatgtgccgctactgacatcttgttgacgcagacacctcgaagatcattggatttgaggacccacatacgaagacaatcatcggctgagctggagaagttcaaggagaggtggaacagggctgtaagggaagatgaaggatggagggatccttttgattcttgattacttggaaagcagagtgtgacacttctgataacaaaactggccagtggccacagtcacagcagtagagtttggaagcggagagcatcttctgcttcatgtcaaaaacacttgtttggttataggatgacgagacggttggttggttataggatgatgacttacatacacacacacacatcataactttatccacatgagttaaaagcgggaacattatcgtcaatacaaggagctgatggagaagttgaaactaacaaagtaacagggggtttccgaaagtgctgtaattttccgttggaaatatctgttcgggagagttgtatagtgtcatgatatacacacttgtgcagttatttgatgaggaaacttacatagcctagagcagatgtgtttcctatattattattgccttgtacaatgtaagatgaattccatgagtcagaaatagcatcaggtctctatgcttatacttggacaagttaagaggatggcacggcatattttttgtgtcaccgcaccgaggttgtcgctctctttatgtgtatcaaaaatataaaagctcttgtttatgtacatgaacgatgttttgggtgtcattggaactttgcattctttcattttagtgg

SEQ ID NO: 210179 - DNA, 1940 bp, Zea Mays
ggcagtttggcagagggtagggttcatttcactcatcacggaccgaccggcgaccgcacccaatgcaagcaatttttgcggacagggggaccttcctcttcttcttcctcgtccccggcccctgcccctctcccctgcggagacggagcgccaccttcctcaccttctagaaagaactagaaccctccctccagaaccttgaagaccagcccagaccagaccagccccgaagctctccgccggccccgcccttgacgacatgaagcaccagccgccgcgccgctggggcgtcgtggcggcggtcgtcgcactcgtcctcctcgcctgcctccagatccagtaccaccacctcaaggtggatctcggcaaggccggctttgcctctgccacgcaagagaataacgcgatccgcagccgcaatcgcattcgctggggccccgacaggaacggcgcccactccttgccgcgcgggattgtccaccgccactccgacatgtccctccgcccgctctgggaggacgacactgcttccacccacaagaataaaaacagtgactacagtgctctcctcgccatggcagtcggcatctcccaaataaaaaacattgacactatggcccgtaagtttctgaaggaaaactatgcagtcatgctcttccattatgatggaaatgtagatggatggcgtcatcttgagtggagtgataaggccatacacatccttgctcacaaccaaacaaaatggtggtttgctaagcgttttctgcatcctgatgtcatggctatctatgatttcatttttctatgggatgaagaccttggagtggagaacttcaaccctagaagatatcttgatataatggtgtccgaaggcttggaaataacacaacctgctctggaccctgatctatcaactgatatccaccatcgaatcacaatccgtaataagatggcaaaagttcacaggagaatatacgacaatcggcctagtatgaattgttctgacgagagcaaaggacctccatgtacaggaatgatcttattcatggatggggtcttgacatgaagcttggatattgcgctcagggtgatcgaacagagaaagttggtgttattgacagtgagtatgtagttcatcaagggataccatcattaggagggccatcacttagcagcaagacacctcgaagatcattggatttgaggacccacatacgaagacaatcatcggctgagctggagaagttcaaggagaggtggaacagggctgtaagggaagatgaaggatggagggatccttttgattcttgattacttggaaagcagagtgtgacacttctgataacaaaactggccagtggccacagtcacagcagtagagtttggaagcggagagcatcttctgcttcatgtcaaaaacacttgtttggttataggatgacgagacggttggttggttataggatgatgacttacatacacacacacacatcataactttatccacatgagttaaaagcgggaacattatcgtcaatacaaggagctgatggagaagttgaaactaacaaagtaacagggggtttccgaaagtgctgtaattttccgttggaaatatctgttcgggagagttgtatagtgtcatgatatacacacttgtgcagttatttgatgaggaaacttacatagcctagagcagatgtgtttcctatattattattgccttgtacaatgtaagatgaattccatgagtcagaaatagcatcaggtctctatgcttatacttggacaagttaagaggatggcacggcatattttttgtgtcaccgcaccgaggttgtcgctctctttatgtgtatcaaaaatataaaagctcttgtttatgtacatgaacgatgttttgggtgtcattggaactttgcattctttcattttagtgg

SEQ ID NO: 210180 - DNA, 1202 bp, Zea Mays
ctttgcagttctaaaattgaccatgtgatcgaaaatccaagcagaaagttgtacctttaccctggagggggctgatgcgtcgcttcatttctgctcttctgccgtctagtcctttgtactgaccggcgctccggtcgtctcctcgcgcttgcgggttccccgtccccaccccacgccgggggcaagagatggagaacgcggtggtgctccgggagtggtttgaccgcgtcgacgccggccgcaccggcaacatcaccgctgcccagctccagggcgcgctcgctgtcggcaacctcaacttccccatctccgtcgtgcagcagatgattaggatgtatgacttcgatcggaatggcaccatgaacttcgaagagtttctggctcttaacaaattcctacagaaggtatgtatgtggcttctctaatttggatctgttgcgcatttaggaattaggattagatgattagtggattactcactcagacaagcatcttctgcaacaggcaatttttctgtttcataatcaactgggtctgatatgtctcataccaactaatggccgtgagaatgttatttaggcttatataagttatacagaagatgtttcgttatgataatgcacaaaagttatggtgtgcaatgaaaggtgcaaaatgtgttttccaccctggataggggtcgtggatttctaagtcttgaggaggtgtaccagccttctatactgtttgtgagagctttgacaagagcaagaagggcatgattcaattggatgagtttatatcactctgcatttttgttcagtcagctcgtaacctgttcaattcgttcgatacaagcaagcaaggaagagtgactttagattttaaccaattcgtgtactgcacggcaaactgcaggatataatgtggttgtacatgggcgcccaaacaaaaaggttagcagtgtgaagtgctaaccgttcgccaatcaaacttcgtttctgaaccggcagctgggtattgcaattcactgttcgccatctaaggcttgttgtaccatcattttgcctgaatgtattcttggtcacctattggtcaatccgtgtccagttttctgacatcctgggctgtatatacagaataagacttggcaatttgtggctgtatttatataaaatatttcaagtaatccagacattcactcctttgcattgtgatttccc

SEQ ID NO: 210181 - DNA, 1237 bp, Zea Mays
ctaaaattgaccatgtgatcgaaaatccaagcagaaagttgtacctttaccctggagggggctgatgcgtcgcttcatttctgctcttctgccgtctagtcctttgtactgaccggcgctccggtcgtctcctcgcgcttgcgggttccccgtccccaccccacgccgggggcaagagatggagaacgcggtggtgctccgggagtggtttgaccgcgtcgacgccggccgcaccggcaacatcaccgctgcccagctccagggcgcgctcgctgtcggcaacctcaacttccccatctccgtcgtgcagcagatgattaggatgtatgacttcgatcggaatggcaccatgaacttcgaagagtttctggctcttaacaaattcctacagaaggcaatttttctgtttcataatcaactgggtctgatatgtctcataccaactaatggccgtgagaatgttatttaggcttatataagttatacagaagatgtttcgttatgataatgcacaaaagttatggtgtgcaatgaaaggtatatttgagagtaatagaaatagactcattgtgctgcatccttaactgtaagtttcttgtgtgcgactcatcgtaatcgcaggtgtttcctgtttccaatttgcaggtgcaaaatgtgttttccaccctggataggggtcgtggatttctaagtcttgaggaggtgtaccaggcattaatcaaacttggtttctcgttggattcaccagccttctatactgtttgtgagagctttgacaagagcaagaagggcatgattcaattggatgagtttatatcactctgcatttttgttcagtcagctcgtaacctgttcaattcgttcgatacaagcaagcaaggaagagtgactttagattttaaccaattcgtgtactgcacggcaaactgcaggatataatgtggttgtacatgggcgcccaaacaaaaaggttagcagtgtgaagtgctaaccgttcgccaatcaaacttcgtttctgaaccggcagctgggtattgcaattcactgttcgccatctaaggcttgttgtaccatcattttgcctgaatgtattcttggtcacctattggtcaatccgtgtccagttttctgacatcctgggctgtatatacagaataagacttggcaatttgtggctgtatttatataaaatatttcaagtaatccagacattcactcctttgcattgtgatttccc

SEQ ID NO: 210182 - DNA, 1417 bp, Zea Mays
atgtgatcgaaaatccaagcagaaagttgtacctttaccctggagggggctgatgcgtcgcttcatttctgctcttctgccgtctagtcctttgtactgaccggcgctccggtcgtctcctcgcgcttgcgggttccccgtccccaccccacgccgggggcaagagatggagaacgcggtggtgctccgggagtggtttgaccgcgtcgacgccggccgcaccggcaacatcaccgctgcccagctccagggcgcgctcgctgtcggcaacctcaacttccccatctccgtcgtgcagcagatgattaggatgtatgacttcgatcggaatggcaccatgaacttcgaagagtttctggctcttaacaaattcctacagaaggtatgtatgtggcttctctaatttggatctgttgcgcatttaggaattaggattagatgattagtggattactcactcagacaagcatcttctgcaacaggcaatttttctgtttcataatcaactgggtctgatatgtctcataccaactaatggccgtgagaatgttatttaggcttatataagttatacagaagatgtttcgttatgataatgcacaaaagttatggtgtgcaatgaaaggtatatttgagagtaatagaaatagactcattgtgctgcatccttaactgtaagtttcttgtgtgcgactcatcgtaatcgcaggtgtttcctgtttccaatttgcaggtgcaaaatgtgttttccaccctggataggggtcgtggatttctaagtcttgaggaggtgtaccaggcattaatcaaacttggtttctcgttggattcaccagccttctatactgtttgtgagagctttgacaagagcaagaagggcatgattcaattggatgagtttatatcactctgcatttttgttcagtcagctcgtttatatctggagtattttcttgggttctgtggtgaagttttgtccatggtaaagttttgtgtttaactaatctactactacatttatgtagtaacctgttcaattcgttcgatacaagcaagcaaggaagagtgactttagattttaaccaattcgtgtactgcacggcaaactgcaggatataatgtggttgtacatgggcgcccaaacaaaaaggttagcagtgtgaagtgctaaccgttcgccaatcaaacttcgtttctgaaccggcagctgggtattgcaattcactgttcgccatctaaggcttgttgtaccatcattttgcctgaatgtattcttggtcacctattggtcaatccgtgtccagttttctgacatcctgggctgtatatacagaataagacttggcaatttgtggctgtatttatataaaatatttcaagtaatccagacattcactcctttgcattgtgatttccc

SEQ ID NO: 210183 - DNA, 959 bp, Zea Mays
ctggagggggctgatgcgtcgcttcatttctgctcttctgccgtctagtcctttgtactgaccggcgctccggtcgtctcctcgcgcttgcgggttccccgtccccaccccacgccgggggcaagagatggagaacgcggtggtgctccgggagtggtttgaccgcgtcgacgccggccgcaccggcaacatcaccgctgcccagctccagggcgcgctcgctgtcggcaacctcaacttccccatctccgtcgtgcagcagatgattaggatgtatgacttcgatcggaatggcaccatgaacttcgaagagtttctggctcttaacaaattcctacagaaggtgtttcctgtttccaatttgcaggtgcaaaatgtgttttccaccctggataggggtcgtggatttctaagtcttgaggaggtgtaccaggcattaatcaaacttggtttctcgttggattcaccagccttctatactgtttgtgagagctttgacaagagcaagaagggcatgattcaattggatgagtttatatcactctgcatttttgttcagtcagctcgtaacctgttcaattcgttcgatacaagcaagcaaggaagagtgactttagattttaaccaattcgtgtactgcacggcaaactgcaggatataatgtggttgtacatgggcgcccaaacaaaaaggttagcagtgtgaagtgctaaccgttcgccaatcaaacttcgtttctgaaccggcagctgggtattgcaattcactgttcgccatctaaggcttgttgtaccatcattttgcctgaatgtattcttggtcacctattggtcaatccgtgtccagttttctgacatcctgggctgtatatacagaataagacttggcaatttgtggctgtatttatataaaatatttcaagtaatccagacattcactcctttgcattgtgatttccc

SEQ ID NO: 210184 - DNA, 1148 bp, Zea Mays
cccctggccactggcccctgcgtttcctatcgtttcggttcggcgcaggcgccgctaccgcctcctctcgaccgctcgccttcccgttcgccatgtcgttgctcgccgcggccattcccagcacttcctcccacttctccgcacccttcctcccctcattccacatgccccgcaagaacctcaccgccccactccaccggatccgccgtccgcggccgttcaccgtcgtctcctccgtcccagaccccgcggcggggccggtggaatacacgccctggctcatcgccggcctcggcaacccaggcaacaagtactacggcacgcggcacaatgtggggtttgagatggtggatcgcatcgcggcggaggaggggattacgatgaacacaatccagtccaagtcgcttctgggaattggttcaattggcgaggtgccagtcttggtggtaaaaccgcaatcatacatgaactacagtggagaggcaattggacctcttgcagcctattatcaagtaccattacggcacatcctcttgatttatgatgatacaagtctgcccaatggtgtactgcggcttcaaaagaaaggtggtcatggtcgccacaacgggctacagaatgtgattgagcatttggatggtcgcagagaatttcctcgtttatctataggcattggtagcccacctggaaaaatggaccctcgggctttccttctgcagaagttcagttcagaggaacgagtccaggtttaatattaccttgcgggtatggattagtaaaccctctacccgcgggtttcatacccattgccattccaaggagatttttgaatcccagcttgaaaatcgctcgcaccaggagttgaagctagagacctgttcacaacaataccaaatcaaactgttgttaatatgtgtgtgtgtgtggagcagtgtttaacatctcatttttactgtttcaaaatctcgttttgaccaaaaaagttcacttttgtgttgttaaatttgaagagcatattgggcttctcaaactttactttatcaccctaggataactgttgtttacttaacatcgagctactgattctgtagtagtccacccttttctagtacgaactatatgatataactgctcttggattgttgatt

SEQ ID NO: 210185 - DNA, 2024 bp, Zea Mays
aagacgttgcatctaataacgcagacgatacagatgcaaggatctctgaactcgactctagtgaagggaactgtggtactttgcttccaaacaagggcacagagatcagctgcagtggcagtggagactgtcaagaaagctcgtggcgtcggagtcatcttcgcccagttcttaactaaggacatcgcgtcttcattcgatattccctgttttcaagtagactaccaggttggaacagctatactcgcatacaccactagcacgagaaatccaacagtccagtttggctcagcaaaaacgattcttggagaactgatgggcccagaagttgcatatttctcatctcggggtccaagttctctgtcccccgctgttctgaagccagacattgctgctccaggtgtcaacattttggcagcatggactcctgctgctgccatatcatcagccattggatctgtgaagttcaagatcgattcgggaacctcgatgtcctgtccccacatctcaggagttgttgctctcctcaaatcaatgcatcccaattggagtcctgctgcagtaaaatcagcacttgttacaacagccagtgtccatgacacatatgggtttgagattgtatccgaggcggcgccctacaatcaggcgaacccatttgattacggaggcgggcatgtggatccaaacagcgctgcacaccccggtcttgtgtatgacatggggacatctgactatgtgcgcttcctttgctccatgggctacaacgtctcagccatcagctccctggctcaacagcatgagacctgtcagcacacaccaaagacgcagctgaacctgaacctgccatccatcagtattcccgaactgaggggcaggctcactgtgtcaagaacggtcaccaacgttggctcagccttgacgaagtacagagctcgtgtggaagctcctccaggagtggatgtcaccgtgagcccctcactcctgaccttcaactcgacggtgagaaagttgacgttcaaggtgacattccaggccaaactgaaggtgcaagggagatactacttcggcagcttgacatgggaagatggcgtgcacgccgtgaggatccctcttgtggttcggacgatgatcagtaagttctatgccaattcatgagctggtgggtgtttgtgtgtactgtgtactaactttcgctcaccaccggtgacggtgggacagataagatgtaacctgctaatttgtcccaattctaatggcattggtgattggttggggttccttgactagaattcggttactgattattaagagaaattgaatctttcttttgtttgtaataactcataacttcctcctgttacacaacaaggaggctgaattgacaaagcatcttaatctagcatataacacagcaggaaaacaagagaactgtaatgtctcgagtgctaagaattggtaccggcgtatgtgaatctggtgagacgccagcaatctaattcagttcagagcagaagaggtcattacacatgagaggcgcacttcaggatttggcaccttctttgggcttggtatcagcagagtcgtccttgccgccggagcctgaggaggccgcgcgcgcggcgagggccttgtcgtacgcgtcgagctcgtcgaaatatatgtcccagacgcagcgaacgcagccgctgccgcagcagtcgcccgggagaggcttctcgggcggcagcggcgttggcgcgggcgtgggagccggcgcggcgtcgggcttcccggtgccgccatcgcaaggggtggccgaggccatgggcgtttcgggcgggaggtagtggcggcggcggaggagaggggcgcgtcggcccgggcaggaaaggtaggatcgggcccgggacacggacgacggcgcccagcatacagcccctcgctcgtcgaaaggggaggggaggggacggtcgcggaggccaagaggctgcgtgattgggacgcaggagaatccaactgccacaaggcaactcggacgaaccaat

SEQ ID NO: 210186 - DNA, 1372 bp, Zea Mays
aaccgcagaggccaacagcacaacgagcgcaccactccccaagaaatggagctgacccaactcctcctcctcaccggcaccgcctcccgagctcctgctccgcgcgcgtagccgcgccgcagttcccagtaataacacgcccgcaagctccgcagtccgctccctgcgcgagggtgttgtttgagccatgaagatggcgacgatgactgcttacaagtatcaagctcaggcgttgatgagggactacttgctagctgatctactcgttccgtacacctctgtgctctttggcattgtcctctgcaaggtggcttatgatttcactcgaatactgagctccttttatttcaaggggtatactttattgacaaaaatacagcgcatcgaatggaacaataggggtatgtccagcgcacatgcaatttttatcacggctgtatcattatatattgtcacgtcgactgatcttttctccgattgtgtcaaggggcctattacattccgtaattcgataatatccacttctgcattgggggtttctgttggctacttcatcactgatcttgaaatgatcttctggctgtatccttcccttggtggaatggaatatgtcctccaccatactctttctctggttgcaatagcttacacaatgttgtctggggaagggcagttttacacatacatggttctcatttcagagacaaccacccctgaaatcaacttgcgatggtttcttgacactgctggactgaagaaatcaagtgcttacttggttaatggaattctgatgtttgttgcatggctggtggcaaggatatttttgttcatgtatgtattttaccacatttatttgcattacagtcagataatgcagatgcatgcctttgggtactacctgacgtttgttgtgccatcggtgctctttgtaatgaacacaatgtggttcatgaagatcttaaaaggcgtgatgaaaacactggcaaaatggtcatgatggatgatgccaagaggatcccagaactatcaacaggatttggtctttctggcatcattgatctgtaaagttatggatatcagggtaactagagaaagttaatatgtaaagtattagcaaacaagctagattaggtgaaattgccctattttcagcagtgctggaagttcataaccagtttggtttgtaccggagatccagcacgctgttctgcttacccccaatgccatgtgtatatctggagcattttgcttaccccaatgccatgtgtatatttggagcattttaatggatggtttgttcaacacaacagtacattactcctcaagattacaatacaatacagaagtacccacgacaatgacaatacaatac

SEQ ID NO: 210187 - DNA, 1369 bp, Zea Mays
aaccgcagaggccaacagcacaacgagcgcaccactccccaagaaatggagctgacccaactcctcctcctcaccggcaccgcctcccgagctcctgctccgcgcgcgtagccgcgccgcagttcccagtaataacacgcccgcaagctccgcagtccgctccctgcgcgagggtgttgtttgagccatgaagatggcgacgatgactgcttacaagtatcaagctcaggcgttgatgagggactacttgctagctgatctactcgttccgtacacctctgtgctctttggcattgtcctctgcaaggcttatgatttcactcgaatactgagctccttttatttcaaggggtatactttattgacaaaaatacagcgcatcgaatggaacaataggggtatgtccagcgcacatgcaatttttatcacggctgtatcattatatattgtcacgtcgactgatcttttctccgattgtgtcaaggggcctattacattccgtaattcgataatatccacttctgcattgggggtttctgttggctacttcatcactgatcttgaaatgatcttctggctgtatccttcccttggtggaatggaatatgtcctccaccatactctttctctggttgcaatagcttacacaatgttgtctggggaagggcagttttacacatacatggttctcatttcagagacaaccacccctgaaatcaacttgcgatggtttcttgacactgctggactgaagaaatcaagtgcttacttggttaatggaattctgatgtttgttgcatggctggtggcaaggatatttttgttcatgtatgtattttaccacatttatttgcattacagtcagataatgcagatgcatgcctttgggtactacctgacgtttgttgtgccatcggtgctctttgtaatgaacacaatgtggttcatgaagatcttaaaaggcgtgatgaaaacactggcaaaatggtcatgatggatgatgccaagaggatcccagaactatcaacaggatttggtctttctggcatcattgatctgtaaagttatggatatcagggtaactagagaaagttaatatgtaaagtattagcaaacaagctagattaggtgaaattgccctattttcagcagtgctggaagttcataaccagtttggtttgtaccggagatccagcacgctgttctgcttacccccaatgccatgtgtatatctggagcattttgcttaccccaatgccatgtgtatatttggagcattttaatggatggtttgttcaacacaacagtacattactcctcaagattacaatacaatacagaagtacccacgacaatgacaatacaatac

SEQ ID NO: 210188 - DNA, 1077 bp, Zea Mays
ttatccagctctcgccatcctttggcttatgatttcactcgaatactgagctccttttatttcaaggggtatactttattgacaaaaatacagcgcatcgaatggaacaataggggtatgtccagcgcacatgcaatttttatcacggctgtatcattatatattgtcacgtcgactgatcttttctccgattgtgtcaaggggcctattacattccgtaattcgataatatccacttctgcattgggggtttctgttggctacttcatcactgatcttgaaatgatcttctggctgtatccttcccttggtggaatggaatatgtcctccaccatactctttctctggttgcaatagcttacacaatgttgtctggggaagggcagttttacacatacatggttctcatttcagagacaaccacccctgaaatcaacttgcgatggtttcttgacactgctggactgaagaaatcaagtgcttacttggttaatggaattctgatgtttgttgcatggctggtggcaaggatatttttgttcatgtatgtattttaccacatttatttgcattacagtcagatgcatgcctttgggtactacctgacgtttgttgtgccatcggtgctctttgtaatgaacacaatgtggttcatgaagatcttaaaaggcgtgatgaaaacactggcaaaatggtcatgatggatgatgccaagaggatcccagaactatcaacaggatttggtctttctggcatcattgatctgtaaagttatggatatcagggtaactagagaaagttaatatgtaaagtattagcaaacaagctagattaggtgaaattgccctattttcagcagtgctggaagttcataaccagtttggtttgtaccggagatccagcacgctgttctgcttacccccaatgccatgtgtatatctggagcattttgcttaccccaatgccatgtgtatatttggagcattttaatggatggtttgttcaacacaacagtacattactcctcaagattacaatacaatacagaagtacccacgacaatgacaatacaatac

SEQ ID NO: 210189 - DNA, 486 bp, Zea Mays
gtccgagttgccttgtggcagttggattctcctgcgtcccaatcacgcagcctcttggcctccgcgaccgtcccctcccctcccctttcgacgagcgaggggctgtatgctgggcgccgtcgtccgtgtcccgggcccgatcctacctttcctgcccgggccgacgcgcccctctcctccgccgccgccactacctcccgcccgaaacgcccatggcctcggccaccccttgcgatggcggcaccgggaagcccgacgccgcgccggctcccacgcccgcgccaacgccgctgccgcccgagaagcctctcccgggcgactgctgcggcagcggctgcgttcgctgcgtctgggacatatatttcgacgagctcgacgcgtacgacaaggccctcgccgcgcgcgcggcctcctcaggctccggcggcaaggacgactctgctgataccaagcccaaagaagtacagactggcagatcagatttcg

SEQ ID NO: 210190 - DNA, 1210 bp, Zea Mays
gttgtctccgtggtcaaatcggattcagcccatgcaaacgaggagaagcggtgggtgctgtctgatttcgaggttgggaagcctcttgggaggggcaaattcggccacgtatatcttgccagagaaaagaggagcaatcaaattgtggctttgaaagttcttttcaagagccagcttaagcaatcacaggtcgagcatcagctgcgacgcgaagtggagattcagagtcatcttcgtcatcctaatattcttcgcctgtatgggtacttctatgatcagacccgggtttacctaatcctggaatatgctgccaagggtgagctgtataaggaactgacaaggtgtaaacatttttctgagagacgttcagcaacttatattgcatcattggctagagctctgatctacctgcatgggaagcatgttatccatcgggacattaaaccagaaaatcttttggttggagcccagggcgagatcaaaatcgccgactttggctggtctgtgcataccttcaacagaagaaggactatgtgcggaactctggattacctgccacctgaaatggtggagaagacagaacatgattaccatgttgacatatggagcctgggtattctgtgttatgagttcctttatggggtcccaccttttgaagctaaggagcactcagaaacatacagaaggatagtaaaagtcgacttgaagttcccactgaaaccattcgtttcgcccgccgcaaaggatttgatttcccagatgctggtcaagaactcggcccagcggctgcctctccacaaggttcttgagcacccatggatcgtccagaacgccgacccttccggtgtgtgcagaggatagaaccaccaccaccggctgaagggagtgcgattctttccactctccccatttcgaggggagtgcgattctttcgactgtttatggcttctgtcgcccgaattgccccaccccgaactgtatcttgtagcaccgtgtactgtgtgtagttggggccgtgggcaaattgccctaaacccttgaacaaccttctttactcgtagtctcgtatgagagagccttgtagagtctcgtccgtccaattatgaactcgagggcaatgtgcaggaaaatgttgaaggtatcgtccataaccagcaaaacttatgtagcgagctcaatttagaatttacttttgatcctgttcgaaccc

SEQ ID NO: 210191 - DNA, 1857 bp, Zea Mays
cacgcggcgtgaataatacgtacatgcatgatccaagagacgccggtgaagaggctgtgcaagacgcacaacatcatcacggtgaacgggcagtacccggggccgacgctggaggtcagggagggtgacacgctcgtcatcaacgtcgtcaaccgggcgcagtacaacgccaccatccactggcacggcatccgccagataaggactgggtgggcggacgggccggagttcgtgacgcagtgccccatcaggcccggcggcagctacaagtaccggttcaccatccaggggcaggagggcacgctgtggtggcacgcgcacagctcctggctcagggccaccgtctacggcgcgctcatcatccgccccagggagaacaagacctacccattcgccaagccctcgcgagaagtccccgtcatcctcggtgagtggtgggatgcgaacccgatcgacgtcatccgggaggcgcagaggaccggcggcggtcccaacgtctccgacgcgttcaccatcaacggccagcccggcgacctgtacaaatgctccaacaaagagactacggccatcccggtgaaggccggcgagacggcgctgctgcggttcatcaacgccgcgctcaaccacgagctgttcgtcaccatcgcgcagcacaagatgacggtcgtcgccaccgacgcgtcctacaccaagcccttcaccacctcggtgctcatgctcgcgccgggccagaccaccgacgtcctcgtcaccatggaccagccgcccacccgctactacgtcgccgcgcgcgcctacgtctccggccagaacgtggccttcgacaacaccaccaccacggccgtcctcgagtacgactgcggctgcgcctccgacttcggccccaagatacagccggcgttcccggcggcgctaccggccttcaacgacacgtccgccgccaccgccttcgccgccgggatcaggagccccgaccgggtcaaggtccacgagaacgtcgacgagtacctcttcttcaccgtcggcctcggcctcttcaactgcaagccgggccagctctgcgccgggcccaacaacaacacccgcttcgcggccagcatgaacaacgtctccttcgtcttcccgcagaccgactccctcctccacgcgcactactacaagatccccggcgtcttcaccaccgacttcccggcatacccgcccgtgcagttcgactacacggggcagaacgtcagccaggccctgtggcagccggtccccgccaccaagctgtacccgctcaggttcggctccgtggtgcagctcgtcctgcaggacaccagcatcgtcacgcccgagaaccaccccatccacatccacggctacgatttcttcatcctcgccgagggcttcggcaacttcgaccccaagaaggacgtcgagaagttcaactacgtcgacccgccccagaggaacaccgtggcggtgcctgtcaacggttgggcggtcatccagttcgtcgccgacaaccctggtgtgtggctcatgcattgccatctggacgtgcacatcacctggggcctggcaatggctttcctagtggaggacggctatggcgaactgcagtcgctggagccgcccccagttgatcttcccatgtgctagtggaggacggatatttgtgttgaggaagaaagcctggtcacgttgtatgttaattgttactcttttttggtggaggggggcgtgttcgtgatcttaaattcttaggggacttaattttccagcttgttggtttgaagtttcttctgtaaatctatgtaattttcaatgacattcagcatattatttgagaataaattatttctttgtacaaac

SEQ ID NO: 210192 - DNA, 4410 bp, Zea Mays
gcagtgcagtgctctcgctgcggccctctcctctccctcaccctgtctctctcactcttcccatccaatctttatttccacaatccattattccttcccccttcgcttcgcttattcccccactcacttcccttccacaccgccgcctccggagaagggtccacggcggcgtccttcctcgggaggcgctcggctcggattcgctcctgctcggcggcggcgtcgccggctggtgggctcgcgcgcgcacctggtgctgggctccgcgggcgctcctcgtgcgtgacacgcgcccgatgcgtcaggatcgcgcggccggcgcccggggcctgccgtgattctgcggggaggctggatctcggtgcttccgcgtgcgggaaccagtgagttttctttttgtcttctcttccccggcggctagcggcgggccgcttggtgcacgtcagcgcgggaggccggaggttagccgatctggtgctctcgccgcccggagaggtggtgctgggcccactgccgggttctgcttagtaggaggcggaggaggtaagtccctcgtctcatggggctcgcgccgccggagctgggccagttcgacgggtgggagagctccggggaggaggagcgggagcgggagcgttggggctggtgccgccgcagccgccgcggcagcagcaggcgccgcgcggcccccaagggcaccgacgacgacaccgcggtcgacaccggctgctgcatccgcctctggcccgtcgggacatgccctccgccgccgcagaggtccaaggtcgacacctccaccagcagcgccagcacgcacgggggtagacgtctctttctctcctgtcacctggatactcactcgcattgtgctttctttgctgtcttgctcgcgtggtagatgggatttgctcctctaagtgaccataattgcgacgccgtactgttagccttgatctcgttctgggtaatgatgttacgcacgtcgcactttatctcctgatgttgagcttgcagctgattgatcgtaaatgctgaggacgtgttctgtttttggtagttagtatgctgctgtttgtgggagatatgtgaggctgcatctgggaggcttggaacaacaactcttttggttatatccttgtattgagcattgaatttgtggatggactggtattgattgccttctgcatatacaaaacataaggatcaccaatctgttgccaaatcctgtacaacaagcatctttcttgctgagcagcagcacacatgatagtttgggttctggaggagcatgtgtgagtggaccagcgtcattagttgtttcctgagtatctatttttagaatagcataagcatgtgctgattttgcctcaatactgttcacactagatgtacagcaaacttggggttactgtacgaaagaatgctattgccttctccattgcaaatagttgttagtgcgttagattcatacacgtgactttgattttgatgctgtaatctcagcatcaggtgtggtgtttgaagttgtggttttgtcggatgaataaagtaaaattcagaaggactgcgggtattagcttgtttatcaagacatgcggctgcagtttggttgctatttactgtttgttatgctcagtatggtggtgtgtctcatatagacatagaagcccagtttgccaattcatgtactgtattatgctatgccagggaacctactaacttaggtgttcagtcccagccatgtgttacataagtgttatgctaatgagtaaaaattgacatattggttaattaatatttccaaaagtaaaataagaaaaaatgctgtaaaagatcacttcaaagacaaattcatctttagaaggtttttcaccatctgcgcgatagatcgtctaacaactgtatgcaccaagaaggatttgtatttctatggagtatagttagcaattaaatcattctagaatgaatcgaaacacccccttcataatcggaactaaatgactaataaacttaaaagtacggaggatatgtgatgaatgatggcagttagcattttgatacttttaataggagcataaagtgctcgtttttgtatttgcaaaagggatttaaatgaaaataatgaatcgatgcacctcttgtaagttggtacattagcatgatgatctactgcatttattggatgctacggaagtcattgttaacatggactacccggttgtgcgatgttcatgtgatatccttttttttatattttgctttgcttttaagcaagacactatgtgaacttcatatatacttcagtgatctttgtcaggtgctttcaaggaagcaggctgaaatatgcataaagtcgtactcaaactgtgcagatggagcttttgcttttctttgttgagatcatattgtcagaagactctcttttgtcagtatgacatactaaaatattgtaatttcatgtaacagcagagaagtcaacagaaaatggtagtaggaatcaaccggtggcattggtagtctcaggttctacaactactagtaatgctgaaagcagttcatctgcatctaaagtcggagaagagataaaagttgcctcccagctgcgcaagtttgcattcaatgatctaaaatgtgctacccggaacttcaggcctgaaagtctccttggagaagggggttttggatgtgtttttaaagggtggattgaagaaaatggaactgcacctgtgaaacctggtacaggtctcacagttgctgtcaagacgctgaaccatgacgggcttcaagggcataaagaatgggtggctgaagttgattttcttggaaatcttcaccatcccaatttggtcagattgattggatattgtgttgaagatgaccaaaggttgctggtctatgaattcatgcctcgtggcagtttggataaccatctttttagaaggtctcttcctctcccatgggcaatcagaatgaaggttgcactcggagcagcaaagggtctggctttccttcatgaagaagcagaaagaccagtcatttatcgcgattttaaaacatctaatatactgctggatgcggagtataacgcaaagctctctgattttgggcttgcgaaagacggacctgtaggtgataaaactcatgtttctactcgagtaatgggaacctatggatatgcagcaccagaatatgtcatgactggtcatctgacatcaaagagtgatgtctacagcttcggggtggtgcttcttgagatgatgtcagggcgcaggtcgatggacaagaaccgcccgaacggggagcacaacctggtggaatgggcgcgccccctcctaggcgagaggcagcggttctacaagctaatcgaccctcgcctggagggcaacttctcggtgaagggcgcgcagaaggcggcgcagctagcgcgcgtgtgcctgagccgggaccccaaggcgcggcccctgatgagccaggtggtggaggtcctgaagccgctgcagaacctcaaggacatggcgagcgcctcctacttcttccagacgatgcaggccgagcggatggcgcactcgagcagcatgaacgggaggagcagcatgaacggcggcttcaagacgcagagcccgtttgggcggcatgggcagccgcctcccgtgaggagcctctctgacgggccccgcgcgtctccgttccgctactcgccgaagcctaacgtgaagtgagcggagtggtggaggcgcggttttctgccggctggaaggcacggcccctggatgaaacctggtttgttgggggtgactggttcgggccgtgcatttgcattgcattgcattgatgtgtgtgctgtagattgacatgtgcacaaagtaaaaggatataggcgaaaaagggtggtgtaggtatcggagtttgcttggcggatgtttgctctgaggttttaactgaatgaatgcggatgcaccgttgctatatattttttttgccccaaacaagtatggtaggcttaggtgattttccttggccttgcagtgtgcgggcgcctcatgaatcttgatggtcgcagttgctcgtgttcggtggtctgatgaagagaaatgcttcgatccctgcctttcgaagcaagcaagcaaacgttcttggcaacgtgggtgggggttgctcagctgtgtgtgtctgctccggtcttcgtcgccaagaaatcgacggaaatggcaatcgccgtctcctgtgccagatcgtcgtcctccattgctattgctattcgagaacagaagagcactgacttgtgagttcctaggctaacgtgcactcctcggaatcacagaaaggactggtgaggttaccacatttatttcatccaagaaaaagaaaataggcttatttctttgtagaacaaggaaagaggtctttgag

SEQ ID NO: 210193 - DNA, 2218 bp, Zea Mays
aaaaaaaccaagaaaacatgcatggggtgccgtgactcttctccgccctccctcgcctttcggtttaccctccccttgcccaagttaaaaacagcaatcagagagagagagagagagagagagagagacaggccgcaaacggagaagagacacgggagagagggagggctcgctagctaaacaataaccctcactctctactctctagctagctagcctctcagctcagctgtggtggggagaaagaccggaccggaggagagggcgatcaagaaaggttaccggccggcctagaggtagctgctagagccgccgagctcgatcgtccgactccgagagctagcttccgcttccgcttccgcccagggcagtagaagcgtttttacggcaacgctagctatagctagcgctgagagagagagaggtggaagtaacaaggccggtagagcaggcggaacggatcacgcgcggagcaaagaggccgcggggatgatggcgctccacgaggccctccgcaacgtctgcctcagctcggactggacgtactccgtcttctggaccatccgtcctcgcccgcggtgccgcggcgggaacgggtgcaaggtcggcgacgacaacggcagcctgatgctgatgtgggaggacggcttctgccggccgcgggtggcggagtgcctggaggacatggacggcgaggacccggtgcgcaaggccttcatcaagatgtccatccagctctacaactacggagaagggctgatgggaaaggtggcctctgataaatgtcacaaatgggtcttcaaggaaccttctgaatgcgagcccaacatctccaactactggcagagctctttcgacgcacttcctccggaatggaccgaccagttcgcatcaggcatccagaccatagctgtgatccaagccgggcatggcctcctgcagctgggctcctgcaagattatacccgaggacctgcacttcgtgctgcggatgcgacacatgttcgagtcactcggctaccagtcgggcttcttcctctcccagctcttctcgtcctcgcggggcgcctcgccgacgccgacgccgccattcccgctcaagcagccgccagcagctccggccgcgcgcgccccgccgcagctcttcagctggccgggccaccaccagccgcagcagctcccgtcgcccgcgggagcgtcgccgctcttcccgcccggcccgggcgcgttccacccgtcctccgcgcgcccaatgccgccgttcccaggcggcaaggacgagggccacatgttccacctcccgccagcggcgcaccacggcaccaacaagcagccgccgcagcacatggacgagcaccaccaccaccagcagcagccgatggtgggggccggcggcgacgcgcccgacggcgacctccgctggcccaacgggctgtccttcttcaccgcgctcaccgggcgcgcggacgacgcgaagctgcttttcggcggccccggcgctggcgctggcgctgcggacgacgacgacaaggcggcgccggacgcgcacggcggggccgagaacgtggaggagtacctcagcctggagagccactccaacaaggccaggaaggtggagagccccgcggcccagagcaccaacaagttcaagaggagcttcacgttgcccgcgcggatgagctcgtcctcgtccacgtcagcgttcccgtccgtgtcggcctccacggcgccgccgcagcagcagcaagcagggatggagtatcgagggccgcacgagggcggcgtctactcggacctcatggagacgttcttggagtagctatagctagctagatcccgtagcatgcatgatcgatcggttcagggtcacacactacgacaagcgtacgctgctttttgtttctcaccgccctccgtcccaagctttgtttcaggtttggagttttaatcgcataatatgtttaattagatttgtgtgtgtatttttttaattttcatcgtgtttcccccctattccagtagttgtcgtagctgctagctagatcgtaatgcacaaaaaaaatggtggagtacatgcatgcatgcatgcaagaagagcatgagttgcttccattatcatgactggctggcaactctgtggtgcaaccgccatggcgccatgatgaggaggtacaatgatatgcaacacccaataatatgggctttttgtcgcgaaaagc

SEQ ID NO: 210194 - DNA, 988 bp, Zea Mays
accgtgacccgtgcggagggacttgggctcgctggacaggtacgtgtgggcgttcgtgaacaacaggccgctgtcgccgagctacaagtacagccggaagatcccggcgaagacgtccaagtcggagtgcatcagcaaggacatggtccggcgcaggttccgcttcgtcggccccaccgtcgtccactccttcatgcaggcggtcggcctcaccaacgaccacctcgtctcgtgcccgcgccaccgcgcctgctccgccgccgccgttaactgattctgctgaccaccgtccaccgatcgagagccagacgtaaggaagaagagagacctttatatataaggacacgtacaatacaaccgagaaaaaagagaaaggtagtagcctctagtagcactagaagtagtacgtagtatacggaagggagagtgctggtttgcaattgtgtgtacgtacgagtacgatgatcgagtgtgcttgtgtagattgattacgcccccacccctaattagtcaatgaatgagcttgcttgctgcgacttccgcctgcacactgcagtgtgcagtcattgttcgcgtgaggcggttagctgcaggcgtgcgctctcctcctctcaacaagctaggctgcgcagatagtgatgtgatggatggggagatgatgatgatgatgattatagagagaagcccggccgtgtgggctacctgcatgtggccaagctctgattaaaagcgcgataacagcactctcacggcaggcaggcaggccatgtggtgtggtgtcgcaggcaaacgcatgtgcgacgaagacagagagggagagacggaaacgcagggagaagagcgggaaggaaagggggactagctaggaaaggcccgctttgccggccgcgcatgtgaccctgcagctcgcgtaccttttccaatcctcaaagtgggaggacggatcggaccccatgcactccacgctagtggtgtgtttggtttgtag

SEQ ID NO: 210195 - DNA, 1259 bp, Zea Mays
aaaaccccctgtatgtcgcgtatcacgacgaggagtggggagtgcccgtgcacgacgacgagttgctattcgagatgctcacactgtctggcgtgcaagtcggggccgactggacttccatcctcaagaaaagacacgtctacagggaggcgttctccggcttcaacgtggatgcggtcgccaagtacaccgagaagcagatggcgtcgctgagcgccgactacgggctggatttgggcaccgtcagaggaaccgtcaacaacgcctgccggattatcgaggtgcggagggacttgggctcgctggacaggtacgtgtgggcgttcgtgaacaacaggccgctgtcgccgagctacaagtacagccggaagatcccggcgaagacgtccaagtcggagtgcatcagcaaggacatggtccggcgcaggttccgcttcgtcggccccaccgtcgtccactccttcatgcaggcggtcggcctcaccaacgaccacctcgtctcgtgcccgcgccaccgcgcctgctccgccgccgccgttaactgattctgctgaccaccgtccaccgatcgagagccagacgtaaggaagaagagagacctttatatataaggacacgtacaatacaaccgagaaaaaagagaaaggtagtagcctctagtagcactagaagtagtacgtagtatacggaagggagagtgctggtttgcaattgtgtgtacgtacgagtacgatgatcgagtgtgcttgtgtagattgattacgcccccacccctaattagtcaatgaatgagcttgcttgctgcgacttccgcctgcacactgcagtgtgcagtcattgttcgcgtgaggcggttagctgcaggcgtgcgctctcctcctctcaacaagctaggctgcgcagatagtgatgtgatggatggggagatgatgatgatgatgattatagagagaagcccggccgtgtgggctacctgcatgtggccaagctctgattaaaagcgcgataacagcactctcacggcaggcaggcaggccatgtggtgtggtgtcgcaggcaaacgcatgtgcgacgaagacagagagggagagacggaaacgcagggagaagagcgggaaggaaagggggactagctaggaaaggcccgctttgccggccgcgcatgtgaccctgcagctcgcgtaccttttccaatcctcaaagtgggaggacggatcggaccccatgcactccacgctagtggtgtgtttggtttgtag

SEQ ID NO: 210196 - DNA, 2174 bp, Zea Mays
ccagaccagtctgaccctcccatagcttgccgagccccgtttagagaaacaagcgcacggacctgttagatacggcctgattttttaaccgtgatcttcactgagcccgtacactagtcctcatccggaaaaaagtatcaactcccaaactctcttcctttgccggcctcgtcgcgcgcccggctcgcctatatataaccgtctcgcctcccacctcattcatcaaacggactcacagctcgcagcacctgcaggacattgagaaccagccagctaaccaaccaaccaaccggcggagccaaagccaagaaggaaggcaacgtgcccatccagtcaggatgtgcaactccaacgtcaagtccgcgggggtggcccagatcgacggccgcccggtgctgcagccggcgggcaaccgcgtggcggcgccggagccggacgcctcccgcccgctcaagaagtccctccagaagtcgctctccatgccggtctactacgacagcaacgccaccgcgggcgcccgtcctgcgccggccgagaacaccacccgtgccgcggctaattcgtctccgctgcctcccgcgaaggcggcgacgaaggcagcgggcgctttccccgcggagaagagcggcaggtccaaggcggccaggaggccaggcgccgtgccgccgccggtggtggcgttcgcggcgctggaggcgttggagccggcggggagcatcgccgcggcgcagcgggagcacgccgcgcaggcgcaggcgcagcgcaagctgcggatcgcgcactacggccgcaccgcgtccttctcccgggtggaggggcgagtagtcggcgccgcggccgcggccgccgagcgggccgtccccgcctcccccaccgggcacgacgagaagcgctgcagcttcatcacgccctactcagaccccctgtatgtcgcgtatcacgacgaggagtggggagtgcccgtgcacgacgacgagttgctattcgagatgctcacactgtctggcgtgcaagtcggggccgactggacttccatcctcaagaaaagacacgtctacagggaggcgttctccggcttcaacgtggatgcggtcgccaagtacaccgagaagcagatggcgtcgctgagcgccgactacgggctggatttgggcaccgtcagaggaaccgtcaacaacgcctgccggattatcgaggtgcggagggacttgggctcgctggacaggtacgtgtgggcgttcgtgaacaacaggccgctgtcgccgagctacaagtacagccggaagatcccggcgaagacgtccaagtcggagtgcatcagcaaggacatggtccggcgcaggttccgcttcgtcggccccaccgtcgtccactccttcatgcaggcggtcggcctcaccaacgaccacctcgtctcgtgcccgcgccaccgcgcctgctccgccgccgccgttaactgattctgctgaccaccgtccaccgatcgagagccagacgtaaggaagaagagagacctttatatataaggacacgtacaatacaaccgagaaaaaagagaaaggtagtagcctctagtagcactagaagtagtacgtagtatacggaagggagagtgctggtttgcaattgtgtgtacgtacgagtacgatgatcgagtgtgcttgtgtagattgattacgcccccacccctaattagtcaatgaatgagcttgcttgctgcgacttccgcctgcacactgcagtgtgcagtcattgttcgcgtgaggcggttagctgcaggcgtgcgctctcctcctctcaacaagctaggctgcgcagatagtgatgtgatggatggggagatgatgatgatgatgattatagagagaagcccggccgtgtgggctacctgcatgtggccaagctctgattaaaagcgcgataacagcactctcacggcaggcaggcaggccatgtggtgtggtgtcgcaggcaaacgcatgtgcgacgaagacagagagggagagacggaaacgcagggagaagagcgggaaggaaagggggactagctaggaaaggcccgctttgccggccgcgcatgtgaccctgcagctcgcgtaccttttccaatcctcaaagtgggaggacggatcggaccccatgcactccacgctagtggtgtgtttggtttgtag

SEQ ID NO: 210197 - DNA, 3363 bp, Zea Mays
aagccgcgccacagctttactttgtttcaggtttggctgccaggtgctgaactgtaacatgcagtgccctattcccaggtttttggaccgacagcaaagcagaaggaattgtatgaccaggccattattcctattgtaaatgaggttttagagggatttaattgcaccatatttgcgtatggccagacaggcactggaaaaacatacaccatggaaggcgagtgcaggagagccaagagtggaccgaagggtcaattacctgcagacgctggagttatacctcgggcagtgaagcaaatctttgataccctggagaggcagaacaccgagtacagtgttaagatcacgttccttgagctgtacaatgaggaaattacagatcttcttgctcctgaagagatatctaaggctgcatttgaggataaacagaagaaagccttacctcttaatcttatggaggatgggaagggtggagttcttgttcgaggtctcgaggaagaaattgttacgaacgcgagtgaaatattctctctgttagaaagggggtctgcaaaacgccgcactgcagagacattactgaacaagcaatctaggtcaatctcagccagtcttcttttgaactataccgctacaacaaactttatgtgctcattactacttttaacattttagccggtcccactctctattctcaatcactattcacataaaagaggcaacccctgaaggagaagagctgataaaatgcgggaagttaaatctagttgacttggctgggtccgagaacatctctcgttctggagctaaggagggccgtgcaagggaggctggcgaaattaataaaagcttgcttactctgggtcgtgtgattacggcattggtcgaacaccttggacatgttccttacagggacagcaaactcacaagattgctgcgtgattcattaggaggaagaacaaagacttgtattatcgctactgtttcaccctctgtgcattgtctcgaagaaaccctgagtacattggattatgctcaccgggcaaagagcattaagaacaggcctgaggtaaatcagaaaatgatgaaatctacattaattaaagatctttatggtgaaattgaccgacttaaggcagaggtatacgctgctcgagaaaaagttggggtgtacattcccaaagacaggtatcagcaagaggaaaatgagcgaaaggcgatggctgatcagatagaacaaatgaatgcttctttggaagtaaaccataagctaattagtgatctgcaacaaaattatgattctgagcttcaacattctgctgatttgagcaaaaagcttgaagtcacagagaaatgtctggaccacacaagcaacctactctctacgacaaaagaagatcttaaacaggcacagtataatctaaatgagaaagattatataatttcagagcagaagaaagcagaaaatgctttaacacaccaaacgtatgtgctgagatcagatctggaacaatatactcgtgataatacttcactatattcaaagattgctaggggagacaagctaagtgcaacaaataggtcagtcgtgaatacattccaaactgaccttgcttcgaagttggatattctttccaatacactcaatgcatcaatagaccaacaaaatatgcatctaaaatctgtggaggacttatgccaatcttatgttgattcccatgacaaggctacttctgagctgaaaaagaagattttggcttcaaaatcattatacatgtcacatatggaagctttcctaaatgttgtcctcgtacataaagcaagtgcaaatggcacactagaagatatatcatcactgtctgctgcaagctgctgtagtcttgaccagctactagtttgtgttgagggagaggcacagaatatatttaatgacatccataatttgttaaccatccaccgaagcgaaatgacgcacttcactcaagaattaagggagagtttccaaataagcttggataggacaaaagaaatgtccacctatattattgggctctttgacaagtacgttgaggaaacctccaaattgcacagtcactcaaataatactcatgaagcacaaatgaaaagcattgaagactttcagatggtttatgaggtgagccattaaccctccttttgtttgctgcaaaatttggtagggtgtgtatcgcataccatctccttgtgcaggagcaatcaaaatcagtggagcagaagcttttagcggagataagcagtttagtatctaaacatattactcgacaaagagagttggtgggcgttagattgagctctctgggcgatgctgcccgtggaaataaggcatttttggatgaacacacatcggccatggagtttgtcacaaaagatgctaagaggaagtgggaaacgtttgcagagcaggctgaaaatgactgcaaagctggctccagcttttctgcagctaagcatagccgcatggaaaccatgcttcaggagtgcaatggaagaagtcacatgctgctgttaacgatctcagcagaaagcaagttgctgaagttgaagcactcgtcaggactgcaattgagaacaacgagcaacatgaactggaagttgcatcttctcgagctgtggctgaagaagacgcctccaataacagcaaggacatagctcagggcgttgaaaatctgttggaagaggcacggaattcaagttcaagagtggtctcaacggtggaggctcacttcggtgagctacagatgctgcaagagagccactcgagccaggctgccggtatcaacatgcacgccgacaaggctctccaaaccagttacaaggactacgaaccctcaggtgaaactccggtgaggtctgagccgaacgtgccaagcaaaggctcgattgaatcgctgcgagccatgcccgtggagaccatgatgaatgagttccgtgagaaccatccgtatgaacatgaatcgagcaaagaatctaagttatctcagatacctcgcttgccgctcgcgacaatcaactgagacattcacttccctatgtgcagtgtacttttattagtagggcgtcaatttgccggttttggtgtcccttgtgcacttgtgctaggttaaccatggggtgtgagctgccttggctctctccagtgcatttcccttttttcccgcattcaattatctgtaatgttctgttgtgccttgtacgatactgatattgtacagcatcagatatgtgccaaagctagcttgaattgcatgactcattacattggaatctgaatgttgcgttgcattgtgcaaataattgataaggttttgatataaggttgcattgcac

SEQ ID NO: 210198 - DNA, 1578 bp, Zea Mays
atgaatcccgtagtagcaattagcccaaaactggaccgaatcgtcagccgtgcgtgccagggaacactaacacgccatgaaaaaactggcagagctcatgctcatcctaggtggagctttgcgcgtgtgccatgtgttgctggtggtgctgccgccgctgcctggagtgcatccataacatcgtccctcccctcagccttcccttcctccgcttctccggcctagctctcccaggtggaggtggagcggcggcggcggcttctccacctgtagtctccatggcgtccatctcggtccccagccgggccccttctgcagccgaagacgccgagaacattaggaaagcagtgcaaggatggggcacggacgagaaggcgctgatcgagatactgggccaccggacggcggcgcagcgcgcagagatcgccgtggcctacgagggcctctacaacgaacccatcatcgacagactccactccgagctctccggcgacttccggagcgcgatgatgctgtggacggtggacccggcggcgcgtgacgccaagctcgcccacaaggccatgaagaagcagggcgagcggtacgtgtgggtgctgatcgaggtcgcctgcgcgtccgcgccggaccacctcgtcgccgtcaggaaggcctaccgcgaggcctactccgcctccctggaggaggacgtcgccgcgtgcccgctctacaaggacccgctcctcaagcagttcttggtgcggctcgtgagctcgtaccggtactccggcgagctcgtcgatgacgagctggcgagggcggaggccgcggagctgcacgacgcggtggtggcccggaagcagccgctgcacggcgacgtcgtgcgcgtcgtcagctcccggagcaaggcgcagctgaaggcgacgttcgagcggtacaggctggaccacggcaaggccgtcgacgaggtcctcgaggaacgccgcagcgaccagctcgcggcggtgctcaagacagcggtgtggtgcttgacgtccccggagaagcacttcgcggaggtcatccggagctccatcgtcgggcttggtacggacgaggagtccctgacgagggcgatcgtctcgcgcgccgagatcgacatgaagaaggtgaaggaggagtacagggccaggtaccgcacgacggtgaccagcgacgtcaacggagacacttccggatactacaatgtcatcttgctcactctggtcggccctgagtgaatgaccatggatggacgatggatcctcgtttttgtttgattgaacgaaacggcactagtgttgtttgttcacatatgtgtacagaactgctgagtgaaatggtgatatttgtggtgatccatttggtgaaaataaaacgccagatcgatgggaaaaccaattgtctgcctgagtacataggttagagaaattgtttgggactttagcttgcgtgaacaaaacgatactactggtgtcgtttgtagtttgctcgtttttgtttgttttggacaaaatgacactggtatcgtttgttcacacaatagtacagtgtgcgcgtcatgcgctcatgtgttgtatc

SEQ ID NO: 210199 - DNA, 1003 bp, Zea Mays
ggtggtggtggtggtggaggtggcgaaggcggaggccgaggcgctgggtgccgccgtgaagcgcgccgggaacgggaagctggtggagaacgacgaggtgctccgcatcctgaccaccaggagcaagccccacctcgtgcagacgttcatgtactacaaggagatgcacggcaggcacgtcgaggaggacctgcgccaacgcggggaggagaccctgctggagaccgtgctctgcctcgtcgcgccggccaagtacttcagccaggtgattgagggcgcgctgagggacagcgccgaccaccacgggaaggaggccctgacgagggtggcggtgacgcggtcggaccacgacatggacgacatcagagccgcctaccaccagcagttcggggccaagctggaggacgtcatcgcggccaaggcgcacggacactacagggacgcgctgctctccttggtgggcgccggcaattcatcagtctgaagcgctgctgcctgctcaggagtcgtcaggcccaataagatgtgcaagagtttctttattacgcactttcgcgaggaaaaaaagtcgcattttccactcgatgaggaaaggttgttgcttgttcttttgcttctcctatgcgtttcgtctatcattgactacaggattcccaataaacatttttaatttctactttggtctcaaacgtttttatgaatctattcctatatgcccatacacattattcttaggttgtgaacatgtttcagtttcgaggccgctcttggtgctcagtaacacaattggccttcactgagatcaattcagagctttgagaaatctcagacaacaatcgaggaggaaaagtttacctcagtagcaaggaggaagaaggcttatttttccctcgagttctatttcagaattctttcttaatgtctcaggagtcagaacactacgtggttcatgggtaggctctcaccctcacgaaattgaccataagttcccacaaatcactgt

SEQ ID NO: 210200 - DNA, 2897 bp, Zea Mays
ggctacagtcctacgtacagccatctggaccagagttctcaactactgccgccggccacctcctccgcccgccgccagcgtctccggctccgatcacctcccccgcccgcttacggccatctccccgcccacctacggccaccgccgcccgcgaaggcgtctccggatccggccacctcctccgcccagcgtgtttaccggacacgtctgccacccgtcaggccctgcccgacgctagggttgggcgacggcgtccaccggctgacgcccggggagatctcgcccgctctgctccatccaggtgcgaagtaatggaggtgctctgcatcggaacagcggataccaagtttgaggagctgcttttcctcgcggcgcaactccgctccgccctcgccgcctctggctccgactcgaaggttcaagtgagcatagtggatgtctccacaactgaaaagacaacggcaaatgatttcaaagacatcatatttatccctagaaatacaattctttcatgtcatttgggtgttgaccaacataatcttccagataacagaggtgaagcaattgcactcatgtcaaaggctcttcagagcttccttaaaaaaagatatgacagtggtatgctggtgggtgctgttggtttaggaggcagtggaggaactgcactaattgctcctgctctgaggttgttgccacttggagtgcctaagcttattgtatctactgttgccagtggtcacactacaccttatgttgaaacatctgatttggtcttgtttccttcggttgttgacatctgtggaataaacagtgtcagtcgtgttatattatctaatgctgcagcagcttttgctggaatggtacatggaatcttgtcggcgtccaatgagtctgatgaaacgtcaacaaagccaactgttggtattactatgtttggtgttacaacaccatgtgtaaatgcggtcaaggatagactgaacaaagaaggttatgagacccttatattccatgccacaggtgtaggaggcaaagcaatggaagacctagttaggggtggttttatacagggcgtgttggatgtaacaacaacagaagttgcagaccatattgtagggggcatcatggcttgtgatgagaccaggtttgatgcaattatagagaataagatccctcttgttcttagtgttggagccttggatatggtaaactttggagctcgagatacaattcctcttgctttcgcagaccgaaatattcatgttcataatgagcaggtttcattgatgcgtacgactgtggaagagaacaagaaatttgctaggttcattgctgataaaataaacaaatcttcatccaaagttactgtttgccttccccagaagggcatatctgcaatagatgctccaggaatgccattctatgatccagaagctacatctacactgttgggtgaattaaacacccttatacagagaaccgatattcgagaggtgaagctgtttccttaccacatcaatgaccctgaattcgcaaatgcattggtagatgcattcttgagtatggatgtacaggcctctagttcagcccaacctaagcaagatcttaatattggaaaatcctgttcaggacagaaaatttcagatagttctattatatggagaactcctgtggattttccagatgcaaaaccaggagaactgcccctcattgtattaagaagaaaagtaaccaggccacgagggtctaaagaaggcccgatacaaaagaccccttacgggcgccagaaacacgcatacaggaaggaatccatctaggaaatcagaaaaacccacacactgccagggaagtccctaggactcaactaagggggctgccagaaatattgcggaggacgcggtcaatattacataaactgaaggaacagatcagtgacggtactccagttattggagctggtgctggcacaggcatatctgcaaagttcgaagaagctggtggggttgatcttatagtgctgtacaactctggacggtttcgaatggctggaaggggctcactagctgggctcttgccctttggtgatgcaaatgacattgtacttcagatggccaacgaagtgttgcctgtggttaaaggagttcctgttcttgctggggtatgtgctacagatccatttcgtcgaatggaatactttctcagacaactagaaaccattggattttgcggtgtgcaaaacttcccaaccgtaggtctgtttgatgggaattttagacagaatttggaggaaactggaatggggtacagcatggaagtggagatgatttcaatggctcatcgcatgggtttccttactactccatatgctttcaatccggatgaagctgctgccatggccaaggcaggagctcatatcgtagttgcacatatgggtctgacaactgcagggtctatcggggcaatgacagctgccactttagatgatagtgttttacgtgttcaggccattgcggatgcggcatttggggttaatcctgatatcattgttctctgtcacggaggccccatatctggacccctagaagccgagttcgtattgaagaatactaaaagggttcatggattttacggtgcatcaagcatggaaagattaccagtagagcaagctatcacgaacaccatgagagagtacaaaagaatttccttaaaatgagaaccatcgtttacatgcgtgatttaagcctgctgttctttcgttacacttcgcagattctgtcatctctgcctctttatttgtcatatacattttcttaccaatgtacctttcttgttggaatataatcataataaatgttttctttgacgaggctgcgtaatgtcttaattattaccgtccattc

SEQ ID NO: 210201 - DNA, 2723 bp, Zea Mays
ccaaaagtcaatgaagtcgttgcgactggtgctgagtggtcgtgtccacctcaccgaatcaccgctcaaccgtcattcctacaggctacagtcctacgtacagccatctggaccagagttctcaactactgccgccggccacctcctccgcccgccgccagcgtctccggctccgatcacctcccccgcccgcttacggccatctccccgcccacctacggccaccgccgcccgcgaaggcgtctccggatccggccacctcctccgcccagcgtgtttaccggacacgtctgccacccgtcaggccctgcccgacgctagggttgggcgacggcgtccaccggctgacgcccggggagatctcgcccgctctgctccatccaggtgcgaagtaatggaggtgctctgcatcggaacagcggataccaagtttgaggagctgcttttcctcgcggcgcaactccgctccgccctcgccgcctctggctccgactcgaaggttcaagtgagcatagtggatgtctccacaactgaaaagacaacggcaaatgatttcaaagacatcatatttatccctagaaatacaattctttcatgtcatttgggtgttgaccaacataatcttccagataacagaggtgaagcaattgcactcatgtcaaaggctcttcagagcttccttaaaaaaagatatgacagtggtatgctggtgggtgctgttggtttaggaggcagtggaggaactgcactaattgctcctgctctgaggttgttgccacttggagtgcctaagcttattgtatctactgttgccagtggtcacactacaccttatgttgaaacatctgatttggtcttgtttccttcggttgttgacatctgtggaataaacagtgtcagtcgtgttatattatctaatgctgcagcagcttttgctggaatggtacatggaatcttgtcggcgtccaatgagtctgatgaaacgtcaacaaagccaactgttggtattactatgtttggtgttacaacaccatgtgtaaatgcggtcaaggatagactgaacaaagaaggttatgagacccttatattccatgccacaggtgtaggaggcaaagcaatggaagacctagttaggggtggttttatacagggcgtgttggatgtaacaacaacagaagttgcagaccatattgtagggggcatcatggcttgtgatgagaccaggtttgatgcaattatagagaataagatccctcttgttcttagtgttggagccttggatatggtttcattgatgcgtacgactgtggaagagaacaagaaatttgctaggttcattgctgataaaataaacaaatcttcatccaaagttactgtttgccttccccagaagggcatatctgcaatagatgctccaggaatgccattctatgatccagaagctacatctacactgttgggtgaattaaacacccttatacagagaaccgatattcgagaggtgaagctgtttccttaccacatcaatgaccctgaattcgcaaatgcattggtagatgcattcttgagtatggatgtacaggcctctagttcagcccaacctaagcaagatcttaatattggaaaatcctgttcaggacagaaaatttcagatagttctattatatggagaactcctgtggattttccagatgcaaaaccagaaatattgcggaggacgcggtcaatattacataaactgaaggaacagatcagtgacggtactccagttattggagctggtgctggcacaggcatatctgcaaagttcgaagaagctggtggggttgatcttatagtgctgtacaactctggacggtttcgaatggctggaaggggctcactagctgggctcttgccctttggtgatgcaaatgacattgtacttcagatggccaacgaagtgttgcctgtggttaaaggagttcctgttcttgctggggtatgtgctacagatccatttcgtcgaatggaatactttctcagacaactagaaaccattggattttgcggtgtgcaaaacttcccaaccgtaggtctgtttgatgggaattttagacagaatttggaggaaactggaatggggtacagcatggaagtggagatgatttcaatggctcatcgcatgggtttccttactactccatatgctttcaatccggatgaagctgctgccatggccaaggcaggagctcatatcgtagttgcacatatgggtctgacaactgcagggtctatcggggcaatgacagctgccactttagatgatagtgttttacgtgttcaggccattgcggatgcggcatttggggttaatcctgatatcattgttctctgtcacggaggccccatatctggacccctagaagccgagttcgtattgaagaatactaaaagggttcatggattttacggtgcatcaagcatggaaagattaccagtagagcaagctatcacgaacaccatgagagagtacaaaagaatttccttaaaatgagaaccatcgtttacatgcgtgatttaagcctgctgttctttcgttacacttcgcagattctgtcatctctgcctctttatttgtcatatacattttcttaccaatgtacctttcttgttggaatataatcataataaatgttttctttgacgaggctgcgtaatgtcttaattattaccgtccattc

SEQ ID NO: 210202 - DNA, 2630 bp, Zea Mays
attgtgttgctctttgctgcttatatggaatagctgtgctattatctaaaggtttgaggcatttattcatctggttttacagtatcctcggtagttcattatctatatttttgaggtttctgacaagtcttccggttttcatgatgattataactattttactgtggccagaatgccagatgattctacatgttcctgcttggcacttataaacttgctgttttaagctgtttctggctactcaattatggctgtggtcaaagttttcataggaactttggttccctccacctatcatttcaaaacgaaattaccgtttagattttcaaaagggcatcttatggctgcaagactattgtagaagacttcatgtggatctaaagcattgtggtatttaatgatattactgtttttgtacggttttcaaaaggccaaattaaggcttgcaaaactattgtaaaagacttcctgtgggtttaaagcactgagctatttaatcacaacggttttgtttcatatgtatggtttttaaagaggcgattgtgtggcttgcaaggctgctgcaaaagattgtggatttttactatgtttctgttttcacttttttttacaataaacctgctgctatgtttagacataatttgtactctgcactgacaagtgtcattttagttgccatacttatttgcaggcaatgcaggtctatttgttcaggaaatcaatagtgcttttcagtatatttctaaagaaagttggatatttcttctatttatatataaagtaatacttcctagtttgcaaataatgtgctttatgttgataaaatgttgaagttgagaacgtttgctactccctcagccccaacaatgtgctgttttaggttcgagatgagtccagtgttcttaaggccgcgcataggtgagcaagcaaacaggtcaaccgccttagctcctaggtgagcaaggcggcaagatttctccgagcgtctggacacgcctaggcaacgccttaaaaaccctggacgagtcaaactttctttaaatataagtttagtgtgaaaatatatttcataacgagtctaatgatatttatttggtatcataaatgtttgtaatttttcatatagatttgttcgaaattctttttgcgatagggggagtagttcaagtaaaatatttgtttatggtatataatggtattgaaggagaggctactaagtatctgtctatttttcgttgctacttgctagggccttttgttgctggaatgatcttggtagcttatctttctcgtatctgaccgtactattgattacatatgtggcagatgcacactgctgtatactatctgactctctacattatcggcaaagaaaacctctgttttgttatgaatctcattgctttttagatgtgaatgttcattgctcatttgacatactcctttgcatgggcacactagattatgatagtgccacttcttgaatcaaaagcttttgaattttttggtagaatttactcagataaactatctactgtgttgcccgagaactaatagtaatgtttctaaagctttgcgttttctttttatgaccaccaaaactattttgttcttattcctttattgataacttacagcaatttatgcttaggtatagattgtgacattgtcatgttgccatttcattgttgcgtgtattcttgaatggtatacataattgttactttctgtaatataatatctttggaatatgattcgacattgttatctgtccgggaaatcaatagtgcttttcagtgtattgtgaccacagtttaacccttgtttaaaagcagttaaagaaagagttctggtgctggttgatagaattcatggccctgaagtggcagattaccatggtgcatggacgacccaatatcactttatttccttgttttaatgtcacggcaggccggttgaggtctcaagtttgcctttgagacaggtaagtacgaaatgcatacattagcaggtccaagtgatgcaaatagcagcagaaagctctcgagcttgttcgcttatgccgaaaaagggtatctacttattttgtctgtataaattagtataaattacagctgcaagcctgcaacagtctgaacagctggcttatagccgcacgtcatctgtaagagcaagtttaataatagagcctattattggctctaacttcttaccgtgtcatatagagccagcaataaacacactcatgtagtaaaactggctttaagattgactcttagatgaatttcttgtctcttatctcttttatccttttgtcttgaaacctgtgtagcacctaactcttgcatgagagctcactacctctattttttgatgtctctcttccacgtaagcaaaaatgacatgtaattagacttgagtccattattgtacttgctctaatttgtgaattcgtgagatgggagagttgcagtgatgtgctgtctcttcgtctcacggtgttgcccgcaaggagagagtggcaaggtagtgctgagacgtgggagcctgcgccctgcttcggaggctgtgcttcagcttcaaacgggtacacggaccgtaatcaaatgatgtatatgttgaattaggaa

SEQ ID NO: 210203 - DNA, 5544 bp, Zea Mays
atgtaagcaggctaaatggtttgccacatcagatttttgccaagttggaggagagagaagagaagaaaaagaagaagtgtgctgctaattatcagtcgactaagagccggctgcagcacagtttccaaaacaagcggtccatttggaggcccaggataccacaatcaagaacgtgagaagcactttgaacatcttacacctaatatgagcaaaacacgaaatggatctgcattttctcaggatgaaattaactcacacagagagcattttcgtgtaagtttgataccaccagtttcttattgatgtcagttctttgtgctaaaggggctttctgttgtagaatgaactgaccccagattcagttgcttcaaagaagccaaaagtaaggaagaaagaaattaacaattctgtttcaacttctccccacagcattcctaataatcaagaagttattgctaccttctgtgaggcggtggaggatttctgtggaaaagctgaaattcctgacgatggtgatggtggtgactggttgtcaatcccacttgacgatgttaaggttcttgtgaatgaaattacatctgttcgatccaaaaggatattgcatgaggttcctatggatacagttacaaggttattagacgtgattgaccgtcagattcgatgttctcaaggtttgtcgatagatgtgaaggaaaattctgacgcctttgatgctgaacctctggttttctctgctttggagtccagtcatgctgcgttggcaattatgacccaccatgatatgccaaagcaactgtatcgggaagaacttattgagcgtattatcgatttctcaaggcatcagatcacagattgtatggcagcaagtaacccaacctttcgagctctctacaaaccagctggaaatgttgcaaatgatggagatgatgatgaaggtgatttggaaaatggacaagttagcaaaaggagacgtactgctactaatttgagcatgagaaaatcttcaaacagagtttctgcttctgtttattctgctgtgcagaaactatgcttgatattgggttttcttaaggaactgctcacaacagtgcgcttgtcagatagttgtattctgcaattagcgaaaacatgctttactacattcttggtggataatatgcagctattacaattgaaagcgattggggttatttgcacggtgttttcatcatacacacagcacaggagttacttggttgatgaaacacttcaccttcttcgtaagttgcagttttccaagaatgccgttagaacctaccatctagcagatgaagaccaaaagcaaatccagatgataacagcactgttagttcacttggttcagtttagtgctattgttcctgatagcttaaagggaacagttgattggaccactatcgttgatgcctctagtgatgctgattattatccaattcaatgccatgaagcggcaacagaggcttgttgtcgtttttggactgatgtccttcaacgttttactgctgctaaatctcaagatatgtcggaaaccaaagggataatagacaatcttgttcaggatttcctaacgatactaaacttgccggagtatccagctgctgcttctattcttgaggttctctgcgtgttgctgcttcagaatgctggattgaaatctaaggacattaatgctcggtgctttgctattgatcttcttggtggtattgcatcaagattaaagcgtgattctgtcgtctgtagtgaagaaaagctttggatattgcaagatttcactgataaaggcagtgacggctcaatttttttgaaaaacaagtgttgcgtttgtcttggtggaagaggcataaatatagcctgtaatgaatgtggaagatgtttccattcagattgtatgggggctggtagtcaggataacttacagcgtgatagtgtctgccccttgtgtttttgcaaacaacagctcaatgtgctacagtcgtactgccagtcacaaattaaagaaaatggcaaaaaaactgctgcctctgccagtaagaaatctgctaaaccaactgaggtgtcagcagtggaaattgttcaacaaatactactgagttatctccaagaagctggttcacaagatgatgggaacctgtttactcgatggttctatctgtgcatctggaacaaagatgaccaacattctcaggagaagatcatttactatcttgctagattaaaatccaaggagattctgcgagattctggcaatggtctggcaatttccagagattcagcaaagaaaatttgcttggcacttggtcagaagaactcattttgtaggggttttgataaaattcttgcccttcttttggctagtttgagagaaaattctcctgtaataagagcaaaagcattacgtgcggtcagctgtatagttgaagctgatcctgaggtcttgggtgacaaacgtgtccaatatgctgttgaagggagattttgtgattcagctatttctgttcgtgaagctgcccttgaacttgttgggaggcatattgcttcacatcctgatgtgggcctgaagtatatagaaaaagttgctgagcggataaaggacactggagtcagcgttcgcaagcgtgcaatcaaaattataagggatctttgtgcttcaaatccgaacacggacacaactcatgcctttgtggagataatttctcgtgttaatgatgaggagtccagtgtacaggatcttgtatgtaaaacattttatgaactatggtttgaagaaccaactgggagtcataagcacttggttgctgatggaagttcagttccaatggagatagctaaaaagactgagcaaattgttgacatgttgaggaagatgcccaatcaccaacccctgattaccatcataaaacgtaacttgactcttgatttcctccctcagtcaaccaaggctgcagggattaactcatccatggtggcatcaattcggaagcgttgtgaattgatatgcaaacgcttattagaaagaatattgcaggttgaggagggagctgctaatgagatggaaatccacacactaccttatattgttgccttgcaagcattctgtattgttgatcccacactctgcattccagtaactgatccttctaagtttgttgtgacactgcaaccataccttaatattcaggttgacaataaatcatctgcccagttgcttgaaagtattatttttgtgattgatgctgttcttccactcataaggaagccaccacaaaatgttgttgaagaacttgagaaggatctgaaacatatgatagttcgccattcgtatttgacagttgtacatgcctgtatcaagtgcctttgtgctctgagcaagtcagcaggtagaggtccaggattagtggaaaaccttgttaatattttctacaagcatctgtgtggagctaattcagatagtcagctgttgggtcgatcactgttttgtcttggactcctccttcggtatggttatcaattgatgctaacatctgaaaatcagcttgattttcccaagatcatcaacttgctccagagaaaatatcttctcaaggatgatttcagcttgaaggttcgagctttgcagactttgggatacatacttattgcgaagcctgaatttatgctacaaaaggatatgttgaatctcatagagacagcactctcttctgaggttgattatagattcaagattcaaggacttcaaaacctctacgagtatcttagagatgctgaaagccaacttactgctgagagtactgcgaaacctcctgggcagtgtgaaataaatggcagaagtgaagtgcctgttgctgctggtgctggagacaccaacatatgtggtggtattatccaattgtattggagttctattcttgaaaggtgcttggatacaaatgatcaagttcgccagagtgcacttaagattgttgaagttgtacttcgtcagggtttagtccaccctattacctgtgtacctcaccttatagcacttgaaatggacccgctggaggggaattcgaagttggctcatcatctcttgatgaatatgaatgaaaagtacccttcattttttgaaagtcgcttgggtgatggactgcaattgtcatttaaattctttgaatccatagtcagcaaccataagatgtccgcaaacataaaatcaaatccaattgcatttgtcaaacctggcatatctagaatataccgtcttatccgttcaaatcgaaattctagaaacaaatttgtccactcgatagttcggaaattcgagtctgatagccggagtcgcagcacagttagctttcttgtatactgtgctgaagttctcgcctctctgcctttcacatgctctgatgaaccactttacttgatctatgatataaatcgagctattcaccttagagctggaggagtcgagggcaatttgaaaaggtggacttctatgtctcagtctcaagagatggcgggtatgccaaccttgccaggagagagtcatgttgtcatgcaagaagagcctggcggatattatgataacatgggagatgccactgaaagggtgaatgacaatccttgcagtacttcagatgtggacattgccaaagttcagggagattgccatgatgcaatagccctccagctacttctgaaattgaagagacatttgaaagttgtttatggtttagatgatgcccgctgtcaggcattttccctgaaggagcccccgaaatctggagaaacattctccaggcagaatgtttcttttaatattggcaacactaacctcagtctgccgagctgcctgcaggacgcagcctctgtttaccaggatttcaagacagtgcttcgcgaagattccatggactttgctgtgttcgtcccttcagtccagactaggaagcgcccaaccccaagaaatacaacgagcccaaccccaagaagtatgacgagagtcaggagaacggctgccccgagtgttacaaaagcccgtggtggtgcacgtggcgacgattccgacgataccgatgacgacgactggaccgggggtccaagagtgctagacttcagtgggggcggccgcgtgacaaggcagagggtccaagtatgatgtttcttttttgcgtgcgtgcgtgtgtacattatagggaagggaaacctatagcaggcttagcagctgacacgagagagttaggggttgaattttaggtttcaggtcgtttattttagggtacatagaagcagaaaggaaaggaagatagccttttacttagatgtcattaatttggagcactccttttcttgctctgcccctgtcctgtttgtaatttccgtggggcttcggcaaaaaactgacaaaataggttgtgctccggtttctgatctctgattcaatgggaaatggaattattccttttgctttgcctgtgtaagcagttagcgcctactccgtctgttccaatatacaatttgttttagcattttatttttgtgtctata

SEQ ID NO: 210204 - DNA, 5448 bp, Zea Mays
aagagcaagtataataggatgatgtaagcaggctaaatggtttgccacatcagatttttgccaagttggaggagagagaagagaagaaaaagaagaagtgtgctgctaattatcagtcgactaagagccggctgcagcacagtttccaaaacaagcggtccatttggaggcccaggataccacaatcaagaacgtgagaagcactttgaacatcttacacctaatatgagcaaaacacgaaatggatctgcattttctcaggatgaaattaactcacacagagagcattttcgtaatgaactgaccccagattcagttgcttcaaagaagccaaaagtaaggaagaaagaaattaacaattctgtttcaacttctccccacagcattcctaataatcaagaagttattgctaccttctgtgaggcggtggaggatttctgtggaaaagctgaaattcctgacgatggtgatggtggtgactggttgtcaatcccacttgacgatgttaaggttcttgtgaatgaaattacatctgttcgatccaaaaggatattgcatgaggttcctatggatacagttacaaggttattagacgtgattgaccgtcagattcgatgttctcaaggtttgtcgatagatgtgaaggaaaattcatgctgcgttggcaattatgacccaccatgatatgccaaagcaactgtatcgggaagaacttattgagcgtattatcgatttctcaaggcatcagatcacagattgtatggcagcaagtaacccaacctttcgagctctctacaaaccagctggaaatgttgcaaatgatggagatgatgatgaaggtgatttggaaaatggacaagttagcaaaaggagacgtactgctactaatttgagcatgagaaaatcttcaaacagagtttctgcttctgtttattctgctgtgcagaaactatgcttgatattgggttttcttaaggaactgctcacaacagtgcgcttgtcagatagttgtattctgcaattagcgaaaacatgctttactacattcttggtggataatatgcagctattacaattgaaagcgattggggttatttgcacggtgttttcatcatacacacagcacaggagttacttggttgatgaaacacttcaccttcttcgtaagttgcagttttccaagaatgccgttagaacctaccatctagcagatgaagaccaaaagcaaatccagatgataacagcactgttagttcacttggttcagtttagtgctattgttcctgatagcttaaagggaacagttgattggaccactatcgttgatgcctctagtgatgctgattattatccaattcaatgccatgaagcggcaacagaggcttgttgtcgtttttggactgatgtccttcaacgttttactgctgctaaatctcaagatatgtcggaaaccaaagggataatagacaatcttgttcaggatttcctaacgatactaaacttgccggagtatccagctgctgcttctattcttgaggttctctgcgtgttgctgcttcagaatgctggattgaaatctaaggacattaatgctcggtgctttgctattgatcttcttggtggtattgcatcaagattaaagcgtgattctgtcgtctgtagtgaagaaaagctttggatattgcaagatttcactgataaaggcagtgacggctcaatttttttgaaaaacaagtgttgcgtttgtcttggtggaagaggcataaatatagcctgtaatgaatgtggaagatgtttccattcagattgtatgggggctggtagtcaggataacttacagcgtgatagtgtctgccccttgtgtttttgcaaacaacagctcaatgtgctacagtcgtactgccagtcacaaattaaagaaaatggcaaaaaaactgctgcctctgccagtaagaaatctgctaaaccaactgaggtgtcagcagtggaaattgttcaacaaatactactgagttatctccaagaagctggttcacaagatgatgggaacctgtttactcgatggttctatctgtgcatctggaacaaagatgaccaacattctcaggagaagatcatttactatcttgctagattaaaatccaaggagattctgcgagattctggcaatggtctggcaatttccagagattcagcaaagaaaatttgcttggcacttggtcagaagaactcattttgtaggggttttgataaaattcttgcccttcttttggctagtttgagagaaaattctcctgtaataagagcaaaagcattacgtgcggtcagctgtatagttgaagctgatcctgaggtcttgggtgacaaacgtgtccaatatgctgttgaagggagattttgtgattcagctatttctgttcgtgaagctgcccttgaacttgttgggaggcatattgcttcacatcctgatgtgggcctgaagtatatagaaaaagttgctgagcggataaaggacactggagtcagcgttcgcaagcgtgcaatcaaaattataagggatctttgtgcttcaaatccgaacacggacacaactcatgcctttgtggagataatttctcgtgttaatgatgaggagtccagtgtacaggatcttgtatgtaaaacattttatgaactatggtttgaagaaccaactgggagtcataagcacttggttgctgatggaagttcagttccaatggagatagctaaaaagactgagcaaattgttgacatgttgaggaagatgcccaatcaccaacccctgattaccatcataaaacgtaacttgactcttgatttcctccctcagtcaaccaaggctgcagggattaactcatccatggtggcatcaattcggaagcgttgtgaattgatatgcaaacgcttattagaaagaatattgcaggttgaggagggagctgctaatgagatggaaatccacacactaccttatattgttgccttgcaagcattctgtattgttgatcccacactctgcattccagtaactgatccttctaagtttgttgtgacactgcaaccataccttaatattcaggttgacaataaatcatctgcccagttgcttgaaagtattatttttgtgattgatgctgttcttccactcataaggaagccaccacaaaatgttgttgaagaacttgagaaggatctgaaacatatgatagttcgccattcgtatttgacagttgtacatgcctgtatcaagtgcctttgtgctctgagcaagtcagcaggtagaggtccaggattagtggaaaaccttgttaatattttctacaagcatctgtgtggagctaattcagatagtcagctgttgggtcgatcactgttttgtcttggactcctccttcggtatggttatcaattgatgctaacatctgaaaatcagcttgattttcccaagatcatcaacttgctccagagaaaatatcttctcaaggatgatttcagcttgaaggttcgagctttgcagactttgggatacatacttattgcgaagcctgaatttatgctacaaaaggatatgttgaatctcatagagacagcactctcttctgaggttgattatagattcaagattcaaggacttcaaaacctctacgagtatcttagagatgctgaaagccaacttactgctgagagtactgcgaaacctcctgggcagtgtgaaataaatggcagaagtgaagtgcctgttgctgctggtgctggagacaccaacatatgtggtggtattatccaattgtattggagttctattcttgaaaggtgcttggatacaaatgatcaagttcgccagagtgcacttaagattgttgaagttgtacttcgtcagggtttagtccaccctattacctgtgtacctcaccttatagcacttgaaatggacccgctggaggggaattcgaagttggctcatcatctcttgatgaatatgaatgaaaagtacccttcattttttgaaagtcgcttgggtgatggactgcaattgtcatttaaattctttgaatccatagtcagcaaccataagatgtccgcaaacataaaatcaaatccaattgcatttgtcaaacctggcatatctagaatataccgtcttatccgttcaaatcgaaattctagaaacaaatttgtccactcgatagttcggaaattcgagtctgatagccggagtcgcagcacagttagctttcttgtatactgtgctgaagttctcgcctctctgcctttcacatgctctgatgaaccactttacttgatctatgatataaatcgagctattcaccttagagctggaggagtcgagggcaatttgaaaaggtggacttctatgtctcagtctcaagagatggcgggtatgccaaccttgccaggagagagtcatgttgtcatgcaagaagagcctggcggatattatgataacatgggagatgccactgaaagggtgaatgacaatccttgcagtacttcagatgtggacattgccaaagttcagggagattgccatgatgcaatagccctccagctacttctgaaattgaagagacatttgaaagttgtttatggtttagatgatgcccgctgtcaggcattttccctgaaggagcccccgaaatctggagaaacattctccaggcagaatgtttcttttaatattggcaacactaacctcagtctgccgagctgcctgcaggacgcagcctctgtttaccaggatttcaagacagtgcttcgcgaagattccatggactttgctgtgttcgtcccttcagtccagactaggaagcgcccaaccccaagaaatacaacgagcccaaccccaagaagtatgacgagagtcaggagaacggctgccccgagtgttacaaaagcccgtggtggtgcacgtggcgacgattccgacgataccgatgacgacgactggaccgggggtccaagagtgctagacttcagtgggggcggccgcgtgacaaggcagagggtccaagtatgatgtttcttttttgcgtgcgtgcgtgtgtacattatagggaagggaaacctatagcaggcttagcagctgacacgagagagttaggggttgaattttaggtttcaggtcgtttattttagggtacatagaagcagaaaggaaaggaagatagccttttacttagatgtcattaatttggagcactccttttcttgctctgcccctgtcctgtttgtaatttccgtggggcttcggcaaaaaactgacaaaataggttgtgctccggtttctgatctctgattcaatgggaaatggaattattccttttgctttgcctgtgtaagcagttagcgcctactccgtctgttccaatatacaatttgttttagcattttatttttgtgtctata

SEQ ID NO: 210205 - DNA, 5957 bp, Zea Mays
tgactatacgcagtagtagataaatactactactgaatttgtcccccatttgttatagtctcaccacctctccacccttcgaaattgaaatcaaatcaaagcagcccaccaccctcgattcattcaccaccacctctccacactttgaaatcaactcaatcaaagcagcccctcctccagtcctccccaacaatcgaattccggtgcgaattggagccctcagccctcccgcgcatctagggttttgcccatggaccccgacgccggcggggctggggccgggggccgggcgggcttcgagcgggcgtgccggctgcccaacaccgtccactccgaggtcctgccgtcgctgccgctccccaccctcccgcgcgagctcggcttcgacgcgctccgcgacgacgagcccctcgccgcgcccgaccgccccgacatgatcatgcaggccgccaacatcgcccgcatcctcgccgacaccgacgtctcccacctgggcttcaccgcggcggacaacgtcgaagtggatcccagccggtgctcctggctctggagggaggtgctcaagcacaaccccgacgccttcaaggtcaaggcgcccgggccgtcttctcaagttttcaggtccatttggaggcccaggataccacaatcaagaacgtgagaagcactttgaacatcttacacctaatatgagcaaaacacgaaatggatctgcattttctcaggatgaaattaactcacacagagagcattttcgtaatgaactgaccccagattcagttgcttcaaagaagccaaaagtaaggaagaaagaaattaacaattctgtttcaacttctccccacagcattcctaataatcaagaagttattgctaccttctgtgaggcggtggaggatttctgtggaaaagctgaaattcctgacgatggtgatggtggtgactggttgtcaatcccacttgacgatgttaaggttcttgtgaatgaaattacatctgttcgatccaaaaggatattgcatgaggttcctatggatacagttacaaggttattagacgtgattgaccgtcagattcgatgttctcaaggtttgtcgatagatgtgaaggaaaattctgacgcctttgatgctgaacctctggttttctctgctttggagtccagtcatgctgcgttggcaattatgacccaccatgatatgccaaagcaactgtatcgggaagaacttattgagcgtattatcgatttctcaaggcatcagatcacagattgtatggcagcaagtaacccaacctttcgagctctctacaaaccagctggaaatgttgcaaatgatggagatgatgatgaaggtgatttggaaaatggacaagttagcaaaaggagacgtactgctactaatttgagcatgagaaaatcttcaaacagagtttctgcttctgtttattctgctgtgcagaaactatgcttgatattgggttttcttaaggaactgctcacaacagtgcgcttgtcagatagttgtattctgcaattagcgaaaacatgctttactacattcttggtggataatatgcagctattacaattgaaagcgattggggttatttgcacggtgttttcatcatacacacagcacaggagttacttggttgatgaaacacttcaccttcttcgtaagttgcagttttccaagaatgccgttagaacctaccatctagcagatgaagaccaaaagcaaatccagatgataacagcactgttagttcacttggttcagtttagtgctattgttcctgatagcttaaagggaacagttgattggaccactatcgttgatgcctctagtgatgctgattattatccaattcaatgccatgaagcggcaacagaggcttgttgtcgtttttggactgatgtccttcaacgttttactgctgctaaatctcaagatatgtcggaaaccaaagggataatagacaatcttgttcaggatttcctaacgatactaaacttgccggagtatccagctgctgcttctattcttgaggttctctgcgtgttgctgcttcagaatgctggattgaaatctaaggacattaatgctcggtgctttgctattgatcttcttggtggtattgcatcaagattaaagcgtgattctgtcgtctgtagtgaagaaaagctttggatattgcaagatttcactgataaaggcagtgacggctcaatttttttgaaaaacaagtgttgcgtttgtcttggtggaagaggcataaatatagcctgtaatgaatgtggaagatgtttccattcagattgtatgggggctggtagtcaggataacttacagcgtgatagtgtctgccccttgtgtttttgcaaacaacagctcaatgtgctacagtcgtactgccagtcacaaattaaagaaaatggcaaaaaaactgctgcctctgccagtaagaaatctgctaaaccaactgaggtgtcagcagtggaaattgttcaacaaatactactgagttatctccaagaagctggttcacaagatgatgggaacctgtttactcgatggttctatctgtgcatctggaacaaagatgaccaacattctcaggagaagatcatttactatcttgctagattaaaatccaaggagattctgcgagattctggcaatggtctggcaatttccagagattcagcaaagaaaatttgcttggcacttggtcagaagaactcattttgtaggggttttgataaaattcttgcccttcttttggctagtttgagagaaaattctcctgtaataagagcaaaagcattacgtgcgctgtatagttgaagctgatcctgaggtcttgggtgacaaacgtgtccaatatgctgttgaagggagattttgtgattcagctatttctgttcgtgaagctgcccttgaacttgttgggaggcatattgcttcacatcctgatgtgggcctgaagtatatagaaaaagttgctgagcggataaaggacactggagtcagcgttcgcaagcgtgcaatcaaaattataagggatctttgtgcttcaaatccgaacacggacacaactcatgcctttgtggagataatttctcgtgttaatgatgaggagtccagtgtacaggatcttgtatgtaaaacattttatgaactatggtttgaagaaccaactgggagtcataagcacttggttgctgatggaagttcagttccaatggagatagctaaaaagactgagcaaattgttgacatgttgaggaagatgcccaatcaccaacccctgattaccatcataaaacgtaacttgactcttgatttcctccctcagtcaaccaaggctgcagggattaactcatccatggtggcatcaattcggaagcgttgtgaattgatatgcaaacgcttattagaaagaatattgcaggttgaggagggagctgctaatgagatggaaatccacacactaccttatattgttgccttgcaagcattctgtattgttgatcccacactctgcattccagtaactgatccttctaagtttgttgtgacactgcaaccataccttaatattcaggttgacaataaatcatctgcccagttgcttgaaagtattatttttgtgattgatgctgttcttccactcataaggaagccaccacaaaatgttgttgaagaacttgagaaggatctgaaacatatgatagttcgccattcgtatttgacagttgtacatgcctgtatcaagtgcctttgtgctctgagcaagtcagcaggtagaggtccaggattagtggaaaaccttgttaatattttctacaagcatctgtgtggagctaattcagatagtcagctgttgggtcgatcactgttttgtcttggactcctccttcggtatggttatcaattgatgctaacatctgaaaatcagcttgattttcccaagatcatcaacttgctccagagaaaatatcttctcaaggatgatttcagcttgaaggttcgagctttgcagactttgggatacatacttattgcgaagcctgaatttatgctacaaaaggatatgttgaatctcatagagacagcactctcttctgaggttgattatagattcaagattcaaggacttcaaaacctctacgagtatcttagagatgctgaaagccaacttactgctgagagtactgcgaaacctcctgggcagtgtgaaataaatggcagaagtgaagtgcctgttgctgctggtgctggagacaccaacatatgtggtggtattatccaattgtattggagttctattcttgaaaggtgcttggatacaaatgatcaagttcgccagagtgcacttaagattgttgaagttgtacttcgtcagggtttagtccaccctattacctgtgtacctcaccttatagcacttgaaatggacccgctggaggggaattcgaagttggctcatcatctcttgatgaatatgaatgaaaagtacccttcattttttgaaagtcgcttgggtgatggactgcaattgtcatttaaattctttgaatccatagtcagcaaccataagatgtccgcaaacataaaatcaaatccaattgcatttgtcaaacctggcatatctagaatataccgtcttatccgttcaaatcgaaattctagaaacaaatttgtccactcgatagttcggaaattcgagtctgatagccggagtcgcagcacagttagctttcttgtatactgtgctgaagttctcgcctctctgcctttcacatgctctgatgaaccactttacttgatctatgatataaatcgagctattcaccttagagctggaggagtcgagggcaatttgaaaaggtggacttctatgtctcagtctcaagagatggcgggtatgccaaccttgccaggagagagtcatgttgtcatgcaagaagagcctggcggatattatgataacatgggagatgccactgaaagggtgaatgacaatccttgcagtacttcagatgtggacattgccaaagttcagggagattgccatgatgcaatagccctccagctacttctgaaattgaagagacatttgaaagttgtttatggtttagatgatgcccgctgtcaggcattttccctgaaggagcccccgaaatctggagaaacattctccaggcagaatgtttcttttaatattggcaacactaacctcagtctgccgagctgcctgcaggacgcagcctctgtttaccaggatttcaagacagtgcttcgcgaagattccatggactttgctgtgttcgtcccttcagtccagactaggaagcgcccaaccccaagaaatacaacgagcccaaccccaagaagtatgacgagagtcaggagaacggctgccccgagtgttacaaaagcccgtggtggtgcacgtggcgacgattccgacgataccgatgacgacgactggaccgggggtccaagagtgctagacttcagtgggggcggccgcgtgacaaggcagagggtccaagtatgatgtttcttttttgcgtgcgtgcgtgtgtacattatagggaagggaaacctatagcaggcttagcagctgacacgagagagttaggggttgaattttaggtttcaggtcgtttattttagggtacatagaagcagaaaggaaaggaagatagccttttacttagatgtcattaatttggagcactccttttcttgctctgcccctgtcctgtttgtaatttccgtggggcttcggcaaaaaactgacaaaataggttgtgctccggtttctgatctctgattcaatgggaaatggaattattccttttgctttgcctgtgtaagcagttagcgcctactccgtctgttccaatatacaatttgttttagcattttatttttgtgtctata

SEQ ID NO: 210206 - DNA, 1156 bp, Zea Mays
atgttttttggcctgctgctataaatctcgtgcccaaataagaacctttgtttgctgcaaactacccaagcccaagccaccgaccaagtgggagctgtttgcaaaggcgaaaggaattaccaagcgcaagaagaacaagcgtgagtgggacgagcaaactcaatcctggaagcggacttatggctatgaccgtgtaaatgatgataaagacgttccgattcttgaagccaaactgactgacgagcctggtgttgatccctttgcacagagaagggatgagaagaagaagagggttgaaaagcaagaaaaaagcagattagagaatttaaagaaagctgcaaagtcatatacagcttgctgcgaaggccttgcccatcacaggaactaaagctgaccttccaaaaaaatctagaaaagaggatcttgagagtgttgttggcatggcttcgtcagcaacagcaagcggtgggaagtttgacgagaagttgcctggcgagaaacctccaaagcaccctggcaaacatagaaagttcctcccagttgctgaggggaagggaatgggcagcctggagaaacagcagaatgacaaaatcctgagctctctacttgccagaaactctgatgaaccgcttgatgtcagcaaggcaattacaatgtacaaggtgaaaaaggaaaagcagagaaggaaagagaaaaatatgccatcaaaatctgataagcttaagccccagaagaaaccccacaagaaatcatcgaagaaaagggcttaggtccacgtctttcagttgaccacagttttgaaagctgaagcaaggaggcctgtcacatattggattgtatttgtgagctttgaatctctgggagaaatattgttattccgtctaatggttatgatacaaaaacctgaatgctttgccatggtatgcgcccatcttgtacttttcaaattatgtttgggatgtggtttgtagcttggtaagagtccctccctttggttctgaaacctgttcaaaggagctgtcctggaaacagtaccaatgaagctactgtctagtgtcgatggtactgatttgttgttggcctctgagtttactctacgatgtggtgtgagattatacattttaaatctttcctccgataccttgtcaagctgtca

SEQ ID NO: 210207 - DNA, 1549 bp, Zea Mays
cgcttcacatgtcacttgggccagcggccagtcagccccaagtaaaaccctaattcctttctccagtcgcagcctcgatttctttccctttccctttcccttccccagtcagccgcgagcctcgtaccggcgcagccatggcggaggagcccgccatcgtcgtcgccgcctcctccagctgcgaggtcgacctcggcaacctcatggcgtacgacccgtgtcaccacgtcgcagccgccgcctccgcctccagaatgcgtggtcttgctggggcgaaaaaactcagggaggagctgaggcaggagtgcctgcggaaggggacggagctggcgcaggcggtggccgacgccctcttcgcgctgccgcccaccgaggaccgcgacggccccatcgtccacctcccgccacacaccgttcgactcccgcgcgagaagcatctacccaagcccaagccaccgaccaagtgggagctgtttgcaaaggcgaaaggaattaccaagcgcaagaagaacaagcgtgagtgggacgagcaaactcaatcctggaagcggacttatggctatgaccgtgtaaatgatgataaagacgttccgattcttgaagccaaactgactgacgagcctggtgttgatccctttgcacagagaagggatgagaagaagaagagggttgaaaagcaagaaaaaagcagattagagaatttaaagaaagctgcaaaggttggtgctttgccaagtcatatacagcttgctgcgaaggccttgcccatcacaggaactaaagctgaccttccaaaaaaatctagaaaagaggatcttgagagtgttgttggcatggcttcgtcagcaacagcaagcggtgggaagtttgacgagaagttgcctggcgagaaacctccaaagcaccctggcaaacatagaaagttcctcccagttgctgaggggaagggaatgggcagcctggagaaacagcagaatgacaaaatcctgagctctctacttgccagaaactctgatgaaccgcttgatgtcagcaaggcaattacaatgtacaaggtgaaaaaggaaaagcagagaaggaaagagaaaaatatgccatcaaaatctgataagcttaagccccagaagaaaccccacaagaaatcatcgaagaaaagggcttaggtccacgtctttcagttgaccacagttttgaaagctgaagcaaggaggcctgtcacatattggattgtatttgtgagctttgaatctctgggagaaatattgttattccgtctaatggttatgatacaaaaacctgaatgctttgccatggtatgcgcccatcttgtacttttcaaattatgtttgggatgtggtttgtagcttggtaagagtccctccctttggttctgaaacctgttcaaaggagctgtcctggaaacagtaccaatgaagctactgtctagtgtcgatggtactgatttgttgttggcctctgagtttactctacgatgtggtgtgagattatacattttaaatctttcctccgataccttgtcaagctgtca

SEQ ID NO: 210208 - DNA, 1386 bp, Zea Mays
aagagtttcagttttcttacatggctcttttgcatgcatcagttgctatggaaagaaaacttgtagtcgagtgggttccttcctgcgatctggaagattcttcagctaaagagacccctgaagcccataaaaaagcatggaaattgctgaagggtgcagatggtgtactcgttcctggaggattcggagataggggagtccagggcaaaattcttgccgcaaaatatgcacgcgagaacaatgttccttatcttggcatttgcttgggaatgcaaattgcagtgattgagtttgcccgttcggtgatgaaactacgaggtgccaatagcacggaattcgatccagctacaacatcaccctgtgtcatcttcatgccagagggctcaaaaacccagatgggagctacaatgaggcttggatcgaggagaacctatttccatgtcagtggctgcaaatctgcaaagctgtatgccaatgccagctctgtagatgaaagacatcgccacagatacgaggtgaaccctgatatggtcccagacttcgagagggccgggcttcaattcgtgggcaaagatgaaagtggaaaacgcatgggggtaggcttggaaattttctcagatgttgtagacttagatgtactttctaggaacttaataagaaacgttcacaatcacctggtggtgttctgttggatgcagatcattgagcttccctctcacaagttcttcatcggtgcacaattccatcctgaattcaagtcgagaccaggaaaaccatctccgcttttcttagggctgatagccgcggcatctggacagctagagcctttgcttcaacgcagcaatccgacaacaaaagcatgtcctatgagtaaagtcccgaaactgaaactgtacccaactggacctgtgaataatccactgaacagcttggtaaatgggtactacccaaatggcactggcatccacacctagaagcataatgcttagcgatggtctatttgatgtttgttcctatggttttgcttgtacccctttttatgtttgtttttcagtttgtatttgtctctgatcaactgggaaggctaagattcagcaagccccagctccagcaacacatggttccgacattttaacgaggaacgtcctccggtccgttggagcaaactagctatagagtggtgaggtctagtgtgatttttttgagccctggaattaagcgcgggaagtgttttggtagcgttagtagagcctggaatctcaactatttgtacattatggaagaacttatctaaggactgaatacacaaatgcttggccatgatttgctttgttgccacaatattaacaaccacaatcagatgtagaaaaaaaaacctctaacaaa

SEQ ID NO: 210209 - DNA, 796 bp, Zea Mays
aaaatattggtcgaaacatgccacttgataagttattcactatcttttctggctctattttcttcctttttgcaaggcaaggtcattctggagtctgcaattctgacaacagtggtcgtgctcagccttaccgcatacactttctgggccgtgaataggggcaaagacttcagcttcctgggtcctttcctgttcgccgccatcatagtgctgcttgtgttcgcactcatccagatcctgttcccactgggcaagctctcccagatgatctacggcgggctggcgtcgctcatcttcagcgggtacatcgtctacgacacaaacaacatcatcaagcgctacacgtacgaccagtacgtctgggccgcagtctcactgtacctggacgttatcaacctcttcctgtccctgatgaccctcttcagggcagccgactaggcgctctgctctcatcctgtctatctacgagtcggtgcctgaatgctcccgtggttaagctccggtacccagaattccagttccaagaatagagttgtatatagctacccgcgttgcctttctactagtatggtcttattcggcttgactcggttcggtcagagtcttgatacgtagttggatcgcgaacaaatgaaccttgcatgggagtatggagagccgtctgctttatgatcctcatttgcctgcccaccacgttgtatcagctgaaagctgaaaacaacatgtgggctgttgtctgccaagaatagaattgtgaaccactggagaaccgtataaaacgggccacctaccgcct

SEQ ID NO: 210210 - DNA, 1255 bp, Zea Mays
ccagcatcatatctattcatcttgctctcctctgtccaaaaaggaggcgccgcgctcctcttcttctacgccgttcactctctctagtctctcccttcccttctccacgcctccgcccccactcgtgagaccctacctagccctagcgccagcaccacccgcccaacctcccggagagagagaggaggaggccttcgccgccgccgttaccgtcggccgaggcgccagaatgttcgggtaccagaagggcctcgacgtcgaggcggggacatcgggcgccgccgccacgggcggcgcgcgccagctctacccggggatgcaggagagccccgagctgcgctgggcgctcatccgcaagatctacgtcattctctccctccagctgctcctcaccgccgtcgtcgccgcagtcgtcgtcaagtgctgtgcccgctgtacttctaccacgagaagcacccagtcaacctgatcctgctcggcctcttcaccgttgccatcagctttgctgtgggcatgacatgtgccttcaccagtggcaaggtcattctggagtctgcaattctgacaacagtggtcgtgctcagccttaccgcatacactttctgggccgtgaataggggcaaagacttcagcttcctgggtcctttcctgttcgccgccatcatagtgctgcttgtgttcgcactcatccagatcctgttcccactgggcaagctctcccagatgatctacggcgggctggcgtcgctcatcttcagcgggtacatcgtctacgacacaaacaacatcatcaagcgctacacgtacgaccagtacgtctgggccgcagtctcactgtacctggacgttatcaacctcttcctgtccctgatgaccctcttcagggcagccgactaggcgctctgctctcatcctgtctatctacgagtcggtgcctgaatgctcccgtggttaagctccggtacccagaattccagttccaagaatagagttgtatatagctacccgcgttgcctttctactagtatggtcttattcggcttgactcggttcggtcagagtcttgatacgtagttggatcgcgaacaaatgaaccttgcatgggagtatggagagccgtctgctttatgatcctcatttgcctgcccaccacgttgtatcagctgaaagctgaaaacaacatgtgggctgttgtctgccaagaatagaattgtgaaccactggagaaccgtataaaacgggccacctaccgcct

SEQ ID NO: 210211 - DNA, 1792 bp, Zea Mays
cccttcccttcccataatattagctagggtgcggcggcatctccgtcgactacctggccgcggtggcatccttccccaaccccgacgataagatccgcagcctcgccctcaaggtgcaggggggcggcaacactggcaacgcgctcactgcagctgcacgcctcggcctccgtcccaggatcatttccaaggtagccaacgatgctcaaggaagaagcatcctcagcgaactccaaactgatggcgtggacacatcctacatcctggtcgcagagaacgggaactcacccttcacctacataatagttgatgaacagacgaaaactcgtacatgtatacacactcctggttctcctcccatggtgccagaagagctcacaaaggcaaacttgtcgtccgctttagatggcgtggacatcgtctacttcgatgtacgattgcatgacattgctttgcttgttgctgaagaggcaagtcaaagaaaaatccctattttgattgatgccgaaagaaagagggagggactggacgagcttctcaactttgcatcttacgttgtatgctctgcaaagtttcctcaggcttggacaggagcctcatcaatacctgttgctttagtatccatgctttcaaggttaccaaacatcaaatttgttattgtaactctgggggagaaaggttgcttgatgcttgagagaagcagtacagatgcttctgaggcaggggaaatagatgcagaggctttattcgaatcactagagaagagcattgatcagagttctactataccaaaatgtgttgcttccaaggtatgatgccttataatgcacatgggctgggtgtatttttttccacacataggtatattcctctatcaacttgaactatatgtacagatataatcgcactgtaggagctgcaatacacgtttttttttgtttgaaaattaaaattgaaatatggagcagcacacacatcaaaatctctgcttctagactaacacatttttttggagtatagcagcggcaatatgtatgatattcatggctcatgctcgcaattttgaatattatttttctaacccatttctttaagcttctgtttgttttcagtcaaacttgagaataagcgcggatggagtaagctcgataagtggcaggttacttctaggtacggccgaagttataccacctggtgaactcgtagatacaactggcgctggagatgcattcattggagcagttctatatggtttatgcaccagcatgccaccggagaggatgctaccttttgctgcacgagtggctggttgtggttgcagaggtctgggggctcgaaccagccttccccatcgcgcagacccacgcctggctggctattgatccgaattcagaagggctgcatcctccatgaccacctgcctgcaccccgtccaatggttgtgaatattccagtcccgatcagatcaaataagtcatcaactattagcagcacatgaagactatcattgtgatagctattattttgcgatgattatgcaactatatggttccaacttgctagctccaggcataccaggcctgtgcaccttttacgggtgtagaaagttatacaaattccgattgtcacgaggtgtggtgtgccctaatcaaagctaaaggtgaaattatcaaaacgatacaaaatcgattgtaaagaggtcttgaagtttaagacccattaaattttctatcaataaatgtagtctaatgtatctatcattcacacaaatcttcttttgcgacccatgtcg

SEQ ID NO: 210212 - DNA, 1492 bp, Zea Mays
actcccttcccttcccataatattagctagggtgcggcggcatctccgtcgactacctggccgcggtggcatccttccccaaccccgacgataagatccgcagcctcgccctcaaggtgcaggggggcggcaacactggcaacgcgctcactgcagctgcacgcctcggcctccgtcccaggatcatttccaaggtagccaacgatgctcaaggaagaagcatcctcagcgaactccaaactgatggcgtggacacatcctacatcctggtcgcagagaacgggaactcacccttcacctacataatagttgatgaacagacgaaaactcgtacatgtatacacactcctggttctcctcccatggtgccagaagagctcacaaaggcaaacttgtcgtccgctttagatggcgtggacatcgtctacttcgatgtacgattgcatgacattgctttgcttgttgctgaagaggcaagtcaaagaaaaatccctattttgattgatgccgaaagaaagagggagggactggacgagcttctcaactttgcatcttacgttgtatgctctgcaaagtttcctcaggcttggacaggagcctcatcaatacctgttgctttagtatccatgctttcaaggttaccaaacatcaaatttgttattgtaactctgggggagaaaggttgcttgatgcttgagagaagcagtacagatgcttctgaggcaggggaaatagatgcagaggctttattcgaatcactagagaagagcattgatcagagttctactataccaaaatgtgttgcttccaagtcaaacttgagaataagcgcggatggagtaagctcgataagtggcaggttacttctaggtacggccgaagttataccacctggtgaactcgtagatacaactggcgctggagatgcattcattggagcagttctatatggtttatgcaccagcatgccaccggagaggatgctaccttttgctgcacgagtggctggttgtggttgcagaggtctgggggctcgaaccagccttccccatcgcgcagacccacgcctggctggctattgatccgaattcagaagggctgcatcctccatgaccacctgcctgcaccccgtccaatggttgtgaatattccagtcccgatcagatcaaataagtcatcaactattagcagcacatgaagactatcattgtgatagctattattttgcgatgattatgcaactatatggttccaacttgctagctccaggcataccaggcctgtgcaccttttacgggtgtagaaagttatacaaattccgattgtcacgaggtgtggtgtgccctaatcaaagctaaaggtgaaattatcaaaacgatacaaaatcgattgtaaagaggtcttgaagtttaagacccattaaattttctatcaataaatgtagtctaatgtatctatcattcacacaaatcttcttttgcgacccatgtcg

SEQ ID NO: 210213 - DNA, 2662 bp, Zea Mays
caccgtctcgcaaatcccagggtgcaacctgcaaaatcatcccctctctggctcccggaaacagaggtcttttttactctagcccactagcggccgctcctccgcctcccgttgtcccctccatcagtcccctcgtccttctcccctctccacacggcgtcgcggctcccctcattcgccggcgtcgacgatgaacggaggcagccggcggcagcggtactcctcagagcagctcctcttcgacgtccccgccaatgccggtgccggccggtgggcgcagcagcgtggcggggtgcgtcgcggggacggggagatcttcgtgtcggtggagcccgcgacgccggcgcggctgtgcggaggggacgccgcggccggggactcgccgggacagaggcagcagctcagtcccgggttgctcgacctccatgcgttcgacaccgagcttattcccgattttcaagtaccaggaatctatgatggtgcccaaaagtttggctatggaggaggtctagatgaatctgatatgagattcacatcaaacaagatgatgagcaagtctactatttttcctgatggtaactatctgaaggccttcactgagaaagaaaaggcagcacctgtcgcgaaaatcaaagtggtggtgcgcaaaagaccacttaacaaaaaggaagtatcaaagaaggaagaagatattgtagacattgaacaaagatcaaactctttgactgtccatgaaactaaacttaaggttgaccttactgaatacgtcgaaaagcatgagtttgtattcgatgctgtcttagatgaagatgtttcaaatgatgaggtttatcgtgaaacagtggagcctgtagttcctgcaatttttaatcgaactaaggcaacttgttttgcttatggacaaaccggcttcccaagatgtcttgaggttaatgcaccatacctatcgaaaccagggatttcagttgtatgttagcttctttgagatatatggtggcaaattatttgaccttctcaacgataggagcaaactttgcatgagagaggatggaaagcaaaaggtttgtattgttggtttgcaagagtatagagtgtccgatatagagactatcaaggagttgattgaaaaaggcagtgctaccagaagtactggcacaaccggtgcaaatgaagagtcctcaaggtctcatgccattcttcagcttgccattaaacgccgtgtggatggcaatgactcgaaaccacccagaccagtcggcaagttgtcatttattgaccttgctggcagcgagcgtggtgctgatacaactgacaatgataaacaaacaagaatcgagggtgctgagatcaataaaagtttgcttgccctaaaggaatgcattagagcgcttgataatgatcagactcacatacctttccgaggtagcaaattaactgaagtgctgcgtgactcattcattggagactcacgcactgtcatgatatcctgcatttctcctagttctggctcttgcgagcatactctgaacacattgagatatgctgacagagtgaagagtttgtcaaaaggaagcaacgccaagaaagacgtgtctttggcagtgcctttaagagagtcgaactcttccccactgccttcagttgtaccctcattctctgcatctgaggtgatgaacgatatcaccgggagaagcaatttcggttggcccaagcagcagtatgttaaagaacagcctgctccaacatttgttgaacgaatgcccaaggcaaaggatgcggtggagttcacatcatcaaatatagctgaagtaccagatataatgtaccagctgggaaggcagccatcaaggaaagatgtcactttggcgaacaatatgagaaattccgttgcttacccaactagaagggttgaaccagatgatgatgatgagcatctaaataatcttctccaggaagaggaagaattggttagtgctcataggaagcaggttgaggagactctggacatcctgaaagaggaaatgaacatattaggcgacgcggatcagcctggcttccaactcgatgactacatcacaagactaagcagtatgctctcgcagaaggcggctgtgatcgtggacctacaggctcgtctggagcagtttcagaggcttttgaacgagaacaatgtgctgctatatgctcagagcccttgaccgtagctccgtcggattcatctgttgccctgttgccaccggaaaaggtgggcactggtgatgagtctcgggcggcaacctgtgcgttgttgctgtggccatggtgctgctactgtaatccgtcggtgccagtgaaacgcggaactagatggctagttcacagcatgttgccatgcttctttggcatggccggcccggcaacctattttgtactagagttgctgcatccttgtgttcctgcgccccatccaatgtgtatatctcatatttgtccgtgtcacatgaatgctctgttatttgtagctcaacagatacgtttttctccccctttctgaattctgatgtatgaagttttccagagtgtatggtatcatcccgttatacacagcttttcttggatctttattagaaggaattctatgccacaagggattgttcagcttggtaaatatcgttgctatccg

SEQ ID NO: 210214 - DNA, 964 bp, Zea Mays
acccaactgccactacccatgcttgctttttaagctctcctcctggcgctgcctctcggcgccatcgttccctcctctgcaccccccatcctcggacatcctcgcctgcagcagaccctcctctggtgcgcgtgcgccaccggcgagatgtcgaagaaaatcgtggtgaagctgcacctgcaggacaacaaggacaagcagaaggccatgaaggctgtctcggcgctcaccggcccaaccgtgtcccctgctggttgtacgtggtgtgcaggcatcgacgagatatccgcggacatggcgtcgcacaagatgacggtggtcggcatggtggaccccgtgagcgtggtgagcaagctgcgcaaggcgtcgtggtcggcgaccatcgagtccgtcggcccggccaaggagccggagaagaaggacggggaggcagccaagaaggacggcggcgagggggagaagaaggaaggcggcgagggggagaagaaggaagcaggcgagggggagaataagaaggaagcaggcggcgagaaagacaaggacggcaagaaggcggcgccgccgacggagcagcaggtccagctggccgagctgttgaaccagtattaccgggcctcctcctactacccgtacccgcccgtggccacgcactaccacgtccagagcatggaggaggaccccaactcctgcaccgtctgctaaggcgactcatggcatggagaatgatctacgaaggtgaagaaggtagtgttgaaccagcatgcagtttctttttttttttttcacttctagatcgcgttctggctgctcatggaggatacgcagcgtgtctgtatgtacagtacatatagaataacacgtacgtacgtgtggcggtatatgtgtaaatgggacttcgctttctgggataaccagagctgtatgtagctaatacagttttggattttatacgagtactattgat

SEQ ID NO: 210215 - DNA, 4152 bp, Zea Mays
atgtggcagcgtgatgcgccgcaagaagcttccacgaagcttcatggccgctaccgcctcgagaacaagtccccattcccgaccgcaaaagcgggccgagccgaggaagaagagaacaaaacgaaacccgaagctttttcccccattcttcgctggatatacaggaggattttcagagtcagggaggtgagggagagagggcgaggcaactgtgtgtgtgtgtgtgtgtgtgagcaggcccgccgagaagaaccttcgcgacgccgaggggtcggtcgcgcgcgggcgctcgtcggtcggtcggtcggtcggtgtcgtctctcctgcgaaggtgcccctggctgctgctgccggggtggtctgatcgggcatggcgcaggggagttcgccgccgccgccggagatccgctcgccggacgagcgggccgcggcggaggaccccgccgaggcggaggcgggggaggtggtcttcgacgacgcgttcgacataccccataagaacgctccgcacgaccggttgcgccggtggaggcaagctgctcttgttcttaatgcttcacgacgttttagatatactcttgaccttaaaaaggaggaagagaaagagattataaggaggaagatccggtcccatgcgcaagttatacgggcagcatttcttttcaaagaagctgggcaaaaagatatcagagaagcttatactggtataaatcttgcaacggcctctcgcagttttccaattgaactggaaaagcttaacacattaaacagggaccatgacagtgttcttcttcaagaaattggaggagttaagggattgtcagatttgttgaagagtaatttagagaagggagttagtccaaatgaggatgaattattacaaaggaagaatgtatatggatcaaatacatatccacgcaagaagagaaaaaacatactgcgttttgtatttgaagcttgccaagatttaactcttgtcattctgatgatagctgctgccatatcactaacattgggtatgactacagagggtgttgatgaaggatggtatgatggcggaagtatctttttagccgtttttcttgtgatacttgttactgcaacaagtgattataggcaatctctacagtttcgacatctgaatgaggagaaacagaacatacaagtggaggttgttagaggtggtaaaagatttggagcttcaatctttgaccttgttgttggtgatgtagttcctctcaaaattggtgatcaagttcctgctgatggtgtcctgatatctggccattctcttgcaatagatgaatcaagtatgactggagagtcaaaagttgtccacaaggatcaaaaggcaccattcttgatgtctggttgcaaggttgcagatggctatggttctatgttggtaacaggggtgggtacaaatactgaatggggtcagttgatggctaacctttcagaagataatggtgaagaaacaccattacaggttattctctgtaaggatagtgcaaattctcgaatggacaattactgaaggctctctttggtttatgctttgaccctttttaggttcgcttgaatggtgttgcaacttttattggtttggtgggcttgtctgttgctggtgcagtacttgttgtgctttggataaggtattttactggacataccgaaaatcctgatgggacacctcaatttgttgctggaactactggtgtgaagcaaggatttatgggggcaattagaattttgactatcgctgtgaccattgtagttgttgctgtgcctgagggactcccattggcagtaacactgacgcttgcatattccatgaaaaagatgatgcgagacaaagctctggtgaggcggctctcgtcatgtgaaacaatgggatcagctactacaatatgcagtgataagacaggaacccttacattgaataagatgacagtcgtggaagcatattttgctggaacaaagttggatccatgtgatgatgttagccagatgtcagacagtgcagcgtcacttattattgaaggaattgcgcagaacacaacaggaactgtatttctgccagaggatgggggagcagctgaacttactggttcgcctactgaaaaggccattctttcttggggccttaagatagggatggatttcgacgatgtgaggacaaaatcttcagttattcatgtttttccatttaactcggagaagaaacgtggcgctgttgcagtacagttagatgatggtgttcacatccactggaaaggtgcagctgaaatagtgttatcatcttgcaaaagctggctttccgtcgatggctctgttcagtcaatgagtgctgagaagcacgatgaattcaagagatcaatcgaagacatgggagcgaattcattacgctgtgttgcttttgcatactgttcctttgacattgaaaagatcccaatggaagacataacaagctgggagttgcctgaggatgacctgactctgcttggcatcataggaataaaggacccctgtcgcccaggtgtaagggatgctgtacgcctgtgcactactgctggtgttaaggtgcgcatggttacaggagataatattgaaacagctaaagctatagctctggagtgtggaatactagatgcaaatagtgttatttcagagccagttgtaatcgagggaaaagtgttccgtgagatgtctgaaagtgcaagaggagaggccgccgacaagataattgtgatggggagatcctcgccaaatgataaacttttgcttgtccaagctttaaaacgaaaaggccatgttgtagctgttactggtgatggcacaaatgatgcccctgcattgcacgaggccgatataggtctttcaatgggcatttccgggacagaagttgctaaagaaagctctgacattataatcttggatgatgacttcacgtcagttgtcaaggttgttcgttggggacgatctgtctacgctaatatccagaaattcattcagttccagctcaccgtcaatgttgctgcacttgtcattaatgtggttgctgctgtgtcctctggtgatgtgcccctaaatgctgttgagcttctgtgggtgaacctcataatggacacacttggagctcttgcattagcaaccgagcctccaacagacaaccttatgaagagaaatcctgttggtcgaagggaacctcttgttacaaatatcatgtggagaaacttgtttgttcaggccctttaccaagtagcaattcttctgattttcgattttgatggagtaaggattctgcgtctgcagaatgaaagccgatctgatgctgagaagataacaaatactttcatcttcaacacatttgtattttgccagatcttcaatgagttcaatgcacgaaaacccgaggaaaagaatgtcttcaaaggggtcacgaagaatcacctgttcatgggaataatcggtataacgacagtatttcagatactgataattcagttcctggggaagttcttcaaaatagtgaggcttggttggagactatggttggtttcagttgctatcggccttgtgagttggcccctggcttatgtgggtaaatttattcctgtgcccgtaagacctcttccggactatttcaaaccccgctgttgttggaaaccgccgcgccgagacgaggaggaaggtgggcagagctaaagcgcaacgagtgggcagtgtaaataggcacgtgataaaaaaatggagataaattgcactggttgattccatggtagcagcatcctggggatgtacgcataagatggcaggtagtcggcctcgtcgttttcttctaggagaagcagtcggaagaaaagaagtactatacagaagccaaacttgtctacccctatccagctggtgtgtctgctatgcggcagcgaaacttgagtcattagattgtagcctgaatgaaagcagcgctagcttgcgatgtagcagtacctttttttccctggcgatatcatctgactgtaaatttgtaaatgctttcggactacgagttgttcttatttttcatccacctcttctctacggaacgtttttttctatataagaaaataaagtcaacagagcagttctaaaacgactgttttttttttc

SEQ ID NO: 210216 - DNA, 2607 bp, Zea Mays
aaacaagcaagcaaagaagataaaccatccccgaaggccgtttttaatagagagcagcaaggagagcgagcgcaccaacggggatctgagcatccgaccggccgcttgctagggtttcgtccgtccgcctccctgccacagcaccactccgcatctccagccctagcctcgctcagcccgggatcccgcgggggccatggcggctgaagcgccaccgtcggcgtcggcgtcggcgtcctcctcctcggctccgcggccgcctaccgcggccgcctccgcccccggcggcggcggcggcggggcgcccgcgtccgcggagtcgtacctcgggagcctcatcagcctgacatcgaagagcgagatcaggtacgagggcgtcctctacgacatcaacaccgaggagtccagcatcggcctgcgcaatgtgcggtcctttggaaccgaaggtcggaagaaagacggagtgcagattcctgctagcgacaaagtttacgagtatatcctcttccggggaactgatatcaaggatttgcaagttaagtcatcaccaccacagccgccaccaccacaagcagcttccctgcacaatgatcctgccataatacagtcacattattctcaacctgcatcaacgtcatcaagtttgccttcagctgggggtgcagttttaccagactttagctcccaggcagttcaatatgggcttcagaggccaacctttcagagtaaccttcctctctaccaaccagggaatactccgtggggctcttcagtggcacctccagcaggaaatgctccatggggctcttcagtggcgcctccagcaggaaatgcttcaacactttcagttccctcaatgtactggcaagggtactatgcaccttcaagtgggctgccgcatcatttgcagccacctcctttgcttcatccaacaccaggattgtcggttccccagaatctccaatatccaggactaaatccttctttgcaatctgggccgcaaaagctgtcagaactccaaccctcattgatgccacctattactagtcaaggtccttcatcaggtatcctgcctgctacaacagctcctgcttctgctacattattagctccagaaagctcaaagcctctgttgccgaacatgggatcgttgtttgctccacgtgcaacatctcttggtgcaacttttcctttaccaagccagccaactgccgtcgctgaaactagtgcaacagtgtcacagaacttaacttcatttggtagcagcaaggttcctgctcttccaggctcaacactggcataccaaaccgtatctcagtctgtttcttctactattgccccatctagctcagcccaagcggagatgcctgtgcctttgctggcaccatcaggtcaactattgcagaacacatcatccatcctttcatcatcgcattccatgcaggcaccattacagctggctagcaaagaagtcaagccaattgagcctaaggctaaggttgcagaaccgttactacctgaccctttgctaccagatccaccatcacgggctatgcctgaaattaaggagcctatattaccattgccgaaacagacgcctcagaagtacaatggatctggttcacgcaaccaccacaactttaggggccgtggaaggggtagagggagtgcgttttcacagtctgtaacagcattcactgaagaatttgatttcacggccatgaatgagaagtttaacaaagatgaagtatggggccatcttggtaagaaatcccagtcaagggacaaggatggtgaggtgggagatgatgtgtttgatgaagaactggaggctgaggaaactgacaacccagagctagctgttaagcctgtttatgtcaaggacgacttctttgattccctctctagtggaacgtttggacgtggagggccaaatggaaggggaagaccttctgaacggcgcagagtagacacagaggctatggaaacacggggaggggtggccctgggaattcttatcctcactggggcaatgggagagattgattatagcagcagcagccatacttgcgggtgttgtagtcttttgccacatgcatgaagcgcatccattactattaaacaaataaatggaaccttaccaccatgtcactcgtcggtgtgccttgtccagacaaggcctgtagcgtttggtcattgatgtggtgcacccctgccctgtaggagagttaccagtagatgagcagatgagatgatgcttgataggtataagcttgtggcccttgatgtgcataccttgcacttgagatttagttgtataggccggtctcaatgcaggcatgcaacgtcggctctagctcagtaaccttttcctttcacaaagtttagccgtgttgtctgttttgtattggtgatagtgtaactttgaaaaatttactgcttattgtacgttgtttgggttgaggatgagtgggatggaatggctctattctagtcttttaggatgggattcgagtctggtgtttggttggaggggaggacttgtcccagtttctgtatttgaatggagggacgatgagaaggaatttatgttgtttgtgactggtt

SEQ ID NO: 210217 - DNA, 1601 bp, Zea Mays
agagagcagcaaggagagcgagcgcaccaacggggatctgagcatccgaccggccgcttgctagggtttcgtccgtccgcctccctgccacagcaccactccgcatctccagccctagcctcgctcagcccgggatcccgcgggggccatggcggctgaagcgccaccgtcggcgtcggcgtcggcgtcctcctcctcggctccgcggccgcctaccgcggccgcctccgcccccggcggcggcggcggcggggcgcccgcgtccgcggagtcgtacctcgggagcctcatcagcctgacatcgaagagcgagatcaggtacgagggcgtcctctacgacatcaacaccgaggagtccagcatcggcctgcgcaatgtgcggtcctttggaaccgaaggtcggaagaaagacggagtgcagattcctgctagcgacaaagtttacgagtatatcctcttccggggaactgatatcaaggatttgcaagttaagtcatcaccaccacagccgccaccaccacaagcagcttccctgcacaatgatcctgccataatacagtcacattattctcaacctgcatcaacgtcatcaagtttgccttcagctgggggtgcagttttaccagactttagctcccaggcagttcaatatgggcttcagaggccaacctttcagagtaaccttcctctctaccaaccagggaatactccgtggggctcttcagtggcacctccagcaggaaatgctccatggggctcttcagtggcgcctccagcaggaaatgcttcaacactttcagttccctcaatgtactggcaagggtactatgcaccttcaagtgggctgccgcatcatttgcagccacctcctttgcttcatccaacaccaggattgtcggttccccagaatctccaatatccaggactaaatccttctttgcaatctgggccgcaaaagctgtcagaactccaaccctcattgatgccacctattactagtcaaggtccttcatcaggtatcctgcctgctacaacagctcctgcttctgctacattattagctccagaaagctcaaagcctctgttgccgaacatgggatcgttgtttgctccacgtgcaacatctcttggtgcaacttttcctttaccaagccagccaactgccgtcgctgaaactagtgcaacagtgtcacagaacttaacttcatttggtagcagcaaggttcctgctcttccaggctcaacactggcataccaaaccgtatctcagtctgtttcttctactattgccccatctagctcagcccaagcggagatgcctgtgcctttgctggcaccatcaggtcaactattgcagaacacatcatccatcctttcatcatcgcattccatgcaggcaccattacagctggctagcaaagaagtcaagccaattgagcctaaggctaaggttgcagaaccgttactacctgaccctttgctaccagatccaccatcacgggctatgcctgaaattaaggagcctatattaccattgccgaaacagacgcctcagaagaaagttcttgcttatctgcctcacgccctcactttgatttcag

SEQ ID NO: 210218 - DNA, 4636 bp, Zea Mays
ggaggcacagcagctcggcgggcgccggccgagaggcggcggcagcgggggcggaggaggagcaggaggagggggagggcgaggaggatggcgctcttccgcaagttcttcctcaagaagaccccggatcggctgctcgagatctccgaccgcgtctacgtgttcgactgctgcttctcgactgattccatgggtgaggatgagtaccgggattacttgagcggcattgttgcgcagttgcaggaattttttccggacgcatcatttatggtatccaatttttggtctggggacaaaagaagccgaatttcagacatattatctgagtatgacatgacagtaatggactacccacaacagtatgaagggtgtccattgcttcagcttgagatgatccaccatttcttgaaatcatgtgaaaattggctatcggtggaaggtcagcataatatgcttttgatgcattgtgagagagggggttggccagttcttgcattcatgttggctggactgcttttgtatcgcaaaacatacactggtgagcagaagacactagaaatggtctataagcaggctcgaagggactttatacaacagttttttcccttgaatcctcagccttcacatttgagatatttgcactatataacaagacaaggaggtggttcagaatggcctcctattagcagacccctcatcttggattcagtagttctccatgttgttccacggtttgacgtagatggtggttgtaggccatatttgcgtgtgcatgggcaagactcaagccccggtaacaagagtgcaaaagtcctttatgagatgccaaaaacaagcaagcatcttccacattatggacaggcagaagtccctataaaactaagtgtgttttgccgtgtttatggagatgtggtccttgaattcatccatattggcgataatatagagcataaggaaacaatgttccgcatcatgttcaacactgcattcgttcaatcaaacatccttgcgctgaatcgtgatgatattgatgttgcttggaatgtgaataatcagttcccaagggacttccgggctgaggtacatttttcggaccctgattcattcaaacctgctgctaccgtcgaggagatagctgatgatggagatgagactgatgttgcttcggtagacacaggagaggagttttatgaagcagaggaggattggcatgatgctagaaaagaccaagaaactcgatcaactgatggtggaatatcattagatgacgttgcagatggtggggtggcaactgaagaaaggagcagcctagaaaagcaccaattcaatgagggtgtgaagattggtgtctcccagaatttaggtagcatgaatgagaaaggggcaagtgcacctaccccaacttttgacaaccaggaaggtttgcagcagcctcgtgaagttcttgcaaatggtaaactaagcagcactaatggccaagagaacagtgatgtgcatgatatacaggtggttgctacatctgttgattcagagggacacaagtttggatctacctgtcaggaggacatgaaaggtgtaattgcacaaactttagtcaccacagttgatccaagttgcagtgatgaaattgaatgccaggctaatgaacaaacaaaaatatcggaataccctgatttggactacactgcttttggttctcctagaagtttgtcacgtacaaatggtgatacccacttgagaactacaaaaaatgaagggttgcagaacggtgatatcaagattatcactgagaacacaataagtatggacaacgatctagtgatctatgaagagaaaactatagttgtcaatggtaacactgtacaggaagtaaagaatattgtcaatgaaaagagcattgcagccaagatagacaaaccaattattgagagtaggaactcactgaacaacaacaatggcaagattcaaatcgctaaaccttctgatacatctaatggcaaattggatgggtgtagattagaatcttgccttgaggaagccctacctacaaagaaaaccactgtccatgacaggattgttgtcttaccagccactgatgtaggaactgagataaaaaccaagcaagaggggcttggtgacaagcaggattttggtatagttcttcctcaaagtcgaacagtagccagggctaggagtccaaggcttgaaagtgatgaccgagggcaaatccctgataaagctgtgtcatcagtattgaagaagatggcagtaggcaatgcaaagatggaagagcaaccaaagcttgccaaaccaaaaacaatacgtagatggatctcaccaaagaaggaatctgatgctacctctgtgcataggccatctcaccctccatctagatacgacagttcaccagctgcactggctattcgatccatgcctacagatgttaagatcagtgcagtaaatgatgcacctttattatcattgaaacaaccatatggctgcaactttacacgagaagtaacatctgcactgtctgcttcatcgcctccacaacaatccttgttaccaggtgcacaaattgcatcaagaaaccagtgtttcagagtttgatatatcagaacttgagagcctttttcctgcagctgttccgaagtccgatgacagctcaaaatctgaacgtagaaaatcacttggatcaaaaccagaaaaagtgcacctaattgagttgaggagggcgaataacacagagatcatgctaacaaaagttaagatgccactctcggatttggtgagtgcagctctggcgcttgatcaatctaccttggatgttgatcaagtggagaatctcataaagttctgtcctacaaaagaagaaatggaacttctcaagaattacaccggagacaaacaaaatcttgggaaatgtgaacagttcttcttagaattgatgaaagtgcctagaatggagtcaaaactgcgagtattctccttcaagatccagtttggttcacaagttgctgatcttagaagaagcttgaatatcatcgactcttcatgtaatgagatccgaacttctctcaagttgaaagaaataatgaagaaaatccttctccttgggaataccctgaaccagggaactgctagaggtgctgcagttggcttccggttggacagtcttctaaaacttacagatacccgggcaacaaataataagatgacactaatgcactacctctgcaaggtacttgctgcaagatctccacagcttttaaacttctatgtggatcttgttagcttagatgctgcatcaaagatacaactaaaaatgttggctgaggaaatgcaagcagttagtaaagggctggaaaaagttcaccttgagtatgatgcttcagaaagggatggtccagtatctgaaatttttcgtgagaaactgaaagagttcaccgacaatgctggagctgatgtgcagtcgttatcttcattgttttctgaagtgggtaaaaaggctgatgcgttgattaagtattttggtgaggatcctgttcgctgcccctttgaacaagtaatctctaccctcttaacatttgtaacaacatttcgaaaagcacatgaggagaacctgaagcaagctgagcttgagaagaaaaaagctgaaaaagaggcagaagcagagaaggccaagaacgcacaattaactggcaaaaatgactctaaaccatcaaatccaagacggcaagctaaacaaaccttagagaggacaaggtctgcaagcagacgaggaagagatgttgggtgataacccgaatggtcagtaattttctgtgcttctgatctgctcgcgaggctaatggacgaccgctgggcaagagaagtttcatggacggacgctggcatccgtcgggtgcagcgcgatcgcatcaaagaaaactctacaggccacccttcaacggtctcactggagaatgccgacgtctgtttttatccatgtcggccatcagggtccagtgctaacttctgactgctgtaaagaattgctaacactgacgctaactccattctttcttttcttttttcatgttacttttccattctttctaacaacggtggccaagtacagccatggcttcgaaaaactaccgcctggtgcttaggtggaaaattgtaaaaaataggcatctgggtgaaaaaaaggtatggagataatctaggtggcaaagagtatcaggagtaaatatgtgatgcaaactcagccagtagtttagctgtaaagttttgtagtgagtgtgtattgccgccactttgtattctatgatcatgaagcagtgaaggcggcgttttctttacgatacgtagtcagatagccttgtcggctacgtgtcgcctgtgtacgtgtgatatatgtgctgtcaattgctgttatgattcaaccttgataaaattaggcatgattcaaatgcatcttttgttagcgtcctaaattgattttagttgaaaataaatagaaatagagtctgtaaaaatgagagtccattgtcacctcaatggctctgtagaaggactagaattcttgttcaagaaactaagagcattttcgaccacgccttaaactagtggtttaaaatgaaatataggg

SEQ ID NO: 210219 - DNA, 4714 bp, Zea Mays
aggaggcacagcagctcggcgggcgccggccgagaggcggcggcagcgggggcggaggaggagcaggaggagggggagggcgaggaggatggcgctcttccgcaagttcttcctcaagaagaccccggatcggctgctcgagatctccgaccgcgtctacggtataatgctcgcactccccgtcgacctggttcgtgcggtgttcgactgctgcttctcgactgattccatgggtgaggatgagtaccgggattacttgagcggcattgttgcgcagttgcaggaattttttccggacgcatcatttatggtatccaatttttggtctggggacaaaagaagccgaatttcagacatattatctgagtatgacatgacagtaatggactacccacaacagtatgaagggtgtccattgcttcagcttgagatgatccaccatttcttgaaatcatgtgaaaattggctatcggtggaaggtcagcataatatgcttttgatgcattgtgagagagggggttggccagttcttgcattcatgttggctggactgcttttgtatcgcaaaacatacactggtgagcagaagacactagaaatggtctataagcaggctcgaagggactttatacaacagttttttcccttgaatcctcagccttcacatttgagatatttgcactatataacaagacaaggaggtggttcagaatggcctcctattagcagacccctcatcttggattcagtagttctccatgttgttccacggtttgacgtagatggtggttgtaggccatatttgcgtgtgcatgggcaagactcaagccccggtaacaagagtgcaaaagtcctttatgagatgccaaaaacaagcaagcatcttccacattatggacaggcagaagtccctataaaactaagtgtgttttgccgtgtttatggagatgtggtccttgaattcatccatattggcgataatatagagcataaggaaacaatgttccgcatcatgttcaacactgcattcgttcaatcaaacatccttgcgctgaatcgtgatgatattgatgttgcttggaatgtgaataatcagttcccaagggacttccgggctgaggtacatttttcggaccctgattcattcaaacctgctgctaccgtcgaggagatagctgatgatggagatgagactgatgttgcttcggtagacacaggagaggagttttatgaagcagaggaggattggcatgatgctagaaaagaccaagaaactcgatcaactgatggtggaatatcattagatgacgttgcagatggtggggtggcaactgaagaaaggagcagcctagaaaagcaccaattcaatgagggtgtgaagattggtgtctcccagaatttaggtagcatgaatgagaaaggggcaagtgcacctaccccaacttttgacaaccaggaaggtttgcagcagcctcgtgaagttcttgcaaatggtaaactaagcagcactaatggccaagagaacagtgatgtgcatgatatacaggtggttgctacatctgttgattcagagggacacaagtttggatctacctgtcaggaggacatgaaaggtgtaattgcacaaactttagtcaccacagttgatccaagttgcagtgatgaaattgaatgccaggctaatgaacaaacaaaaatatcggaataccctgatttggactacactgcttttggttctcctagaagtttgtcacgtacaaatggtgatacccacttgagaactacaaaaaatgaagggttgcagaacggtgatatcaagattatcactgagaacacaataagtatggacaacgatctagtgatctatgaagagaaaactatagttgtcaatggtaacactgtacaggaagtaaagaatattgtcaatgaaaagagcattgcagccaagatagacaaaccaattattgagagtaggaactcactgaacaacaacaatggcaagattcaaatcgctaaaccttctgatacatctaatggcaaattggatgggtgtagattagaatcttgccttgaggaagccctacctacaaagaaaaccactgtccatgacaggattgttgtcttaccagccactgatgtaggaactgagataaaaaccaagcaagaggggcttggtgacaagcaggattttgcacccccacccccacccccacctcttgcttcacgtgcaggtccaccaccacctccgcctcctccaggtgctcgctctggacctccacctcctccgccccctccaggttcacggacaggagctccaccaccaccgcctcctccaggagctccacctcccccacccccacctggaggtggtggaagaggacctccaccacctcctgcacctagagggcatcttggtggtcctcctccacctccaccaccaagtggacgtgcaccaggtgtgccacctccacctagagcaccaggtgtgccgccaccaccaggaaataatccatccttaggcagaggacgtggggctgtacgccctctgggatcagcttatggggctgctgcctcacgtaagtcaacattgaagccattacactgggttaaagtgacaagggcccttcaaggtagtctgtgggaagaattgcagcgcaacgatgactcacagagtgtttcagagtttgatatatcagaacttgagagcctttttcctgcagctgttccgaagtccgatgacagctcaaaatctgaacgtagaaaatcacttggatcaaaaccagaaaaagtgcacctaattgagttgaggagggcgaataacacagagatcatgctaacaaaagttaagatgccactctcggatttggtgagtgcagctctggcgcttgatcaatctaccttggatgttgatcaagtggagaatctcataaagttctgtcctacaaaagaagaaatggaacttctcaagaattacaccggagacaaacaaaatcttgggaaatgtgaacagttcttcttagaattgatgaaagtgcctagaatggagtcaaaactgcgagtattctccttcaagatccagtttggttcacaagttgctgatcttagaagaagcttgaatatcatcgactcttcatgtaatgagatccgaacttctctcaagttgaaagaaataatgaagaaaatccttctccttgggaataccctgaaccagggaactgctagaggtgctgcagttggcttccggttggacagtcttctaaaacttacagatacccgggcaacaaataataagatgacactaatgcactacctctgcaaggtacttgctgcaagatctccacagcttttaaacttctatgtggatcttgttagcttagatgctgcatcaaagatacaactaaaaatgttggctgaggaaatgcaagcagttagtaaagggctggaaaaagttcaccttgagtatgatgcttcagaaagggatggtccagtatctgaaatttttcgtgagaaactgaaagagttcaccgacaatgctggagctgatgtgcagtcgttatcttcattgttttctgaagtgggtaaaaaggctgatgcgttgattaagtattttggtgaggatcctgttcgctgcccctttgaacaagtaatctctaccctcttaacatttgtaacaacatttcgaaaagcacatgaggagaacctgaagcaagctgagcttgagaagaaaaaagctgaaaaagaggcagaagcagagaaggccaagaacgcacaattaactggcaaaaatgactctaaaccatcaaatccaagacggcaagctaaacaaaccttagagaggacaaggtctgcaagcagacgaggaagagatgttgggtgataacccgaatggtcagtaattttctgtgcttctgatctgctcgcgaggctaatggacgaccgctgggcaagagaagtttcatggacggacgctggcatccgtcgggtgcagcgcgatcgcatcaaagaaaactctacaggccacccttcaacggtctcactggagaatgccgacgtctgtttttatccatgtcggccatcagggtccagtgctaacttctgactgctgtaaagaattgctaacactgacgctaactccattctttcttttcttttttcatgttacttttccattctttctaacaacggtggccaagtacagccatggcttcgaaaaactaccgcctggtgcttaggtggaaaattgtaaaaaataggcatctgggtgaaaaaaaggtatggagataatctaggtggcaaagagtatcaggagtaaatatgtgatgcaaactcagccagtagtttagctgtaaagttttgtagtgagtgtgtattgccgccactttgtattctatgatcatgaagcagtgaaggcggcgttttctttacgatacgtagtcagatagccttgtcggctacgtgtcgcctgtgtacgtgtgatatatgtgctgtcaattgctgttatgattcaaccttgataaaattaggcatgattcaaatgcatcttttgttagcgtcctaaattgattttagttgaaaataaatagaaatagagtctgtaaaaatgagagtccattgtcacctcaatggctctgtagaaggactagaattcttgttcaagaaactaagagcattttcgaccacgccttaaactagtggtttaaaatgaaatataggg

SEQ ID NO: 210220 - DNA, 5004 bp, Zea Mays
ggaagagttaaagctaagcgaggagaaaggctgcagtaagcagaggaagaggcgtcccaatcccacggtgcctcgacctcgacctcgaccgcctcccgggctcccacgcccacccatccccaccaccggctccttgctgctgcgctccaccctccgccgcggagccctaggcggagctgcggatcccgagatccccggcgtcgccgccccggagctcgccgccggcggcgggcgcggcccccctcatgcctttggcgccccgatcggagccgacgaccggtggccgcctgaggaggcacagcagctcggcgggcgccggccgagaggcggcggcagcgggggcggaggaggagcaggaggagggggagggcgaggaggatggcgctcttccgcaagttcttcctcaagaagaccccggatcggctgctcgagatctccgaccgcgtctacgtgttcgactgctgcttctcgactgattccatgggtgaggatgagtaccgggattacttgagcggcattgttgcgcagttgcaggaattttttccggacgcatcatttatggtatccaatttttggtctggggacaaaagaagccgaatttcagacatattatctgagtatgacatgacagtaatggactacccacaacagtatgaagggtgtccattgcttcagcttgagatgatccaccatttcttgaaatcatgtgaaaattggctatcggtggaaggtcagcataatatgcttttgatgcattgtgagagagggggttggccagttcttgcattcatgttggctggactgcttttgtatcgcaaaacatacactggtgagcagaagacactagaaatggtctataagcaggctcgaagggactttatacaacagttttttcccttgaatcctcagccttcacatttgagatatttgcactatataacaagacaaggaggtggttcagaatggcctcctattagcagacccctcatcttggattcagtagttctccatgttgttccacggtttgacgtagatggtggttgtaggccatatttgcgtgtgcatgggcaagactcaagccccggtaacaagagtgcaaaagtcctttatgagatgccaaaaacaagcaagcatcttccacattatggacaggcagaagtccctataaaactaagtgtgttttgccgtgtttatggagatgtggtccttgaattcatccatattggcgataatatagagcataaggaaacaatgttccgcatcatgttcaacactgcattcgttcaatcaaacatccttgcgctgaatcgtgatgatattgatgttgcttggaatgtgaataatcagttcccaagggacttccgggctgaggtacatttttcggaccctgattcattcaaacctgctgctaccgtcgaggagatagctgatgatggagatgagactgatgttgcttcggtagacacaggagaggagttttatgaagcagaggaggattggcatgatgctagaaaagaccaagaaactcgatcaactgatggtggaatatcattagatgacgttgcagatggtggggtggcaactgaagaaaggagcagcctagaaaagcaccaattcaatgagggtgtgaagattggtgtctcccagaatttaggtagcatgaatgagaaaggggcaagtgcacctaccccaacttttgacaaccaggaaggtttgcagcagcctcgtgaagttcttgcaaatggtaaactaagcagcactaatggccaagagaacagtgatgtgcatgatatacaggtggttgctacatctgttgattcagagggacacaagtttggatctacctgtcaggaggacatgaaaggtgtaattgcacaaactttagtcaccacagttgatccaagttgcagtgatgaaattgaatgccaggctaatgaacaaacaaaaatatcggaataccctgatttggactacactgcttttggttctcctagaagtttgtcacgtacaaatggtgatacccacttgagaactacaaaaaatgaagggttgcagaacggtgatatcaagattatcactgagaacacaataagtatggacaacgatctagtgatctatgaagagaaaactatagttgtcaatggtaacactgtacaggaagtaaagaatattgtcaatgaaaagagcattgcagccaagatagacaaaccaattattgagagtaggaactcactgaacaacaacaatggcaagattcaaatcgctaaaccttctgatacatctaatggcaaattggatgggtgtagattagaatcttgccttgaggaagccctacctacaaagaaaaccactgtccatgacaggattgttgtcttaccagccactgatgtaggaactgagataaaaaccaagcaagaggggcttggtgacaagcaggattttgcacccccacccccacccccacctcttgcttcacgtgcaggtccaccaccacctccgcctcctccaggtgctcgctctggacctccacctcctccgccccctccaggtgcacgaccaggagctccaccaccaccacctcctccaggttcacggacaggagctccaccaccaccgcctcctccaggagctccacctcccccacccccacctggaggtggtggaagaggacctccaccacctcctgcacctagagggcatcttggtggtcctcctccacctccaccaccaagtggacgtgcaccaggtgtgccacctccacctagagcaccaggtgtgccgccaccaccaggaaataatccatccttaggcagaggacgtggggctgtacgccctctgggatcagcttatggggctgctgcctcacgtaagtcaacattgaagccattacactgggttaaagtgacaagggcccttcaaggtagtctgtgggaagaattgcagcgcaacgatgactcacagagtgtttcagagtttgatatatcagaacttgagagcctttttcctgcagctgttccgaagtccgatgacagctcaaaatctgaacgtagaaaatcacttggatcaaaaccagaaaaagtgcacctaattgagttgaggagggcgaataacacagagatcatgctaacaaaagttaagatgccactctcggatttggtgagtgcagctctggcgcttgatcaatctaccttggatgttgatcaagtggagaatctcataaagttctgtcctacaaaagaagaaatggaacttctcaagaattacaccggagacaaacaaaatcttgggaaatgtgaacagttcttcttagaattgatgaaagtgcctagaatggagtcaaaactgcgagtattctccttcaagatccagtttggttcacaagttgctgatcttagaagaagcttgaatatcatcgactcttcatgtaatgagatccgaacttctctcaagttgaaagaaataatgaagaaaatccttctccttgggaataccctgaaccagggaactgctagaggtgctgcagttggcttccggttggacagtcttctaaaacttacagatacccgggcaacaaataataagatgacactaatgcactacctctgcaaggtacttgctgcaagatctccacagcttttaaacttctatgtggatcttgttagcttagatgctgcatcaaagatacaactaaaaatgttggctgaggaaatgcaagcagttagtaaagggctggaaaaagttcaccttgagtatgatgcttcagaaagggatggtccagtatctgaaatttttcgtgagaaactgaaagagttcaccgacaatgctggagctgatgtgcagtcgttatcttcattgttttctgaagtgggtaaaaaggctgatgcgttgattaagtattttggtgaggatcctgttcgctgcccctttgaacaagtaatctctaccctcttaacatttgtaacaacatttcgaaaagcacatgaggagaacctgaagcaagctgagcttgagaagaaaaaagctgaaaaagaggcagaagcagagaaggccaagaacgcacaattaactggcaaaaatgactctaaaccatcaaatccaagacggcaagctaaacaaaccttagagaggacaaggtctgcaagcagacgaggaagagatgttgggtgataacccgaatggtcagtaattttctgtgcttctgatctgctcgcgaggctaatggacgaccgctgggcaagagaagtttcatggacggacgctggcatccgtcgggtgcagcgcgatcgcatcaaagaaaactctacaggccacccttcaacggtctcactggagaatgccgacgtctgtttttatccatgtcggccatcagggtccagtgctaacttctgactgctgtaaagaattgctaacactgacgctaactccattctttcttttcttttttcatgttacttttccattctttctaacaacggtggccaagtacagccatggcttcgaaaaactaccgcctggtgcttaggtggaaaattgtaaaaaataggcatctgggtgaaaaaaaggtatggagataatctaggtggcaaagagtatcaggagtaaatatgtgatgcaaactcagccagtagtttagctgtaaagttttgtagtgagtgtgtattgccgccactttgtattctatgatcatgaagcagtgaaggcggcgttttctttacgatacgtagtcagatagccttgtcggctacgtgtcgcctgtgtacgtgtgatatatgtgctgtcaattgctgttatgattcaaccttgataaaattaggcatgattcaaatgcatcttttgttagcgtcctaaattgattttagttgaaaataaatagaaatagagtctgtaaaaatgagagtccattgtcacctcaatggctctgtagaaggactagaattcttgttcaagaaactaagagcattttcgaccacgccttaaactagtggtttaaaatgaaatataggg

SEQ ID NO: 210221 - DNA, 1108 bp, Zea Mays
cttgcctctgttacagttcggttccgccatgggggccagggcgaatcgtcatctagtgtgggacttataccagggaaaattggatcgagggagctcaattacttgctgaagacattcggcgctgtgaatctgccctccgacgagttcgggtgttcctgcgacattgactacggaatgtggcagatgttgttgcagatatgatgtactatgcttgaatcccggtgattaatcaagctatgttgagtagttaagggtgacgtccagacattaagagagatgtgtcgcagtatggactaaatatgaccgagcaacaatttcttcagtctgcatatggcgagctgatgtctagtcagcatgcgcggatcaaactatgacaagaggaccgcatctaatgatcctcaggctgtgtatgcaagtggaggaaaaccttatggaaggtactcgatgttcgataatgtcattgacacgagtcaggtgagggttcagaggagaggttcatcgaggtctactgctcgtagctcctatctctccacctcaaatccaactaaagttgagcgattacgagaggaacttaggaaccaacaggagtaacaaagggtccaggaggattccttgaggcaagttgtgcaacaataagcctactatgcttctcagtttcaacaacaacaagcattccttaacaactagcacaaggccaagggatatcgctcctagtgcccccacctccacctcccatacagtttccttggccttcacctggacattgggtatgtgaattcatcatcattcgaggaagaattacttgttatattacaatgtaacttgccaaatgtcatttgcacaaatatattagacccatccacctaaccttgccggtgtagcaacaagttgacgattatgactttgtcaatgcattctacgccaatggagataatgaacatcactcgccttagttccccgatgatcatttgatgtgttttgtgagacgtgagacgtttgtgtcttgtcaaagctgtgacttatgagattgaatttgacaattttgtgacttttgtgcaatgaaatgagttgttattgtgagatgtaatatgtgaaatgtggtgtggtg

SEQ ID NO: 210222 - DNA, 1139 bp, Zea Mays
tctttattatggcgagtggattttatggccgggcgaaatggacggtgtcgttgtcaggagggtcatcccttcggataacagttgcctcttcaacgctgtgggctacgtgatggagcacaaccgaaataaggcttctgagctcagacaggtcatagcagcaacagtcgctggtgatcctgagaaattcaatgaagtgtttcttggcaaaccaaatgaagcgtattgtgcttggattttggatcctgaaaagtggggaggagccattgagctctctattctatctgaatactacgggcgtgaaatcgcagcatatgacattcagaccacccgctgtgatctctatggtcaggagaagaattacagtgaaagggccatgctcatttatgatggtttgcattatgatgctctcgctatgtctccggctgaaggtgcacctgaagaatttgaccagacaatcttccccgttaatcatgaccgttccattggtccagcagaaggccttgccctcaacttagtgagggaggcgcaaaggaagaggagctacactgacactgcaaacttcactctgcgctgcggggtgtgccagatcggcgtcatcggtcaacaggaggctgtggaacatgcgcaagccactggccacgtcaacttccaagaatacaaatgacagtacaagatcagactgttgtgctgtaaacttgaccatcatttggttccaactgatattctcctcccgttggatatggttggcgctacattgtatcacagtgtaattcttacggggcaaacagaataatggtcaccttcgttctggacaatgtctatcttgcctgccaatgtcggttgaaattgaaagagcctacaatccattgtcgttctacatgccagaagaggtttgttggcccatgggccggatctatattgggcggtgtggcccggctgtatcatatctggtttatctattaggctttattcggttatttcaattctatgtggattggagtgtattggaatgtattgagatgtattttgacttgttatggatttaaaccgactcaataccattcaatccacatggtttaacggtgaaacgaacaagtccttaacgattttttttttcaaaattcttctggggctccacc

SEQ ID NO: 210223 - DNA, 2844 bp, Zea Mays
actccccacagcgagaggtgccggctcatgtttgattctgcagctctaactgaagctgtagatcatttgctccctcactgagtgtgatgcttcagctctgggttgtcccgaaaacttgctaaggtgaatgcctcgttatcctgcaccgtatcctatggttcgtccaggttttgttccacgtccaatgccgccacctggtgttgtgacaattcaacgaccaccaataatttctgggatccgggctattcctcctttggtagccctgactgcccgtccacctcctccagctgttatgctggctgataaaccgccaaccgcagtttatgttggcaagattgccccaacagtagacaatggtttccttctttcacttctccagctttgtggacctgtcaagagttggaagcgtgccgaagatccaagtaatggaaaacctaaaggttttgggttttgtgagtttgaatctgctgaaggcatccttcgtgcgacacggcttctcaacaaattgagccttgatggtcaggaactggtgattaatataaatgatgccaccaaggagtacctgaagaaacatgttgaggaaaagaagagagcacaagtgaagtcaaaagatgcaagtggggatggaactacagctgttgctgaaaatgaatcatcaaaatctgttcctgatgaatcagataaggagacaggagatgctggagacaaggacagtgacgagagcactaagaaatttgggattgttactgatgaagactctcaagctgataaagacgtcgcagaaaaaataagcagtatgattgagcagtggttaaagactagaccgccacctccacctccaccagttcaaccatcggcggatagctctggtgtagataaggcaaaaaatgattctgctgataagactgatgctgacactgttaaaagagcagtcaatgaaactgaaagatctgaaactgcctctcctgataggaggaaggatagagagcatgataaggataaacgggacaaagatattgaaaggcatgaccgtgaacgcgaacgtgaaaggatacggagggatagggagaaggatcataagcatagagaagttgatagactatacagggatcgccttaaggagtgggaatctagggagagagagaaagaatatcagagatatagtgaaaaggagaaagaaaaagatagagaacataaccgcagaagggagatcctgaagcaggaagatgagagcgacgaagaggataataggaaaaggaagcgaaggagtagtagttcacttgaagataggaaaagaaggcggcaacgtgaaaaggaggaagatttggcagataaaataagggaggaagaggaaattgcagaagcaaggcggcgggctgtagagttgcaacagcaagcagatgaagcagctgcagcagcggctgcagctgctgaagagtctgctacacttatggaggttgatgctgacgacgaaaaagaaacagatgcacaaaacgagccgtctgttgtggaagctgataacatcccgagctttgctaatagtgttggtgctggtggacttggtaaggaaaataacagtgaggaaataagcatggtacctagtcataccaagcaaaacaacaatgtcccagtaaagaaactgggttttggtttgattggcttgggcaaaaggacatctgttccatcagtttttgctgaagaggatgatgaaaataatgttgataaaagcataagacctctagtacctatcgactacaatgaagaattacaagccgtacaggctaattcttcgactggggcaaatgtcgcagcagctgctgagtttgccaagcgcatctcagtttctaactcaaaggaagagaaggctgacacagagaaggataggaataggagatccagtgaaggtcgtcctagcgatgagcgaagagagaagctacatgatcgtgagaaggataagtccaagtcggagaacaagaagattctggatgcaaagcaattaattgatatgatcccaaggacaaaggaagaactttttgcctatgatataaactgggtgatatatgacaagaatgagttgcacgagagaatgaggccttggatttcaaaaaagattattgaatttcttggcgaggaggaatcaactttggtggactatattgtttcctgcaccaaagaccacgttcaggcagaaaagatgctagagctcctacagtcgattttggatgttgaggctgagatgtttgttctcaagatgtggcggatgctgatatttgagattaagaaagtcgaatctggactatcaggaagagcaaattcacatgcatcaacagcctactcttgttctctggtgaacgacgaagaatgtcgaaggctggcagtagtcgcaagtataaatccctaatcatgctcttcgtagttcctgctgtgcaataactctgcagttttatgaccatctaattatggctcattttgttgtgttgtcttttgaggttgtatgtaagcaattttttgttgtttttgctctaattgtggatcatgttgttgcgttgtattttgaggttagcatgtgttttggttagcagacggttggtgttgaggtggtccagcacttttcttttgaatggaaccatcttgtgttatgtttaggtcttgttcgtttgtgtcggattggtgggtcggaacgattcctagccggattgtttctctaatttatataaactttgattaggtctcgttcgtttctggctgatccagccgttccaggcctcttttcagtcagaaaaattatccagtttcgaatccggcactcagctgttcgtttcaatctgaaataaaaacaaaaac

SEQ ID NO: 210224 - DNA, 3202 bp, Zea Mays
actccccacagcgagaggtgccggctcatgtttgattctgcagctctaactgaagctgtagatcatttgctccctcactgagtgtggtatgccgaatgtttgaatttgaactggttttgtttacattgtctaattgatttacatgctttagctcgtctcactgcttaattaggctcagtttcattatgcacttagatgcttcagctctgggttgtcccgaaaacttgctaaggtgttgtctgtctgtctctgcaggaatgcctcgttatcctgcaccgtatcctatggttcgtccaggttttgttccacgtccaatgccgccacctggtgttgtgacaattcaacgaccaccaataatttctgggatccgggctattcctcctttggtagccctgactgcccgtccacctcctccagctgttatgctggctgataaaccgccaaccgcagtttatgttggcaagattgccccaacagtagacaatggtttccttctttcacttctccagctttgtggacctgtcaagagttggaagcgtgccgaagatccaagtaatggaaaacctaaaggttttgggttttgtgagtttgaatctgctgaaggcatccttcgtgcgacacggcttctcaacaaattgagccttgatggtcaggaactggtgattaatataaatgatgccaccaaggagtacctgaagaaacatgttgaggaaaagaagagagcacaagtgaagtcaaaagatgcaagtggggatggaactacagctgttgctgaaaatgaatcatcaaaatctgttcctgatgaatcagataaggagacaggagatgctggagacaaggacagtgacgagagcactaagaaatttgggattgttactgatgaagactctcaagctgataaagacgtcgcagaaaaaataagcagtatgattgagcagtggttaaagactagaccgccacctccacctccaccagttcaaccatcggcggatagctctggtgtagataaggcaaaaaatgattctgctgataagactgatgctgacactgttaaaagagcagtcaatgaaactgaaagatctgaaactgcctctcctgataggaggaaggatagagagcatgataaggataaacgggacaaagatattgaaaggcatgaccgtgaacgcgaacgtgaaaggatacggagggatagggagaaggatcataagcatagagaagttgatagactatacagggatcgccttaaggagtgggaatctagggagagagagaaagaatatcagagatatagtgaaaaggagaaagaaaaagatagagaacataaccgcagaagggagatcctgaagcaggaagatgagagcgacgaagaggataataggaaaaggaagcgaaggagtagtagttcacttgaagataggaaaagaaggcggcaacgtgaaaaggaggaagatttggcagataaaataagggaggaagaggaaattgcagaagcaaggcggcgggctgtagagttgcaacagcaagcagatgaagcagctgcagcagcggctgcagctgctgaagagtctgctacacttatggaggttgatgctgacgacgaaaaagaaacagatgcacaaaacgagccgtctgttgtggaagctgataacatcccgagctttgctaatagtgttggtgctggtggacttggtaaggaaaataacagtgaggaaataagcatggtacctagtcataccaagcaaaacaacaatgtcccagtaaagaaactgggttttggtttgattggcttgggcaaaaggacatctgttccatcagtttttgctgaagaggatgatgaaaataatgttgataaaagcataagacctctagtacctatcgactacaatgaagaattacaagccgtacaggctaattcttcgactggggcaaatgtcgcagcagctgctgagtttgccaagcgcatctcagtttctaactcaaaggaagagaaggctgacacagagaaggataggaataggagatccagtgaaggtcgtcctagcgatgagcgaagagagaagctacatgatcgtgagaaggataagtccaagtcggagaacaagaagattctggatgcaaagcaattaattgatatgatcccaaggacaaaggaagaactttttgcctatgatataaactgggtgatatatgacaagaatgagttgcacgagagaatgaggccttggatttcaaaaaagattattgaatttcttggcgaggaggaatcaactttggtggactatattgtttcctgcaccaaagaccacgttcaggcagaaaagatgctagagctcctacagtcgattttggatgttgaggctgagatgtttgttctcaagatgtggcggatgctgatatttgagattaagaaagtcgaatctggactatcaggaagagcaaagtaatgaagctaagcctgttaccttgtatgacctttgatttacatcactcaactgtggtcatgcttgtaaggtcatactgtactaaacaagcatcagaaaccatttttaatgatgctgagtggacggttttgattctacacttcccttgtagaaatgtatacgagaattaatgagagactgcgtaattattttgatagattgttgattgcataatgtgtttggtgcagttcacatgcatcaacagcctactcttgttctctggtgaacgacgaagaatgtcgaaggctggcagtagtcgcaagtataaatccctaatcatgctcttcgtagttcctgctgtgcaataactctgcagttttatgaccatctaattatggctcattttgttgtgttgtcttttgaggttgtatgtaagcaattttttgttgtttttgctctaattgtggatcatgttgttgcgttgtattttgaggttagcatgtgttttggttagcagacggttggtgttgaggtggtccagcacttttcttttgaatggaaccatcttgtgttatgtttaggtcttgttcgtttgtgtcggattggtgggtcggaacgattcctagccggattgtttctctaatttatataaactttgattaggtctcgttcgtttctggctgatccagccgttccaggcctcttttcagtcagaaaaattatccagtttcgaatccggcactcagctgttcgtttcaatctgaaataaaaacaaaaac

SEQ ID NO: 210225 - DNA, 525 bp, Zea Mays
attcaccattgcatccagagggtttattcagaatgaaaaattatggacattttaccattggagaaccgagtctaactgtcatatatttgctgggcgaaatatttgaaagttgtctccatttgtgcgtcatgaggaccgacgccaaaagagacttaaggagctaaccgaaagggcagttccagtcatcaggaaaaaatcaccacaagatcttagaagaaccaactccatggaatggtagaaatgaccctgagccctgatgttcttctcttagaagttacagggtttgtttttctttgacttctgtttcttctagttttctttgatagctatttaggaatagtggaacgtgcgtgatcaagaagtcacgccatttagaattgatctgttgtcagattgacggttttcttgtgaatgtggccgggtgttgtataaataagaacaataaggttagcttgaagagtggaccaaaatatcctaattacaggcatctattttgacatatcccaatatctgatacaacgtgtt

SEQ ID NO: 210226 - DNA, 2361 bp, Zea Mays
tgtcgtcgtgatctacctgatccaaaattgggggtcatacacagtcttacatagcttaaaagaaagctatgaagaagcacttcggagaaacgatgttaaagctattgtcgttacagggaaaggagggaaattttctggaggatttgatattagttcctttggtggtgttcaaggaggccaaacaatgcaaccaaaggttggctacatagcaatagatattctcacagatactgtagaagctgcgacaaagccatcagtggcagcaattgatggtcttgctcttggtgggggtttagaagttgccatggcatgccatgcacggattgcaactccaacagctcaattaggtcttccagaacttcagttaggaattattccaggatttggaggaacacagcgactcccacgactggttggtctgacaaaatctttggaaatgatgctgttatctaagccaatcaagggcggtgaggcacaccaactgggtctggttgatgccttagtttctcctaatgatttggtgaatactgctcgtcaatgggctttggatatatatgaatgtaggaggccctggatcaaaagcctttataagactgacaagctagaacctcttggggaggctagggaaattctgaagtttgcaagagctcaagctcaaaagcaggcagctaatcttcatcacccacttgtttgtattgatgtcattgaagaaggtatagttgcaggaccacgggctggactctggaaggaagcaacttctttccaggaactgcttttctcagatacttgtaaaagcttagttcatgtgttcttttctcagcgggcaacgtctaagattccaggtgctacagacttggggttgatgcctaggaaaataactaaagttgccattctaggtggtgggcttatgggttcaggaattgcaactgcgatggtattaagtaactatcctgtgctacttaaagaagtaaatgagaagttcctaactgctggaatcaacagaatccaagccaatttgcagagtcgagtaaagaaaggaaaaatgaccgaggagcgatatgagaaggctatgtctctcgttactggtgtccttgattatgaacgtttcaaagatgtagacctcgttatagaggcagttattgagaatgtgaagttgaagcagcaaatattttctgacttagagaagtactgtccttcacattgcatccttgctactaacacatctacaattgatcttaatctgattggggagaaaacaaaggctcaagatcgtattgctggtgcacacttctttagtcctgcgcatgtgatgccacttctggaaatagttcgtactcagcacacttcaccacaagttgttgttgacttgctggatgttgggaagaagattaaaaagacaccaatagtcgtcgggaactgtactggctttgcagttaataggatgttctttccatacactcaatcagcactcttttatgttgatcttggtatggatgtttataagattgatcgtgcttgtaccaaatttggaatgcctatgggtcctttcagactggcagatctggttggttttggtgtggctgtggccactggtatgcaataccttgaaaatttcccagagagggtctacaaatcaatgctacttcctctgatgatggagggcaatagggcaggtgaagccacccaaaaaggattttacaagtatgagggcaagaggaaagcgactcctgatcctgaaattatgaaatatattgaaaaatctaggagcatggcaggagttacaccagatcctgagctgatgaagctaagtgagaaagacatagtcgagatggtgtttttcccggtgataaatgaagcctgccgagtccttgatgagggtatcgccgtcaaggcttctgacctagacatcgcttcaatctttggcatggggttcccaccttataggggaggtgtcatgcactgggcagattccatcggcgcaaagtacatccatggaaagttggaggagtggacaaagcggtatgggggcttcttcaagccctgctcttacctcgctgaaagagctgcaaaagggattcctctgagtgcaccaacaaagaaagttcaggctcggctataagatgatttccttgtggatggaggagacaataatggattccggtgaagcatttggaatgcgtagagctgtaggctaccactatcacatgcatgtaacgcaatatactactgtgaaaataaagtgcactgcacggcggtttttttatatataaatacaaggatttttttcttgtcacctgtaaaaatttaaacagattttttgtggaatctcatgagaactgaggcaccgctccaaattctaaa

SEQ ID NO: 210227 - DNA, 2782 bp, Zea Mays
tttttttataccatcactagtgttatagaaaggattcggacatgtaaaaaaaatttatcctccaatgtcactagcacatagaattttctcttgttcctgttgaatacagtatgtatactacacgtcctcgagaattcgcgcagctgagccgagttccatgccttctcgggaaacaaagcagtagatggatgaggcacatcgcgtcagcggcaaccgcctgcggtacgcgccagaaataataattaggggatcctgataagtgttggcacaagtagcttgccagcacccaactccaagcaagccataactgcaagaaagcaacggcagcaagaaaccttgtaaacatcggagcatagatcgcggcggtgatggcggccaaggtgaggacggagctggacgtgggcgccgacggcgtggccgtaatcaccatctacaatccgcccgtcaactccctctccatcgacgtcttacatagcttaaaagaaagctatgaagaagcacttcggagaaacgatgttaaagctattgtcgttacagggaaaggagggaaattttctggaggatttgatattagttcctttggtggtgttcaaggaggccaaacaatgcaaccaaaggttggctacatagcaatagatattctcacagatactgtagaagctgcgacaaagccatcagtggcagcaattgatggtcttgctcttggtgggggtttagaagttgccatggcatgccatgcacggattgcaactccaacagctcaattaggtcttccagaacttcagttaggaattattccaggatttggaggaacacagcgactcccacgactggttggtctgacaaaatctttggaaatgatgctgttatctaagccaatcaagggcggtgaggcacaccaactgggtctggttgatgccttagtttctcctaatgatttggtgaatactgctcgtcaatgggctttggatatatatgaatgtaggaggccctggatcaaaagcctttataagactgacaagctagaacctcttggggaggctagggaaattctgaagtttgcaagagctcaagctcaaaagcaggcagctaatcttcatcacccacttgtttgtattgatgtcattgaagaaggtatagttgcaggaccacgggctggactctggaaggaagcaacttctttccaggaactgcttttctcagatacttgtaaaagcttagttcatgtgttcttttctcagcgggcaacgtctaagattccaggtgctacagacttggggttgatgcctaggaaaataactaaagttgccattctaggtggtgggcttatgggttcaggaattgcaactgcgatggtattaagtaactatcctgtgctacttaaagaagtaaatgagaagttcctaactgctggaatcaacagaatccaagccaatttgcagagtcgagtaaagaaaggaaaaatgaccgaggagcgatatgagaaggctatgtctctcgttactggtgtccttgattatgaacgtttcaaagatgtagacctcgttatagaggcagttattgagaatgtgaagttgaagcagcaaatattttctgacttagagaagtactgtccttcacattgcatccttgctactaacacatctacaattgatcttaatctgattggggagaaaacaaaggctcaagatcgtattgctggtgcacacttctttagtcctgcgcatgtgatgccacttctggaaatagttcgtactcagcacacttcaccacaagttgttgttgacttgctggatgttgggaagaagattaaaaagacaccaatagtcgtcgggaactgtactggctttgcagttaataggatgttctttccatacactcaatcagcactcttttatgttgatcttggtatggatgtttataagattgatcgtgcttgtaccaaatttggaatgcctatgggtcctttcagactggcagatctggttggttttggtgtggctgtggccactggtatgcaataccttgaaaatttcccagagagggtctacaaatcaatgctacttcctctgatgatggagggcaatagggcaggtgaagccacccaaaaaggattttacaagtatgagggcaagaggaaagcgactcctgatcctgaaattatgaaatatattgaaaaatctaggagcatggcaggagttacaccagatcctgagctgatgaagctaagtgagaaagacatagtcgagatggtgtttttcccggtgataaatgaagcctgccgagtccttgatgagggtatcgccgtcaaggcttctgacctagacatcgcttcaatctttggcatggggttcccaccttataggggaggtgtcatgcactgggcagattccatcggcgcaaagtacatccatggaaagttggaggagtggacaaagcggtatgggggcttcttcaagccctgctcttacctcgctgaaagagctgcaaaagggattcctctgagtgcaccaacaaagaaagttcaggctcggctataagatgatttccttgtggatggaggagacaataatggattccggtgaagcatttggaatgcgtagagctgtaggctaccactatcacatgcatgtaacgcaatatactactgtgaaaataaagtgcactgcacggcggtttttttatatataaatacaaggatttttttcttgtcacctgtaaaaatttaaacagattttttgtggaatctcatgagaactgaggcaccgctccaaattctaaa

SEQ ID NO: 210228 - DNA, 2751 bp, Zea Mays
tttttttataccatcactagtgttatagaaaggattcggacatgtaaaaaaaatttatcctccaatgtcactagcacatagaattttctcttgttcctgttgaatacagtatgtatactacacgtcctcgagaattcgcggtaaaacacaagggcagatctgatccttcgacgcgctgatatttccgttttccgacaatatcctaatctacaaactcaaatttcgcagcagctgagccgagttccatgccttctcgggaaacaaagcagtagatggatgaggcacatcgcgtcagcggcaaccgcctgcggtacgcgccagaaataataattaggggatcctgataagtgttggcacaagtagcttgccagcacccaactccaagcaagccataactgcaagaaagcaacggcagcaagaaaccttgtaaacatcggagcatagatcgcggcggtgatggcggccaaggtgaggacggagctggacgtgggcgccgacggcgtggccgtaatcaccatctacaatccgcccgtcaactccctctccatcgacgtcttacatagcttaaaagaaagctatgaagaagcacttcggagaaacgatgttaaagctattgtcgttacagggaaaggagggaaattttctggaggatttgatattagttcctttggtggtgttcaaggaggccaaacaatgcaaccaaaggttggctacatagcaatagatattctcacagatactgtagaagctgcgacaaagccatcagtggcagcaattgatggtcttgctcttggtgggggtttagaagttgccatggcatgccatgcacggattgcaactccaacagctcaattaggtcttccagaacttcagttaggaattattccaggatttggaggaacacagcgactcccacgactggttggtctgacaaaatctttggaaatgatgctggaggccctggatcaaaagcctttataagactgacaagctagaacctcttggggaggctagggaaattctgaagtttgcaagagctcaagctcaaaagcaggcagctaatcttcatcacccacttgtttgtattgatgtcattgaagaaggtatagttgcaggaccacgggctggactctggaaggaagcaacttctttccaggaactgcttttctcagatacttgtaaaagcttagttcatgtgttcttttctcagcgggcaacgtctaagattccaggtgctacagacttggggttgatgcctaggaaaataactaaagttgccattctaggtggtgggcttatgggttcaggaattgcaactgcgatggtattaagtaactatcctgtgctacttaaagaagtaaatgagaagttcctaactgctggaatcaacagaatccaagccaatttgcagagtcgagtaaagaaaggaaaaatgaccgaggagcgatatgagaaggctatgtctctcgttactggtgtccttgattatgaacgtttcaaagatgtagacctcgttatagaggcagttattgagaatgtgaagttgaagcagcaaatattttctgacttagagaagtactgtccttcacattgcatccttgctactaacacatctacaattgatcttaatctgattggggagaaaacaaaggctcaagatcgtattgctggtgcacacttctttagtcctgcgcatgtgatgccacttctggaaatagttcgtactcagcacacttcaccacaagttgttgttgacttgctggatgttgggaagaagattaaaaagacaccaatagtcgtcgggaactgtactggctttgcagttaataggatgttctttccatacactcaatcagcactcttttatgttgatcttggtatggatgtttataagattgatcgtgcttgtaccaaatttggaatgcctatgggtcctttcagactggcagatctggttggttttggtgtggctgtggccactggtatgcaataccttgaaaatttcccagagagggtctacaaatcaatgctacttcctctgatgatggagggcaatagggcaggtgaagccacccaaaaaggattttacaagtatgagggcaagaggaaagcgactcctgatcctgaaattatgaaatatattgaaaaatctaggagcatggcaggagttacaccagatcctgagctgatgaagctaagtgagaaagacatagtcgagatggtgtttttcccggtgataaatgaagcctgccgagtccttgatgagggtatcgccgtcaaggcttctgacctagacatcgcttcaatctttggcatggggttcccaccttataggggaggtgtcatgcactgggcagattccatcggcgcaaagtacatccatggaaagttggaggagtggacaaagcggtatgggggcttcttcaagccctgctcttacctcgctgaaagagctgcaaaagggattcctctgagtgcaccaacaaagaaagttcaggctcggctataagatgatttccttgtggatggaggagacaataatggattccggtgaagcatttggaatgcgtagagctgtaggctaccactatcacatgcatgtaacgcaatatactactgtgaaaataaagtgcactgcacggcggtttttttatatataaatacaaggatttttttcttgtcacctgtaaaaatttaaacagattttttgtggaatctcatgagaactgaggcaccgctccaaattctaaa

SEQ ID NO: 210229 - DNA, 2994 bp, Zea Mays
cataatagcaaatttctcccccgagcctagacatcagttgttcggtggcagcctagcctttagaggaggcacagggctcgcgttgccgctcgaggtgccactactaaggggattgccgtggcagggtctgaacttggtaagatggtgggggcctgagcatcttgcggtcaaagcgagggagagctctccgacggcccagtcaggcctttccgaggtgtgaacatcaagatgcagtgtcaatggaccctcgtcatggttcttgatagaaggtgaggctcgtgctcttccttcctcgattttcggtccttccagttcctgcggttttctcatgggattttccgtttttcgccatcgatggtgctggaggagatttcgcgtgcagatgaccgcctctgagctcttgacgctgagcaccgtggtctgtttgcggccatagacctcgtgtgcagtcatctcggagttttgtggttgagggagatgtctgcctagacttcccggatgacgcctatcgccggctacattcatgaattggaggttgtcgcgttccggctcggggtccaccatgccctggtcaccgctcggcctctcggctcaacaaacaaagctgatgaagctgatgccctgaagagaacagttcaaattagcaacctgagtccacttcttactgtggattatattaaacagctatttggattttgtggtaaagttgttgattgtgtcatgacagatacaaagcagattgtgtatgttgagtactccaaacctgaagaagcaactgcagcattggagctcaatagcaagagtgttggtggtcgtccattgaatgtggagatggctaaagctcttcctcctaaagcaaataataacttgcctatgatgatgcagcaagccgttcagttgcaacagatacaattccagcaggcactaatgatgcaacagtcaatagcagcccaacaggctgctgcacgtgctgccaccatgaaatctgccactgaagcagctgcagcaagggctgctgagataagcaggaagttgaaggcagagggctttggtggggacaacatggaagaaaaggatgccaaagggaagtcaggatcaccatcttcccctactcgtagatcaaaatctcggtcaagatcacctatcaagtaccgtaggagcagacgatcccgctcctactctcccccagttggacgctcaagggagcatcgatcacgatcaccatcaagatctcgccactcaaagcatggtagtgatcgatcacatagggatgataaggatatgtatagcaggtccgggagaagggagagtgaacgatcccgtgatcatcattcatctcgttcaaggaggaacagaagcaaaagtagaagtccaaggcataagaagccctccagagttgactctaggtcacccaagaaacaaagactcgaaagtttaagcccatcaaaatcaaggtcggctcgggctggttcaaggtcaccacgacatcataagggaagcaaatcatcgccaactagtgatcgtcattctcgccatagcaggcattcaaggtccagatctcttgacagaaagcatcatcacagtgataaaaaggacagcagaaagtctgagattcaggacgacagaagatctcatagaggcagcagacgcgacaaagatgaaagttcagtgaaggatgatggggaaagatctcatagaggtagtagacgcgacaaagatgaaagttcagtgaaggatgatggggaaagatctcatagaggtagcagacgcaacaaagatgaaagttcagtgaaggatgatggggaaagatctcatagaggtagcagacgcgacaaagatgaaagttcagtgaaggatgatggggaaagatctcatagaggtagcagacgcggcaaagatgaaagttcagtgaaggatgatggggaaagatctcatagaggtagcagactcgacaaagatgaaagttcagtgaaggatgatggggaaagatctcatagaggtagcagacgcgacaaagatgaaagttcagtgaaggatgatggggaaagatctcatagaggtagcagacgcgacaaagatgaaaattcagtgaaggatgatggggaacgatctcatagaagcagtagaggtgacaacgatggaaggtctgtaaaagatccagtggaagataaaagggtggatagtaatgctgtcgcacataagaggagctctgaagatgaaatcctgaacaacaatagtagtaaccataagaaacatagacatgaagttggtttggaagttgatgaaggaaatgatgtgtgccctgctgtagcagaccctaatgggaaacatgaaactggaggcatgaagatcttcggagaactcgagtgctgttcggagcgctcatctgatatattaaaatgcttatgattccatgaagagttgttggagcacatttctgggatgtcggttgaagatacaaggaagtacacactcaagtttttcgagggggcctggcattggagtatgttttaagggaagtcagttcattttatgaatgaggattattttgtggatgctcaattacatgctctcaggaataagactgttctgcatctgagctgcgagcctgcaagtgaactgcgtatttgctggcgcacttctttcaaagcgggatcagcattacccttgttaagttgaatgggagctgagtcataactctcattgcaatgtttttccggagctagtagggaaacacccataaactccaatctcttttccgaaaaattcctttcttattaagggaaaaaagaaacatgctattctctttttttgggtaggaagaataataaaattaggtagggaggtgctagattccatacgctagttcttttcttcaccgccctcgttcgttaggctgtggccaccaaccgtgtatctgaccgtgcaaatagactatatctctagcagattatttatctcacttcctatgttaaactttactttgcaaacaat

SEQ ID NO: 210230 - DNA, 3248 bp, Zea Mays
cctcttcctcgttgcccctcggccctcatcccctgcatctgctccccctctaggcctctaccgaaccctagccggccagctgagcttattgaaggcaagctaggcgagagcagcgtccgccgccgcgctctcatggcggcgcccaaaccgatctgggtgcgccaggctgaggaggcaaagctcaagtccgaggcggagaccgctgccgccgccaaggccgccttcgacgccaccttcaaggccctcgctgccgcgtctggtgacgactacaacgatgtcgaccccgccccaccctccccagccgagctcacctccaccgactcggacgacgatgctccggccctgccaggcccggtcgacccgtccaagtgctccgccgcggggcctggcatcgctggcggctctgccggaacgccctccactttcaccgtcgtcgccaaggatcgccacagccggaggctcaccgccggtggggcgcgcgtgcacgtgcgtgtctcgcccgctgcgggagtcggcggggacgatctcgaaggcactgtcaaggacaacggggacggatcctacacggtcacctacgtcgtccccaagcgcggcaactacatggtacacgttgagcttgacggcgtctccgtcatggggagccccttccccgtcttcttcagcggttccaccgccacaccatcagccgctttccccaccgcgctacctgctgtcagctctgcctaccccaacatggttaaccagaccatgcctaatatgcccaattacacaggcgcgccctccagtgccttccccagcctcctcggggccatgcctagttccaccgctgggtcctcgggcggagtcatcctgccaggggttggtgcttcactgggggagatatgccgggactacatgaacgggaggtgcacaaaggtggagactgactgtaagttcacccatccaccgcaacagctgctgatgtcgttgcttgctgccacgacttctgtcagtgctctcgggcatgcgcccttggcgccctctgcggctgccatggcagctgctcaggccatcatggctgcccaggcactgcaggcacatgctgcacaggccaaagctgcaggtggaacttcaggctcaacaaacaaagctgatgaagctgatgccctgaagagaacagttcaaattagcaacctgagtccacttcttactgtggattatattaaacagctatttggattttgtggtaaagttgttgattgtgtcatgacagatacaaagcagattgtgtatgttgagtactccaaacctgaagaagcaactgcagcattggagctcaatagcaagagtgttggtggtcgtccattgaatgtggagatggctaaagctcttcctcctaaagcaaataataacttgcctatgatgatgcagcaagccgttcagttgcaacagatacaattccagcaggcactaatgatgcaacagtcaatagcagcccaacaggctgctgcacgtgctgccaccatgaaatctgccactgaagcagctgcagcaagggctgctgagataagcaggaagttgaaggcagagggctttggtggggacaacatggaagaaaaggatgccaaagggaagtcaggatcaaaatctcggtcaagatcacctatcaagtaccgtaggagcagacgatcccgctcctactctcccccagttggacgctcaagggagcatcgatcacgatcaccatcaagatctcgccactcaaagcatggtagtgatcgatcacatagggatgataaggatatgtatagcaggtccgggagaagggagagtgaacgatcccgtgatcatcattcatctcgttcaaggaggaacagaagcaaaagtagaagtccaaggcataagaagccctccagagttgactctaggtcacccaagaaacaaagactcgaaagtttaagcccatcaaaatcaaggtcggctcgggctggttcaaggtcaccacgacatcataagggaagcaaatcatcgccaactagtgatcgtcattctcgccatagcaggcattcaaggtccagatctcttgacagaaagcatcatcacagtgataaaaaggacagcagaaagtctgagattcaggacgacagaagatctcatagaggcagcagacgcgacaaagatgaaagttcagtgaaggatgatggggaaagatctcatagaggtagtagacgcgacaaagatgaaagttcagtgaaggatgatggggaaagatctcatagaggtagcagacgcaacaaagatgaaagttcagtgaaggatgatggggaaagatctcatagaggtagcagacgcgacaaagatgaaagttcagtgaaggatgatggggaaagatctcatagaggtagcagacgcggcaaagatgaaagttcagtgaaggatgatggggaaagatctcatagaggtagcagactcgacaaagatgaaagttcagtgaaggatgatggggaaagatctcatagaggtagcagacgcgacaaagatgaaagttcagtgaaggatgatggggaaagatctcatagaggtagcagacgcgacaaagatgaaaattcagtgaaggatgatggggaacgatctcatagaagcagtagaggtgacaacgatggaaggtctgtaaaagatccagtggaagataaaagggtggatagtaatgctgtcgcacataagaggagctctgaagatgaaatcctgaacaacaatagtagtaaccataagaaacatagacatgaagttggtttggaagttgatgaaggaaatgatgtgtgccctgctgtagcagaccctaatgggaaacatgaaactggaggcatgaagatcttcggagaactcgagtgctgttcggagcgctcatctgatatattaaaatgcttatgattccatgaagagttgttggagcacatttctgggatgtcggttgaagatacaaggaagtacacactcaagtaaagtccatatacaagactataaacaactcatattctaggctcttgcatttgaactggaatgctttggctagtaaaattgtccaaatatgcttgtccgccttctgacgcactttgtttgttagaagtcctgtttttgtatcttgtatcaggaatggttcaaaaagtttgacctgatataccatacttgtacactgtcttttgacagtcacatggaattgtgaattgtgatgtaagttttatatatcttgtcttctgcttaattttgac

SEQ ID NO: 210231 - DNA, 3114 bp, Zea Mays
ccgacacgcctcctcttcctcgttgcccctcggccctcatcccctgcatctgctccccctctaggcctctaccgaaccctagccggccagctgagcttattgaaggcaagctaggcgagagcagcgtccgccgccgcgctctcatggcggcgcccaaaccgatctgggtgcgccaggctgaggaggcaaagctcaagtccgaggcggagaccgctgccgccgccaaggccgccttcgacgccaccttcaaggccctcgctgccgcgtctggtgacgactacaacgatgtcgaccccgccccaccctccccagccgagctcacctccaccgactcggacgacgatgctccggccctgccaggcccggtcgacccgtccaagtgctccgccgcggggcctggcatcgctggcggctctgccggaacgccctccactttcaccgtcgtcgccaaggatcgccacagccggaggctcaccgccggtggggcgcgcgtgcacgtgcgtgtctcgcccgctgcgggagtcggcggggacgatctcgaaggcactgtcaaggacaacggggacggatcctacacggtcacctacgtcgtccccaagcgcggcaactacatggcgcgccctccagtgccttccccagcctcctcggggccatgcctagttccaccgctgggtcctcgggcggagtcatcctgccaggggttggtgcttcactgggggagatatgccgggactacatgaacgggaggtgcacaaaggtggagactgactgtaagttcacccatccaccgcaacagctgctgatgtcgttgcttgctgccacgacttctgtcagtgctctcgggcatgcgcccttggcgccctctgcggctgccatggcagctgctcaggccatcatggctgcccaggcactgcaggcacatgctgcacaggccaaagctgcaggtggaacttcaggctcaacaaacaaagctgatgaagctgatgccctgaagagaacagttcaaattagcaacctgagtccacttcttactgtggattatattaaacagctatttggattttgtggtaaagttgttgattgtgtcatgacagatacaaagcagattgtgtatgttgagtactccaaacctgaagaagcaactgcagcattggagctcaatagcaagagtgttggtggtcgtccattgaatgtggagatggctaaagctcttcctcctaaagcaaataataacttgcctatgatgatgcagcaagccgttcagttgcaacagatacaattccagcaggcactaatgatgcaacagtcaatagcagcccaacaggctgctgcacgtgctgccaccatgaaatctgccactgaagcagctgcagcaagggctgctgagataagcaggaagttgaaggcagagggctttggtggggacaacatggaagaaaaggatgccaaagggaagtcaggatcaccatcttcccctactcgtagatcaaaatctcggtcaagatcacctatcaagtaccgtaggagcagacgatcccgctcctactctcccccagttggacgctcaagggagcatcgatcacgatcaccatcaagatctcgccactcaaagcatggtagtgatcgatcacatagggatgataaggatatgtatagcaggtccgggagaagggagagtgaacgatcccgtgatcatcattcatctcgttcaaggaggaacagaagcaaaagtagaagtccaaggcataagaagccctccagagttgactctaggtcacccaagaaacaaagactcgaaagtttaagcccatcaaaatcaaggtcggctcgggctggttcaaggtcaccacgacatcataagggaagcaaatcatcgccaactagtgatcgtcattctcgccatagcaggcattcaaggtccagatctcttgacagaaagcatcatcacagtgataaaaaggacagcagaaagtctgagattcaggacgacagaagatctcatagaggcagcagacgcgacaaagatgaaagttcagtgaaggatgatggggaaagatctcatagaggtagtagacgcgacaaagatgaaagttcagtgaaggatgatggggaaagatctcatagaggtagcagacgcaacaaagatgaaagttcagtgaaggatgatggggaaagatctcatagaggtagcagacgcgacaaagatgaaagttcagtgaaggatgatggggaaagatctcatagaggtagcagacgcggcaaagatgaaagttcagtgaaggatgatggggaaagatctcatagaggtagcagactcgacaaagatgaaagttcagtgaaggatgatggggaaagatctcatagaggtagcagacgcgacaaagatgaaagttcagtgaaggatgatggggaaagatctcatagaggtagcagacgcgacaaagatgaaaattcagtgaaggatgatggggaacgatctcatagaagcagtagaggtgacaacgatggaaggtctgtaaaagatccagtggaagataaaagggtggatagtaatgctgtcgcacataagaggagctctgaagatgaaatcctgaacaacaatagtagtaaccataagaaacatagacatgaagttggtttggaagttgatgaaggaaatgatgtgtgccctgctgtagcagaccctaatgggaaacatgaaactggaggcatgaagatcttcggagaactcgagtgctgttcggagcgctcatctgatatattaaaatgcttatgattccatgaagagttgttggagcacatttctgggatgtcggttgaagatacaaggaagtacacactcaagtaaagtccatatacaagactataaacaactcatattctaggctcttgcatttgaactggaatgctttggctagtaaaattgtccaaatatgcttgtccgccttctgacgcactttgtttgttagaagtcctgtttttgtatcttgtatcaggaatggttcaaaaagtttgacctgatataccatacttgtacactgtcttttgacagtcacatggaattgtgaattgtgatgtaagttttatatatcttgtcttctgcttaattttgac

SEQ ID NO: 210232 - DNA, 1319 bp, Zea Mays
tttcggaccgacaattcaaccccacacgcagtgataaccccgcggttaataaaagaatccctccccacactctctcccgtctctcgcctcgcctccccgacgcgagcgagcccaacacgcaaaacggaacgcttcctcctcgcacctccgccttatccgatggcgtccctcaccaccaccacgtcctcaccggccgccctcccggcggctaccaccgccacagcggcatcgtccatatccccccacgccggttcgaagcggccgctcctcgcgggggacgacgcgccctggcgcgccaccgctgccaccgccgcggggcaggggatccgacccgtcccgcgcatccaccatgcccccgtcctcagcgttgctacgcaggaagactacgccgcctacgccctcgacatcatgaagcatccgaatccgataggggaggggctggccatggaggcgttcgcggaagccgccgggccggagtgcatcgtgcccggacagcaagcgcctctaaggctcatggggctcaaggtttggccccttgatatagatatgaagttcctagagccatttggacgggagttacattcaatgaaaaaattcatggacaagtcgtgcagtgttatggactcatctatggctaacaagtaggcacatggcacatcagttccgaccaatacggctattgttgtatccatctgcttgctgaagttacaagacccgaaaaataggaaattggaagaagggccatggagggaagccgcagtgttttgcatatattgcccaccttcacctgagagaagatatcgggcgcgcaataatgattagtgagcagtcctgtatggagcctgggtgcagcctctgccagtattaagtgatctacgtgttatacattttttatgttcatgaaacattgatccattgataaaatatatcgtcaggtggcaaggggtcgatttgggggaaaatatcttacgcaatttatttatttgttctgttgctaggtcaatttatttatttgttctcgggcgcaggccaccacaacatgtggtgacgaagtctgaattccttcgagttagcatttgtgaagcgtgtttggttctgcgggaaagtttgtgcgagcctgtttgtacccgtgttatcctgtaattttcagatcaatgttcttgcaggctctggagactttcaggccacacaatcctcctgccagttcacgcatggtatcgaggcgcggatggcgatggtgacaagcataattgtgcaaagatggcaacacggatagatgagcgacatctgaacgggagcgttgaaatcggtgcactaat

SEQ ID NO: 210233 - DNA, 1354 bp, Zea Mays
cttgccttaaattatcacttcctcatactccactcatgtgggagccttcagcactgggtatgaaccttacctgtgggagaatgagaagcaatcttacaagcgtcatgttgttctttttggttttttggtccaactgaatcacatgtacactggtactatgcaaaaattaccaacaaaatcaaatacagattcaaatatcatgagatgctctcaggttccaagattcaagtacctaccaatcagtgctccagctatatcatcaagatcacacaaaccatcactacagtctctgtctagcgagtccacatctaaaaatccttggaaatcctattcaaatggagatagatctactacaccagagtttgatgataatgcaagtcttgttggtgctgctccattgcttaagtcatttgttactcaggtggggaccaaatttggggagaacacatcgagatggggttccatgctctctgatggacaggttggtaagctaagtgacatccttcctggaccagcagctgggtttttctcttctttcacatctggagctcgatatgattcatagtaatgcaacggtgaccattgatctttagcccttactacacgtgacacggaaacccacatgtgtcatcaaaggaagaaaaagaactgttggtcctttggaaatctattgctcactgaatgatgccacatcgctggtcccgtgttgcttggcatatctgccgtgcctattcacatcttattgtgcctagactttcatggggaagctgaggaaattataatggaaaagatgagatttattctatatcggttgcccaaggttgaatgagtggttaggaaaaatcagatttgggttcagtatgtttcttgcttgcatttgacttggtacataggacagaacaagtgcaacgatgccgctgatactagctcactttggggactcctgttgtggatacgcggcacttgaagttgtgaaaagagttttggggggtccattctttcttccttgtctttggctcggttagttggcttttttttttacatcggatcagtggtggaactgcgaggttgtggttttatcatgtaggcaaatttgccaaatgtgtacatcggaaatatgggaataaaagcctctatcaatcagcattcagcatcatgcagcgctcaagggcctgtttggttggcatgctgattgccaatttgccatagtctttctgtatttgtctacatgtctgtctgggttgaagttgttacaataggtacagttgctgattttatacgtggctaagagcatctccaaccgtcttttctaaattttactcgttaaattattatttgcagagtgatgaattat

SEQ ID NO: 210234 - DNA, 4020 bp, Zea Mays
ctcaccccttcctcccgatcctctctcggatctcgccgcgcgctgccgcgctcgaaggtgagcggggccgcgatgcctgcggtgcccgttcccggaggcggtggctcctccgacgccgaggagctgttccgcaccaagcgcatcccggagattcgcgcggttgagggcgccacccgacgcgagatctccgccaaggaggaggagctccggcagctcgtcgggcgcagctaccgcgacctgctcgactcagcggactccatactcctcatcaagcagtcctccgatgcaatattctacaacctcgcccgcatctccgactccttgtcgtcgctctcgcctccccctgaaccctctctcgccgtaagcgccgtatcgccgtctccgtcagctggagggcgcgcgaggctctacgcgctggccgcgcgcgccaagtacctggttgacacaccggagcacatctggggccggctcgacgagggcctgctcctggaggcggcggggcggtacctgcgggctcaggtcgtgtacgggcgactctcccgcgacgccgctgccgccgcgcggttcccactcctcgcgcaccaggcgcagctcgtggaggcgttccggccgcagatcgcccagcgagcgcgcgagcgcctcgctgaccgccgcctccctgtagcggcccacgctgacgcgcttgcggccgtggccgcgatcgacgcgccatcgcttgcccctgctccggcgctccttctcttcctcacctcgcgccgcgcttggatctcccaagacctagctggtctcgcctcggatctgtcatcctacacctctgtgctgtgcgatatagcgaggatcgtgcggatcacgcttggccacgttggacagttgtttgtgcctgcactcagtgatatgccgttgttcttcaagacggtgactgagaagacgccgcctgagcagttgttcggtggcattccggaccctgatgatgaagcacggttgtggaaggagcacatgaaccagcttgaagctataatggtgctgcttaagccagatgttgttgcagcggcctgtacggattggctcaaggaatgttgcagtgaaatttttggtgtgattgctggtgagcaaaagttggttgatgccattgggagtggggagctgcttggatcagtgcaaagacttgtacgtgatgccctagatgggagagatggattggagagaagtttggagcagtggctgaaaagtgtctttgggtcagatactgagtcgccatgggatcagatccgtgggttgatcttgaaggacgacaaggatattttcgaggattggatggaggaagcatttgtgcgacggatgaaggacatcgtgcattcagagtttgatatattgggttctagtgttaacgtgaaggaatcaattcatgctatcggtgccaatgctgatccaaaggatgctggagatttccttgcatacctgcggaaatcttcaaagggtggtggtttctggttctcagagtctaagatcaagaaaggtggagttttggcacacttgaaaccaattgctgatgaaaatgatttccgtagctgcctaacatcgtattttgggccagaagttagtcggatcaggagtgcaattgacagtaaatgcaagaatatcctggaggatctgctaagctttgtggagtcacataattcaaccacaaggctgaaggaattggtgccataccttcaggagaaatgctacaagaccatctcgggagtactgaaagaattagaagctgagctcagaaagctctctgctttgttgggaaccaaaaaggagggtaacgacatacctgcagcttctattatagcggagaggtctctcttcattggtcgtctcttgtttgcgctgagataccattcaagtcatgtacccctgatactaggttccccaagggagtgggtaaaggaggttggtggtgcagcatttgccaggttatcatcacctacagcaagacatttaagggcatcttttacacccagaaggcacacatttgacagtcccaagagtcctggaaggcaattctccgatagccccagaagacaaactattgctgctgcagtatctttgtttggagctaatgatagatctaatcctagacttgatgaactcaataagaccctgcagtcactttgcatcatggctcataatgtatggatagcatgggtgtccactgaattatctcacattctttcatatgatctcaataaagacgattcactatcctctgcaactcctttgaggggctgggaagtcacagtaattaaacaagaggaaacaactgagggtcccttggaaatgcaaatagctcttccatcgatgccttcattgtacatcatatcctttctttatcaagcatgtttggagattcataaggttggagggcacatcctggacaggattattttgcataattttgcttgggagctactgcagaaggtcatcaatatttatgaaaattttctttcatctgttgaatctgggaattctccggtttcagagaaaggaattctgcaaatactgctagacttgcgttttattggtgatgtcctatcaggaggtacaagttcttccacaaacactactgaaatgcagacaaaacaggattctttgccaagcaccatctccaagacttccttcaggagaaaacagtcacaattacatgcagactcagctgtcatagagcctataaacaagtatgaaccttacctgtgggagaatgagaagcaatcttacaagcgtcatgttgttctttttggttttttggtccaactgaatcacatgtacactggtactatgcaaaaattaccaacaaaatcaaatacagattcaaatatcatgagatgctctcaggttccaagattcaagtacctaccaatcagtgctccagctatatcatcaagatcacacaaaccatcactacagtctctgtctagcgagtccacatctaaaaatccttggaaatcctattcaaatggagatagatctactacaccagagtttgatgataatgcaagtcttgttggtgctgctccattgcttaagtcatttgttactcaggtggggaccaaatttggggagaacacatcgagatggggttccatgctctctgatggacaggttggtaagctaagtgacatccttcctggaccagcagctgggtttttctcttctttcacatctggagctcgatatgattcatagtaatgcaacggtgaccattgatctttagcccttactacacgtgacacggaaacccacatgtgtcatcaaaggaagaaaaagaactgttggtcctttggaaatctattgctcactgaatgatgccacatcgctggtcccgtgttgcttggcatatctgccgtgcctattcacatcttattgtgcctagactttcatggggaagctgaggaaattataatggaaaagatgagatttattctatatcggttgcccaaggttgaatgagtggttaggaaaaatcagatttgggttcagtatgtttcttgcttgcatttgacttggtacataggacagaacaagtgcaacgatgccgctgatactagctcactttggggactcctgttgtggatacgcggcacttgaagttgtgaaaagagttttggggggtccattctttcttccttgtctttggctcggttagttggcttttttttttacatcggatcagtggtggaactgcgaggttgtggttttatcatgtaggcaaatttgccaaatgtgtacatcggaaatatgggaataaaagcctctatcaatcagcattcagcatcatgcagcgctcaagggcctgtttggttggcatgctgattgccaatttgccatagtctttctgtatttgtctacatgtctgtctgggttgaagttgttacaataggtacagttgctgattttatacgtggctaagagcatctccaaccgtcttttctaaattttactcgttaaattattatttgcagagtgatgaattat

SEQ ID NO: 210235 - DNA, 1743 bp, Zea Mays
gcttctccagttctcctgcactctgctccccatattttatcccttcggagctcggatcagacgcttgtgaatcctggtcatcattcatggagaagaaggcagctactacagaggaaccccttctcgcgccgcggtccgagcacacggtcgcggcggaggccaagcggctgctgagcctggcggggccgctggtggccagctgcatcctgcagaacgtggtccagctggtttccgtgatgttcgtgggccacctcggcgagctgcccctcgccggcgcgtccctggccagctcgctcgccaacgtcaccggcttcagcctcctcgtgggcatggcgagcgcgctggacacgctgtgcgggcaggccttcggagcgaggcagtacggcctgctcggcctctacaagcagcgggccatgctggtgctcgcgctcgcctgcgtcccgatcgccgcggtctgggccaacgccgggcggatcctcatcctcctcggccaggaccgcgacatcgccgcggaggccggcgcctactcccggtggctcatactgtcgctcgtcccctacgtcccgctcgcgtgccacgtccggttcctgcagacgcagagcatcgtcgtgccggtgatggccagctccggcgccaccgcgctgggccacgtgctggtgtgctgggcgctggtgttcaaggccggcatggggagcaaaggcgcggcgctgagcggtgccatctcctactccgtcaacctggccatgctggctgtctacgtcaggctctccagcgcgtgcaagaggacgtggaccggattctccacggaggccttccgagaccttctccggttcaccgagctcgccgtcccgtcggcgatgatggtctgcttggagtggtggtcctttgaactgcttgtgcttctctctggtctgctgcccaatccgaagcttgaaacctcagtactgtcaatatgcacacgtgtttcgaatgagcttggtgccggcgagcctcaagcagcgaggctagcagctcgagtggtgatgtgcatcgccctgtctgcaggcttgctgctcggctctaccatgattctcctgcgcagcttctggggctacatgtacagcaacgaacctgaagtcgtcacgtacattgctaggatgatgccggtcctggcgatttcgtttttcacggatgggctccacagttgtctatcaggagtgctgactgggtgcggtcggcagaagattggcgcgcgcgtcaatctcggtgcgtactacttggccggcattcccatggccgtgctgcttgcatttgtgcttcacctgaatggaatgggtctgtggcttggcatcgtttgtggcagcctcaccaagcttgtgctgctcatgtggatcacactgcggataaactgggagaaagaggcaaccaacgcaaaagaaacggtgttcagttcatctcttcccgtagcattatagagctgtatcctatatatgtgcagctggacgtaacaacaccacaacatgaaaaggctctattgctgcatgctgctacactaccttcccaattgagagacaatatgagttctatgcgttctctaatacgttacttagtatacatattttgttattaaatatccatatcgtcagggatattatatgatattgattatctctattcatcatagaggatccgttagttaaacattgtagcttgtcaaaatcattattactccctccgttttaaaacgaagagggagtataactt

SEQ ID NO: 210236 - DNA, 1405 bp, Zea Mays
tcgctcaagcccgtcttacccctccccaaaccgcatgcgctctcctgctccgcgccgcacatcccccgcgccgccgctggggacggatcgggcgtcgggaatggaggcaaggatggaggcggcggcgggggtggcgaggatgaagacgactgtgacgatgcggacttcggtccgctgctcggcttcaacgaggtgctgcacctcgccgcggcgcgcggcgttgcgctcccgggcgacatgctggaggcggccaaggacgccggcatccgggaagtcctcttgctccgctacttcgatctgcaggccgcgccgtggccactaggcgtgttgatccgcgccttctcgatgctccgcaaccggatgctcgccgacccgtcgttcctcttcaaagttagcaccgagattgtgatcgactcttgctgcgcgacatttgcagaggtgcagaagaggggaaaggatttttgggcagagtttgaactgtacgctgctgatcttcttgtcggtgtagcagttgatattgcacttgtggggctgctggctccatatgtgagaattgggaagccatctgcttcaacgggtctctttggaagattcagcaggatggctggatctttgccaagcagtgtttttgaagctgaaagaccaggctgcagatttacagcccagcaaagaatcggaacatacttttacaaggagtgtcaaaaaatcagatgaagatattcctgttccaccacttgttaaaagtgcagctctatggggtgtgttcctcgctgtatcatctaacacacgctaccagatcatcaatggcctggagcgggtagtggaggcatcgcctgtcgcaagacgtgttccccctgttgctatggcttttacggttggggttcgttttgccaacaatatctacggtggaatgcagttcgtggattgggctcggtggagcggcgttcagtaatgggctcttggttgcagttaccaaaacatcaatacattgtacgttcaaatcttagttgcagtaatcgttcaggtggatccgtgttgttttctcgttacatttcctggtaagtagcggaggctggggcagagctctatgaagttttaactcatttactatgagaaacaaggaagtacttcgcatcatatggcatttatattgctgctcctaattgatcatgtgcacttttgccatactgaatgaatagaagcgttctgactcctgcattgcccccaaaatcattgcctcagtgcgtgtttcagtcagctagtggcgaatgtgaagccgtgggaaagttgtacagctcttcaacgaattttgtgcacaaatgatattgaggactagtttggaaactcgtatctccttttcaattctgaaggttatttgagttttcaaactagccttgaagggaaa

SEQ ID NO: 210237 - DNA, 1944 bp, Zea Mays
cttaaaccaacactccatacgttacacagctcatgtgacacgaggccaagaaaaccagtcaaacttccgcgcactgccgtctgtccactatggccttcgccgcctccccttccctctccgcactcgcttcctcctcgtcgtcaaccgccgccgcccccacgccttcttccaaccctttgcacgagccgaggcctctccacctctcgctcaagcccgtcttacccctccccaaaccgcatgcgctctcctgctccgcgccgcacatcccccgcgccgccgctggggacggatcgggcgtcgggaatggaggcaaggatggaggcggcggcgggggtggcgaggatgaagacgactgtgacgatgcggacttcggtccgctgctcggcttcaacgaggtgctgcacctcgccgcggcgcgcggcgttgcgctcccgggcgacatgctggaggcggccaaggacgccggcatccgggaagtcctcttgctccgctacttcgatctgcaggccgcgccgtggccactaggcgtgttgatccgcgccttctcgatgctccgcaaccggatgctcgccgacccgtcgttcctcttcaaagttagcaccgagattgtgatcgactcttgctgcgcgacatttgcagaggtgcagaagaggggaaaggatttttgggcagagtttgaactgtacgctgctgatcttcttgtcggtgtagcagttgatattgcacttgtggggctgctggctccatatgtgagaattgggaagccatctgcttcaacgggtctctttggaagattcagcaggatggctggatctttgccaagcagtgtttttgaagctgaaagaccaggctgcagatttacagcccagcaaagaatcggaacatacttttacaagggtgtcttgtatggttcagttggatttgtctgtggcataattggtcaaggaattgctaatatgataatgactgccaaaaggtaatagtgtgccattattcgtgcttctgcacatcaaaatctctatctgctattaattaaatgactaagttcatagttgattacttcccattttggtgttttgttgatccgatcacactattgtattctttggcacatagatttataggtttcctattaatattgtgtctgcttcacccatgctcagtaatgctgattaatctttattttttccctgctatcttgacttgtatactgatgtttgttccttgttcaggagtgtcaaaaaatcagatgaagatattcctgttccaccacttgttaaaagtgcagctctatggggtgtgttcctcgctgtatcatctaacacacgctaccagatcatcaatggcctggagcgggtagtggaggcatcgcctgtcgcaagacgtgttccccctgttgctatggcttttacggttggggttcgttttgccaacaatatctacggtggaatgcagttcgtggattgggctcggtggagcggcgttcagtaatgggctcttggttgcagttaccaaaacatcaatacattgtacgttcaaatcttagttgcagtaatcgttcaggtggatccgtgttgttttctcgttacatttcctggtaagtagcggaggctggggcagagctctatgaagttttaactcatttactatgagaaacaaggaagtacttcgcatcatatggcatttatattgctgctcctaattgatcatgtgcacttttgccatactgaatgaatagaagcgttctgactcctgcattgcccccaaaatcattgcctcagtgcgtgtttcagtcagctagtggcgaatgtgaagccgtgggaaagttgtacagctcttcaacgaattttgtgcacaaatgatattgaggactagtttggaaactcgtatctccttttcaattctgaaggttatttgagttttcaaactagccttgaagggaaa

SEQ ID NO: 210238 - DNA, 3184 bp, Zea Mays
attatactatctggccatatcctaaagcccctctgcctctctctctctcacctcctgtcccctctcctctccgtgtccggtggagcttctccacctccggccaagatctggaaccagcgagggtgcccggcggttctcatcccggaccccgactctttcctcatctctgcaacctctggatcctccatctgcccccctgcaggatctggaagctgcacccgtcggggggagaagcaagcagcacatccagcccgctcgagctcgctcatctgacctcaccactgagcttccgcaggatcttcacatccccattccattgacaacgtgaaagagaacatgtgacggggctgccaagctacatgacaacgacgccgattgccgaatgccgagacaccgcgcacgctcttgcagataaagatgatcggttgatcgacgtggtatttgtaccactttgctgtccgtgaaagcccgctatataggtggtgacatcaagtgatcaagattttatggtgcgcaagaggttgggttatagttcccgtggccatcgaattccaactatgccacgtgttccaaactcagctcgggggaaacgttctaccagaagaaagaaagatgagaatgatgatatgtgtgcaatggatttgctcgcaactgtggcaggaaagttactagcagatcaggacaattcatctagcgttcctaataccagtgcagcgaaagctaaaaaaaggaaatcagttaaggaagaacactttgatgaaattccgcctctaaaaaatgtggctatggagaaagatgtgggttctggtagcgttagtgccttccctaggcaagctaaaaactgcctggcagaaaactcatcgacaagaaatggagctgatacagtattagagtcactaacagtgaaatcaaatatgctagcaaaaattcctgagtgtggatcttatggaatacaccatgcaggctcctcaagttcagcagagcctgaacaagtgcatcaagctgaacctaaagtgagcagaagacaagcagatggacatcctgtggcttatggtatatttaactccgtggatgtggatggcaaacctccggctttggttagttctgacagtagctcgtgtgttcctctgagcagccatgacaaggaacatcaaacctcttccttgtatcggggtgtagtgcagtatactgcagatagagaagatgatgaaaattcttctgggtgcacgcatccaagcaccatagaaagtaagggttgcaaaccacaatatctaggtaaccataggataaggaaattgcttgcctcgaaggtaaggaaggcagcacgtaataagatttgtggagggattccatcaaaaaagatctgtggagggttgtcaaaaaaaggtagcaagctaaacttatgtgggaaaaagatgtccaccacacaccaaaaggtgcaaagaatgattttcaaaaagaaaaagctaacgcaccgtacatcttttgctaaggagatgctaactgaagctagtgggacatcatttgctatggaaggtcaaaataaatcatgtgaagctgagaattaccatgttaagctaagaatcaagtcattcaacatcccagaattgttcattaaggtcccagaaaatgcaaccattggatcactgaagagagctgttatggatgttgtcaatagtataatggaaggtggcctacgcgttggtgttcttcttcaaggaaaagatatccaagacgacaacaagacactttgtcaggctgggatatgccacgataaaaagctaaataacatagacttcacgctggagtgcgagcgtgagcgcgagcctccctctggagtcattatacaagaacagatggatttcctcaccacagatatggtggagccattagctaggatgaagtgtgaggaaccttttcctgaagccgacgtcggagatgacagccagcagcctagagcgccttatcgaagccgctctctctctgacctgtactctgtccattgtcctgttcagatggcttcacaggacacgacggcgagctcccaggccatcgtccctgtttcgcctgcgccttcagacgtgggcgctctagccattgtgcccctttgtaagtccaaggggtctgaagtcgggcagaggcgcatgaggaggcccttcactgtcggcgaggttgaggcgctggtgggagcggtcgagcagcttgggactggaaggtggagagctgttaaaacgcttgcattcgacagtatagatcaccggacctacgtcgacctcaagctgatccacccaaggccgaggaagctattagatggttttatccatcagcatctgcaggcaatgctcgtgctcaatacaacctaggcctttgcttgcagaacgggaagggtgtcaagcggaatcagaaggaagctgcaaaatggtatttgcgagctgcagagggagggaatgtacgggccatgtataacatttccctgtgttacagctacggtgaagggcttgcacaggatccagtgcgtgctaagaggtggcttcaactagctgctgattgtggtcacaagaaagctctttatgagtgtggtattaagctttgtgcggcaggagacaaggtcaagtgtctcatgtatctagagctggcgacacggcgtggagaagctgctgctgctcacatgagggatgtaatacttgaatcgctctcggttgtgaatgcgcagcgtgccatgtcggatgctgataaatggaagcctaggacactccatcctagacctagaaggtgaggaaatgacgacgccaaagtgcagaagaaccatatcatcaagatgtccacaccctagtcatctgtggccagaattgaagcacagaaggtcgaagcaaacatgtatgcttcctcggcacccacagccacaggaatgtcagtagccatcctgtggctctctgtataaagccatccattggcagatgtaataccaggagaacttgtagtacagaaagttctgtagcaaatactacttcctcccttccaaattgctaccttaattctcgaatatttgtcaccactagttcatttttgaactaaaatgtgacaaatagaaataacggagcgagtataaaatactttggcttttctagatatgtattttttatacacttaaatacaaagtaaaaggaatgtatctataaatgca

SEQ ID NO: 210239 - DNA, 2553 bp, Zea Mays
attatactatctggccatatcctaaagcccctctgcctctctctctctcacctcctgtcccctctcctctccgtgtccggtggagcttctccacctccggccaagatctggaaccagcgagggtgcccggcggttctcatcccggaccccgactctttcctcatctctgcaacctctggatcctccatctgcccccctgcaggatctggaagctgcacccgtcggggggagaagcaagcagcacatccagcccgctcgagctcgctcatctgacctcaccactgagcttccgcaggatcttcacatccccattccattgacaacgtgaaagagaacatgtgacggggctgccaagctacatgacaacgacgccgattgccgaatgccgagacaccgcgcacgctcttgcagataaagatgatcggttgatcgacgtggtatttgtaccactttgctgtccgtgaaagcccgctatataggtggtgacatcaagtgatcaagattttatggtgcgcaagaggttgggttatagttcccgtggccatcgaattccaactatgccacgtgttccaaactcagctcgggggaaacgttctaccagaagaaagaaagatgagaatgatgatatgtgtgcaatggatttgctcgcaactgtggcaggaaagttactagcagatcaggacaattcatctagcgttcctaataccagtgcagcgaaagctaaaaaaaggaaatcagttaaggaagaacactttgatgaaattccgcctctaaaaaatgtggctatggagaaagatgtgggttctggtagcgttagtgccttccctaggcaagctaaaaactgcctggcagaaaactcatcgacaagaaatggagctgatacagtattagagtcactaacagtgaaatcaaatatgctagcaaaaattcctgagtgtggatcttatggaatacaccatgcaggctcctcaagttcagcagagcctgaacaagtgcatcaagctgaacctaaagtgagcagaagacaagcagatggacatcctgtggcttatggtatatttaactccgtggatgtggatggcaaacctccggctttggttagttctgacagtagctcgtgtgttcctctgagcagccatgacaaggaacatcaaacctcttccttgtatcggggtgtagtgcagtatactgcagatagagaagatgatgaaaattcttctgggtgcacgcatccaagcaccatagaaagtaagggttgcaaaccacaatatctaggtaaccataggataaggaaattgcttgcctcgaaggtaaggaaggcagcacgtaataagatttgtggagggattccatcaaaaaagatctgtggagggttgtcaaaaaaaggtagcaagctaaacttatgtgggaaaaagatgtccaccacacaccaaaaggtgcaaagaatgattttcaaaaagaaaaagctaacgcaccgtacatcttttgctaaggagatgctaactgaagctagtgggacatcatttgctatggaaggtcaaaataaatcatgtgaagctgagaattaccatgttaagctaagaatcaagtcattcaacatcccagaattgttcattaaggtcccagaaaatgcaaccattggatcactgaagctgatccacccaaggccgaggaagctattagatggttttatccatcagcatctgcaggcaatgctcgtgctcaatacaacctaggcctttgcttgcagaacgggaagggtgtcaagcggaatcagaaggaagctgcaaaatggtatttgcgagctgcagagggagggaatgtacgggccatgtataacatttccctgtgttacagctacggtgaagggcttgcacaggatccagtgcgtgctaagaggtggcttcaactagctgctgattgtggtcacaagaaagctctttatgagtgtggtattaagctttgtgcggagacaaggtcaagtgtctcatgtatctagagctggcgacacggcgtggagaagctgctgctgctcacatgagggatgtaatacttgaatcgctctcggttgtgaatgcgcagcgtgccatgtcggatgctgataaatggaagcctaggacactccatcctagacctagaaggtgaggaaatgacgacgccaaagtgcagaagaaccatatcatcaagatgtccacaccctagtcatctgtggccagaattgaagcacagaaggtcgaagcaaacatgtatgcttcctcggcacccacagccacaggaatgtcagtagccatcctgtggctctctgtataaagccatccattggcagatgtaataccaggagaacttgtagtacagaaagttctgtagcaaatactacttcctcccttccaaattgctaccttaattctcgaatatttgtcaccactagttcatttttgaactaaaatgtgacaaatagaaataacggagcgagtataaaatactttggcttttctagatatgtattttttatacacttaaatacaaagtaaaaggaatgtatctataaatgca

SEQ ID NO: 210240 - DNA, 3113 bp, Zea Mays
attatactatctggccatatcctaaagcccctctgcctctctctctctcacctcctgtcccctctcctctccgtgtccggtggagcttctccacctccggccaagatctggaaccagcgagggtgcccggcggttctcatcccggaccccgactctttcctcatctctgcaacctctggatcctccatctgcccccctgcaggatctggaagctgcacccgtcggggggagaagcaagcagcacatccagcccgctcgagctcgctcatctgacctcaccactgagcttccgcaggatcttcacatccccattccattgacaacgtgaaagagaacatgtgacggggctgccaagctacatgacaacgacgccgattgccgaatgccgagacaccgcgcacgctcttgcagataaagatgatcggttgatcgacgtggtatttgtaccactttgctgtccgtgaaagcccgctatataggtggtgacatcaagtgatcaagattttatggtgcgcaagaggttgggttatagttcccgtggccatcgaattccaactatgccacgtgttccaaactcagctcgggggaaacgttctaccagaagaaagaaagatgagaatgatgatatgtgtgcaatggatttgctcgcaactgtggcaggaaagttactagcagatcaggacaattcatctagcgttcctaataccagtgcagcgaaagctaaaaaaaggaaatcagttaaggaagaacactttgatgaaattccgcctctaaaaaatgtggctatggagaaagatgtgggttctggtagcgttagtgccttccctaggcaagctaaaaactgcctggcagaaaactcatcgacaagaaatggagctgatacagtattagagtcactaacagtgaaatcaaatatgctagcaaaaattcctgagtgtggatcttatggaatacaccatgcaggctcctcaagttcagcagagcctgaacaagtgcatcaagctgaacctaaagtgagcagaagacaagcagatggacatcctgtggcttatggtatatttaactccgtggatgtggatggcaaacctccggctttggttagttctgacagtagctcgtgtgttcctctgagcagccatgacaaggaacatcaaacctcttccttgtatcggggtgtagtgcagtatactgcagatagagaagatgatgaaaattcttctgggtgcacgcatccaagcaccatagaaagtaagggttgcaaaccacaatatctaggtaaccataggataaggaaattgcttgcctcgaaggtaaggaaggcagcacgtaataagatttgtggagggattccatcaaaaaagatctgtggagggttgtcaaaaaaaggtagcaagctaaacttatgtgggaaaaagatgtccaccacacaccaaaaggtgcaaagaatgattttcaaaaagaaaaagctaacgcaccgtacatcttttgctaaggagatgctaactgaagctagtgggacatcatttgctatggaaggtcaaaataaatcatgtgaagctgagaattaccatgttaagctaagaatcaagtcattcaacatcccagaattgttcattaaggtcccagaaaatgcaaccattggatcactgaagagagctgttatggatgttgtcaatagtataatggaaggtggcctacgcgttggtgttcttcttcaaggaaaagatatccaagacgacaacaagacactttgtcaggctgggatatgccacgataaaaagctaaataacatagacttcacgctggagtgcgagcgtgagcgcgagcctccctctggagtcattatacaagaacagatggatttcctcaccacagatatggtggagccattagctaggatgaagtgtgaggaaccttttcctgaagccgacgtcggagatgacagccagcagcctagagcgccttatcgaagccgctctctctctgacctgtactctgtccattgtcctgttcagatggcttcacaggacacgacggcgagctcccaggccatcgtccctgtttcgcctgcgccttcagacgtgggcgctctagccattgtgcccctttgtaagtccaaggggtctgaagtcgggcagaggcgcatgaggaggcccttcactgtcggcgaggttgaggcgctggtgggagcggtcgagcagcttgggactggaaggtggagagctgttaaaacgcttgcattcgacagtatagatcaccggacctacgtcgacctcaagctgatccacccaaggccgaggaagctattagatggttttatccatcagcatctgcaggcaatgctcgtgctcaatacaacctaggcctttgcttgcagaacgggaagggtgtcaagcggaatcagaaggaagctctacggtgaagggcttgcacaggatccagtgcgtgctaagaggtggcttcaactagctgctgattgtggtcacaagaaagctctttatgagtgtggtattaagctttgtgcggcaggagacaaggtcaagtgtctcatgtatctagagctggcgacacggcgtggagaagctgctgctgctcacatgagggatgtaatacttgaatcgctctcggttgtgaatgcgcagcgtgccatgtcggatgctgataaatggaagcctaggacactccatcctagacctagaaggtgaggaaatgacgacgccaaagtgcagaagaaccatatcatcaagatgtccacaccctagtcatctgtggccagaattgaagcacagaaggtcgaagcaaacatgtatgcttcctcggcacccacagccacaggaatgtcagtagccatcctgtggctctctgtataaagccatccattggcagatgtaataccaggagaacttgtagtacagaaagttctgtagcaaatactacttcctcccttccaaattgctaccttaattctcgaatatttgtcaccactagttcatttttgaactaaaatgtgacaaatagaaataacggagcgagtataaaatactttggcttttctagatatgtattttttatacacttaaatacaaagtaaaaggaatgtatctataaatgca

SEQ ID NO: 210241 - DNA, 3645 bp, Zea Mays
attatactatctggccatatcctaaagcccctctgcctctctctctctcacctcctgtcccctctcctctccgtgtccggtggagcttctccacctccggccaagatctggaaccagcgagggtgcccggcggttctcatcccggaccccgactctttcctcatctctgcaacctctggatcctccatctgcccccctgcaggatctggaagctgcacccgtcggggggagaagcaagcagcacatccagcccgctcgagctcgctcatctgacctcaccactgagcttccgcaggatcttcacatccccattccattgacaacgtgaaagagaacatgtgacggggctgccaagctacatgacaacgacgccgattgccgaatgccgagacaccgcgcacgctcttgcagataaagatgatcggttgatcgacgtggtatttgtaccactttgctgtccgtgaaagcccgctatataggtggtgacatcaagtgatcaagattttatggtgcgcaagaggttgggttatagttcccgtggccatcgaattccaactatgccacgtgttccaaactcagctcgggggaaacgttctaccagaagaaagaaagatgagaatgatgatatgtgtgcaatggatttgctcgcaactgtggcaggaaagttactagcagatcaggacaattcatctagcgttcctaataccagtgcagcgaaagctaaaaaaaggaaatcagttaaggaagaacactttgatgaaattccgcctctaaaaaatgtggctatggagaaagatgtgggttctggtagcgttagtgccttccctaggcaagctaaaaactgcctggcagaaaactcatcgacaagaaatggagctgatacagtattagagtcactaacagtgaaatcaaatatgctagcaaaaattcctgagtgtggatcttatggaatacaccatgcaggctcctcaagttcagcagagcctgaacaagtgcatcaagctgaacctaaagtgagcagaagacaagcagatggacatcctgtggcttatggtatatttaactccgtggatgtggatggcaaacctccggctttggttagttctgacagtagctcgtgtgttcctctgagcagccatgacaaggaacatcaaacctcttccttgtatcggggtgtagtgcagtatactgcagatagagaagatgatgaaaattcttctgggtgcacgcatccaagcaccatagaaagtaagggttgcaaaccacaatatctaggtaaccataggataaggaaattgcttgcctcgaaggtaaggaaggcagcacgtaataagatttgtggagggattccatcaaaaaagatctgtggagggttgtcaaaaaaaggtagcaagctaaacttatgtgggaaaaagatgtccaccacacaccaaaaggtgcaaagaatgattttcaaaaagaaaaagctaacgcaccgtacatcttttgctaaggagatgctaactgaagctagtgggacatcatttgctatggaaggtcaaaataaatcatgtgaagctgagaattaccatgttaagctaagaatcaagtcattcaacatcccagaattgttcattaaggtcccagaaaatgcaaccattggatcactgaagagagctgttatggatgttgtcaatagtataatggaaggtggcctacgcgttggtgttcttcttcaaggaaaagatatccaagacgacaacaagacactttgtcaggctgggatatgccacgataaaaagctaaataacatagacttcacgctggagtgcgagcgtgagcgcgagcctccctctggagtcattatacaagaacagatggatttcctcaccacagatatggtggagccattagctaggatgaagtgtgaggaaccttttcctgaagccgacgtcggagatgacagccagcagcctagagcgccttatcgaagccgctctctctctgacctgtactctgtccattgtcctgttcagatggcttcacaggacacgacggcgagctcccaggccatcgtccctgtttcgcctgcgccttcagacgtgggcgctctagccattgtgcccctttgtaagtccaaggggtctgaagtcgggcagaggcgcatgaggaggcccttcactgtcggcgaggttgaggcgctggtgggagcggtcgagcagcttgggactggaaggtggagagctgttaaaacgcttgcattcgacagtatagatcaccggacctacgtcgacctcaagctgatccacccaaggccgaggaagctattagatggttttatccatcagcatctgcaggcaatgctcgtgctcaatacaacctaggcctttgcttgcagaacgggaagggtgtcaagcggaatcagaaggaagctgtaagatgtgatacctctgctatgtcggtgtcacacaccacttaaaattttccttacagtagaagtatttctgttttctatacgcattcagtggttgaaaaaaaactaggataattggtacactatcctattcatacaatctatgcatttaccacacctcttactagatatattaggaatagacaactgatgttcagttgacgaactactcgttaccctctgatctgatgatgctattgagtaccagactcttttgaagctctttaactcagctaagagaaagtagcttttaatttgaaaaaaagtaatcttggttgggtttcctctatcaatgtaattatgatcatgtcacctggaccaatcaaaatacactaaccagcagatactggactaccagcaagttcccatactctttttagtacttgagttgtgctgaatatgaaagagacttattaatgcaggcaaaatggtatttgcgagctgcagagggagggaatgtacgggccatgtataacatttccctgtgttacagctacggtgaagggcttgcacaggatccagtgcgtgctaagaggtggcttcaactagctgctgattgtggtcacaagaaagctctttatgagtgtggtattaagctttgtgcggcaggagacaaggtcaagtgtctcatgtatctagagctggcgacacggcgtggagaagctgctgctgctcacatgagggatgtaatacttgaatcgctctcggttgtgaatgcgcagcgtgccatgtcggatgctgataaatggaagcctaggacactccatcctagacctagaaggtgaggaaatgacgacgccaaagtgcagaagaaccatatcatcaagatgtccacaccctagtcatctgtggccagaattgaagcacagaaggtcgaagcaaacatgtatgcttcctcggcacccacagccacaggaatgtcagtagccatcctgtggctctctgtataaagccatccattggcagatgtaataccaggagaacttgtagtacagaaagttctgtagcaaatactacttcctcccttccaaattgctaccttaattctcgaatatttgtcaccactagttcatttttgaactaaaatgtgacaaatagaaataacggagcgagtataaaatactttggcttttctagatatgtattttttatacacttaaatacaaagtaaaaggaatgtatctataaatgca

SEQ ID NO: 210242 - DNA, 4236 bp, Zea Mays
attatactatctggccatatcctaaagcccctctgcctctctctctctcacctcctgtcccctctcctctccgtgtccggtggagcttctccacctccggccaagatctggaaccagcgagggtgcccggcggttctcatcccggaccccgactctttcctcatctctgcaacctctggatcctccatctgcccccctgcaggatctggaagctgcacccgtcggggggagaagcaagcagcacatccagcccgctcgagctcgctcatctgacctcaccactgagcttccgcaggatcttcacatccccattccattgacaacgtgaaagagaacatgtgacggggctgccaagctacatgacaacgacgccgattgccgaatgccgagacaccgcgcacgctcttgcagataaagatgatcggttgatcgacgtggtatttgtaccactttgctgtccgtgaaagcccgctatataggtggtgacatcaagtgatcaagattttatggtgcgcaagaggttgggttatagttcccgtggccatcgaattccaactatgccacgtgttccaaactcagctcgggggaaacgttctaccagaagaaagaaagatgagaatgatgatatgtgtgcaatggatttgctcgcaactgtggcaggaaagttactagcagatcaggacaattcatctagcgttcctaataccagtgcagcgaaagctaaaaaaaggaaatcagttaaggaagaacactttgatgaaattccgcctctaaaaaatgtggctatggagaaagatgtgggttctggtagcgttagtgccttccctaggcaagctaaaaactgcctggcagaaaactcatcgacaagaaatggagctgatacagtattagagtcactaacagtgaaatcaaatatgctagcaaaaattcctgagtgtggatcttatggaatacaccatgcaggctcctcaagttcagcagagcctgaacaagtgcatcaagctgaacctaaagtgagcagaagacaagcagatggacatcctgtggcttatggtatatttaactccgtggatgtggatggcaaacctccggctttggttagttctgacagtagctcgtgtgttcctctgagcagccatgacaaggaacatcaaacctcttccttgtatcggggtgtagtgcagtatactgcagatagagaagatgatgaaaattcttctgggtgcacgcatccaagcaccatagaaagtaagggttgcaaaccacaatatctaggtaaccataggataaggaaattgcttgcctcgaaggtaaggaaggcagcacgtaataagatttgtggagggattccatcaaaaaagatctgtggagggttgtcaaaaaaaggtagcaagctaaacttatgtgggaaaaagatgtccaccacacaccaaaaggtgcaaagaatgattttcaaaaagaaaaagctaacgcaccgtacatcttttgctaaggagatgctaactgaagctagtgggacatcatttgctatggaaggtcaaaataaatcatgtgaagctgagaattaccatgttaagctaagaatcaagtcattcaacatcccagaattgttcattaaggtcccagaaaatgcaaccattggatcactgaagagagctgttatggatgttgtcaatagtataatggaaggtggcctacgcgttggtgttcttcttcaaggaaaagatatccaagacgacaacaagacactttgtcaggctgggatatgccacgataaaaagctaaataacatagacttcacgctggagtgcgagcgtgagcgcgagcctccctctggagtcattatacaagaacagatggatttcctcaccacagatatggtggagccattagctaggatgaagtgtgaggaaccttttcctgaagccgacgtcggagatgacagccagcagcctagagcgccttatcgaagccgctctctctctgacctgtactctgtccattgtcctgttcagatggcttcacaggacacgacggcgagctcccaggccatcgtccctgtttcgcctgcgccttcagacgtgggcgctctagccattgtgcccctttgtaagtccaaggggtctgaagtcgggcagaggcgcatgaggaggcccttcactgtcggcgaggttgaggcgctggtgggagcggtcgagcagcttgggactggaaggtggagagctgttaaaacgcttgcattcgacagtatagatcaccggacctacgtcgacctcaaggacaagtggaagaccctggttcacactgcgagcatatccccgcagcaacgaagagggcagccggttccacaagaacttctagaccgtgtcctcctagcgcaggcctactggtcccagcagcagcagcaggcgaggctctaggacaagccccgcggcaaggctcctctcctcttcctgagatctgttttccaagggaaagcttgtacttgtcctagattggcaacctatattgtttattttaccctatattgtttattttaccaaacaaagatgctaacatatagattggcaacctacaacacctatagaaaatggctgcaggctgctatgacaaattagtcactgtcagtgactgacatccgtataagtggaaaaacagtgacatgacatgctccggtcctgcggcttccagccaaacaacaacgaacccgcctcctcccctggcccgacgcgggctctcccgtctcctctgatggacgggaaccaaacctggccgccccctaccccctcgccgccgcccttctcctcccggccccgcgcgtcgccgtccccggcgacgcaccgccggcgccgccggcactccaaaaaacataagccccggcccgcgccggcgccgacgccgcagggcgcggacttctccgcgctcccgccggatctcgtccaccgggccctcgcggccgcgtgcgcctccgacgtcgcggcggccagccgagcgtgccgcgcgtggtgggacgcgctgcggccgttgcgcgaggccgcggcgctgcacgcgtatggccgacgcgtcaagcacgaccccgtgacaggagccagagccgtagccgcagccgctgcctcgcgcgggggaggcgaacgtgtggagacggagaggcagcgcgctctggggctgttccggcgggcggcgaggctgggctccgcggcggcgatggtggacgccgggctgatgtgctgggaggacgggcgccgggaggaagccgtcggttactaccggagcgctgcggacctgggacatcccattgggatgtgcaaccttggggtctcctacctcgaagctgatccacccaaggccgaggaagctattagatggttttatccatcagcatctgcaggcaatgctcgtgctcaatacaacctaggcctttgcttgcagaacgggaagggtgtcaagcggaatcagaaggaagctgcaaaatggtatttgcgagctgcagagggagggaatgtacgggccatgtataacatttccctgtgttacagctacggtgaagggcttgcacaggatccagtgcgtgctaagaggtggcttcaactagctgctgattgtggtcacaagaaagctctttatgagtgtggtattaagctttgtgcggcaggagacaaggtcaagtgtctcatgtatctagagctggcgacacggcgtggagaagctgctgctgctcacatgagggatgtaatacttgaatcgctctcggttgtgaatgcgcagcgtgccatgtcggatgctgataaatggaagcctaggacactccatcctagacctagaaggtgaggaaatgacgacgccaaagtgcagaagaaccatatcatcaagatgtccacaccctagtcatctgtggccagaattgaagcacagaaggtcgaagcaaacatgtatgcttcctcggcacccacagccacaggaatgtcagtagccatcctgtggctctctgtataaagccatccattggcagatgtaataccaggagaacttgtagtacagaaagttctgtagcaaatactacttcctcccttccaaattgctaccttaattctcgaatatttgtcaccactagttcatttttgaactaaaatgtgacaaatagaaataacggagcgagtataaaatactttggcttttctagatatgtattttttatacacttaaatacaaagtaaaaggaatgtatctataaatgca

SEQ ID NO: 210243 - DNA, 3485 bp, Zea Mays
tctctctctctcacctcctgtcccctctcctctccgtgtccggtggagcttctccacctccggccaagatctggaaccagcgagggtgcccggcggttctcatcccggaccccgactctttcctcatctctgcaacctctggatcctccatctgcccccctgcaggatctggaagctgcacccgtcggggggagaagcaagcagcacatccagcccgctcgagctcgctcatctgacctcaccactgagcttccgcaggatcttcacatccccattccattgacaacgtgaaagagaacatgtgacggggctgccaagctacatgacaacgacgccgattgccgaatgccgagacaccgcgcacgctcttgcagataaagatgatcggttgatcgacgtggtatttgtaccactttgctgtccgtgaaagcccgctatataggtggtgacatcaagtgatcaagattttatggtgcgcaagaggttgggttatagttcccgtggccatcgaattccaactatgccacgtgttccaaactcagctcgggggaaacgttctaccagaagaaagaaagatgagaatgatgatatgtgtgcaatggatttgctcgcaactgtggcaggaaagttactagcagatcaggacaattcatctagcgttcctaataccagtgcagcgaaagctaaaaaaaggaaatcagttaaggaagaacactttgatgaaattccgcctctaaaaaatgtggctatggagaaagatgtgggttctggtagcgttagtgccttccctaggcaagctaaaaactgcctggcagaaaactcatcgacaagaaatggagctgatacagtattagagtcactaacagtgaaatcaaatatgctagcaaaaattcctgagtgtggatcttatggaatacaccatgcaggctcctcaagttcagcagagcctgaacaagtgcatcaagctgaacctaaagtgagcagaagacaagcagatggacatcctgtggcttatggtatatttaactccgtggatgtggatggcaaacctccggctttggttagttctgacagtagctcgtgtgttcctctgagcagccatgacaaggaacatcaaacctcttccttgtatcggggtgtagtgcagtatactgcagatagagaagatgatgaaaattcttctgggtgcacgcatccaagcaccatagaaagtaagggttgcaaaccacaatatctaggtaaccataggataaggaaattgcttgcctcgaaggtaaggaaggcagcacgtaataagatttgtggagggattccatcaaaaaagatctgtggagggttgtcaaaaaaagctagtgggacatcatttgctatggaaggtcaaaataaatcatgtgaagctgagaattaccatgttaagctaagaatcaagtcattcaacatcccagaattgttcattaaggtcccagaaaatgcaaccattggatcactgaagagagctgttatggatgttgtcaatagtataatggaaggtggcctacgcgttggtgttcttcttcaaggaaaagatatccaagacgacaacaagacactttgtcaggctgggatatgccacgataaaaagctaaataacatagacttcacgctggagtgcgagcgtgagcgcgagcctccctctggagtcattatacaagaacagatggatttcctcaccacagatatggtggagccattagctaggatgaagtgtgaggaaccttttcctgaagccgacgtcggagatgacagccagcagcctagagcgccttatcgaagccgctctctctctgacctgtactctgtccattgtcctgttcagatggcttcacaggacacgacggcgagctcccaggccatcgtccctgtttcgcctgcgccttcagacgtgggcgctctagccattgtgcccctttgtaagtccaaggggtctgaagtcgggcagaggcgcatgaggaggcccttcactgtcggcgaggttgaggcgctggtgggagcggtcgagcagcttgggactggaaggtggagagctgttaaaacgcttgcattcgacagtatagatcaccggacctacgtcgacctcaagctgatccacccaaggccgaggaagctattagatggttttatccatcagcatctgcaggcaatgctcgtgctcaatacaacctaggcctttgcttgcagaacgggaagggtgtcaagcggaatcagaaggaagctgtaagatgtgatacctctgctatgtcggtgtcacacaccacttaaaattttccttacagtagaagtatttctgttttctatacgcattcagtggttgaaaaaaaactaggataattggtacactatcctattcatacaatctatgcatttaccacacctcttactagatatattaggaatagacaactgatgttcagttgacgaactactcgttaccctctgatctgatgatgctattgagtaccagactcttttgaagctctttaactcagctaagagaaagtagcttttaatttgaaaaaaagtaatcttggttgggtttcctctatcaatgtaattatgatcatgtcacctggaccaatcaaaatacactaaccagcagatactggactaccagcaagttcccatactctttttagtacttgagttgtgctgaatatgaaagagacttattaatgcaggcaaaatggtatttgcgagctgcagagggagggaatgtacgggccatgtataacatttccctgtgttacagctacggtgaagggcttgcacaggatccagtgcgtgctaagaggtggcttcaactagctgctgattgtggtcacaagaaagctctttatgagtgtggtattaagctttgtgcggcaggagacaaggtcaagtgtctcatgtatctagagctggcgacacggcgtggagaagctgctgctgctcacatgagggatgtaatacttgaatcgctctcggttgtgaatgcgcagcgtgccatgtcggatgctgataaatggaagcctaggacactccatcctagacctagaaggtgaggaaatgacgacgccaaagtgcagaagaaccatatcatcaagatgtccacaccctagtcatctgtggccagaattgaagcacagaaggtcgaagcaaacatgtatgcttcctcggcacccacagccacaggaatgtcagtagccatcctgtggctctctgtataaagccatccattggcagatgtaataccaggagaacttgtagtacagaaagttctgtagcaaatactacttcctcccttccaaattgctaccttaattctcgaatatttgtcaccactagttcatttttgaactaaaatgtgacaaatagaaataacggagcgagtataaaatactttggcttttctagatatgtattttttatacacttaaatacaaagtaaaaggaatgtatctataaatgca

SEQ ID NO: 210244 - DNA, 1298 bp, Zea Mays
ccaggatgaagtgtgaggaaccttttcctgaagccgacgtcggagatgacagccagcagcctagagcgccttatcgaagccgctctctctctgacctgtactctgtccattgtcctgttcagatggcttcacaggacacgacggcgagctcccaggccatcgtccctgtttcgcctgcgccttcagacgtgggcgctctagccattgtgcccctttgtaagtccaaggggtctgaagtcgggcagaggcgcatgaggaggcccttcactgtcggcgaggttgaggcgctggtgggagcggtcgagcagcttgggactggaaggtggagagctgttaaaacgcttgcattcgacagtatagatcaccggacctacgtcgacctcaagctgatccacccaaggccgaggaagctattagatggttttatccatcagcatctgcaggcaatgctcgtgctcaatacaacctaggcctttgcttgcagaacgggaagggtgtcaagcggaatcagaaggaagctgtaagatgcaaaatggtatttgcgagctgcagagggagggaatgtacgggccatgtataacatttccctgtgttacagctacggtgaagggcttgcacaggatccagtgcgtgctaagaggtggcttcaactagctgctgattgtggtcacaagaaagctctttatgagtgtggtattaagctttgtgcggcaggagacaaggtcaagtgtctcatgtatctagagctggcgacacggcgtggagaagctgctgctgctcacatgagggatgtaatacttgaatcgctctcggttgtgaatgcgcagcgtgccatgtcggatgctgataaatggaagcctaggacactccatcctagacctagaaggtgaggaaatgacgacgccaaagtgcagaagaaccatatcatcaagatgtccacaccctagtcatctgtggccagaattgaagcacagaaggtcgaagcaaacatgtatgcttcctcggcacccacagccacaggaatgtcagtagccatcctgtggctctctgtataaagccatccattggcagatgtaataccaggagaacttgtagtacagaaagttctgtagcaaatactacttcctcccttccaaattgctaccttaattctcgaatatttgtcaccactagttcatttttgaactaaaatgtgacaaatagaaataacggagcgagtataaaatactttggcttttctagatatgtattttttatacacttaaatacaaagtaaaaggaatgtatctataaatgca

SEQ ID NO: 210245 - DNA, 1266 bp, Zea Mays
ccaggatgaagtgtgaggaaccttttcctgaagccgacgtcggagatgacagccagcagcctagagcgccttatcgaagccgctctctctctgacctgtactctgtccattgtcctgttcagatggcttcacaggacacgacggcgagctcccaggccatcgtccctgtttcgcctgcgccttcagacgtgggcgctctagccattgtgcccctttgtaagtccaaggggtctgaagtcgggcagaggcgcatgaggaggcccttcactgtcggcgaggttgaggcgctggtgggagcggtcgagcagcttgggactggaaggtggagagctgttaaaacgcttgcattcgacagtatagatcaccggacctacgtcgacctcaagctgatccacccaaggccgaggaagctattagatggttttatccatcagcatctgcaggcaatgctcgtgctcaatacaacctaggcctttgcttgcagaacgggaagggtgtcaagcggaatcagaaggaagctagggagggaatgtacgggccatgtataacatttccctgtgttacagctacggtgaagggcttgcacaggatccagtgcgtgctaagaggtggcttcaactagctgctgattgtggtcacaagaaagctctttatgagtgtggtattaagctttgtgcggcaggagacaaggtcaagtgtctcatgtatctagagctggcgacacggcgtggagaagctgctgctgctcacatgagggatgtaatacttgaatcgctctcggttgtgaatgcgcagcgtgccatgtcggatgctgataaatggaagcctaggacactccatcctagacctagaaggtgaggaaatgacgacgccaaagtgcagaagaaccatatcatcaagatgtccacaccctagtcatctgtggccagaattgaagcacagaaggtcgaagcaaacatgtatgcttcctcggcacccacagccacaggaatgtcagtagccatcctgtggctctctgtataaagccatccattggcagatgtaataccaggagaacttgtagtacagaaagttctgtagcaaatactacttcctcccttccaaattgctaccttaattctcgaatatttgtcaccactagttcatttttgaactaaaatgtgacaaatagaaataacggagcgagtataaaatactttggcttttctagatatgtattttttatacacttaaatacaaagtaaaaggaatgtatctataaatgca

SEQ ID NO: 210246 - DNA, 1717 bp, Zea Mays
agatgggggccaacagttgtgtgtggtgcatgtgtgtgggttgggagcagggtgaccccaatatgaggagaaggttcccacaatagaagtatacccaatggatcgtggaggttctcaaaagaaaagacataaatctgttacaaatgttgacatcatcagtaatctacctgatgttattaaagacaaaattctctgctgtttgccaataaaagaagctgtaagaacatgtctcttgtcaaggaaatggaggtacacatgggcttcaatgactgaattgatgttcagagaagatgattttgctttaggcaatggtaatgaagacggtgacagcgacagatttgtttacttcgtcataacgtttctctccctccatgatggccctattttgaagtttgaaatgaatgctcgacgggttcacatgttttctcctggaggacacatccacaggtggatgcttatgctgtcaagaaatggaataaaagaaattcaaattaagacaaggatatggaggaattacaaaatcccttcttctttcttctcatgcgtggaattggaatatgcttgcctgcaaggatgtatattccagttgccacctctgtttgcaggctttaagcggatgcgtacccttcatttcgttgagttctgtgcaacggaaaacaatattggggaattagtagcgagctgcccgaacttggaggaacttattctctccaggttgctcagctttgctgatatcaccatccactcaacaaagctcaaagtcctaagagttgatggcatgtttaaacatctcaatcttgtgacgccgcacgtctcttcagcagtgattaacctgcaagttaacactggttatgtcaaaagggctgggtccaactttaatctttcccaattcattggttctcttttggatattgaaaatatttcattgctcgggcacgcttttgagtgtgcagcacatggaatcgtgcctggtaaactaccgagatcgttaaatcggctgaccgagataaccctggagcttgaccttggtaacctgaaggaagcaaacgcggctcactgtttgtttcaaattgctcccaacttgcgacgcatggagctacagcttatgcacaggggctattctgcacccacctcgagtttctgggactcggttgatcgtcaggattgtctcttcaagaacctttacacagttgtcatgaacaacttcactggttcctgtgcagagtcaggcttcttgaaacttctgctcgatgacgcgcctgtacttagaagtgcgcggatagaagacaacaacaaactggacaaagaatccctcaaacgcctcctgaagatgagaagagcatccaaggacgcagaaataatcctcctttgaggcgtggtcccctggctccagtagatgcccactgttctttcctggtgaagcgatttggtctgctgtgttataggttttattcaactaggcgtttgggcacaacttcgtctgaacaaaagttgtgtcttcgcgtatacctgtgtttcagtgtgtcaccttcagcaaagctaaatgttgcacccgagtcagagtcgtgtttcttttagcattttgtgttggtacttcgaaattctcttgctgcgctggccaacatgggtttgcttatatggctttggaatgatggacaaaatagtgcttgttagttgtggaattgtccatttaggcaacaaagtttttgaaaaccac

SEQ ID NO: 210247 - DNA, 2021 bp, Zea Mays
aaaatcaaaaaaatatggtaccggcataggggcgggctcctcgctcttgcgccgcgcttcggcccctcccacaacccgagaacatccgccgcccgttgcgcaattcgacgagaaaaccccacagcctgcacctcggggacgccggcgcggagggatggagtgccacgccctacagtgatttctcccccgctccgatccccggcgcatgaccgggtcggctggcctatgcatcgcagcaggagttgtcgtcgattgcccctgcctgccccagttaatcccgcccggtcgcaatccagcattagaggcgccgatctcctgccccgtcctgccctgtggattatcgacagcggcgccggataccacggaagagaaggaagacaaggaaggggccgaaactaacttgcttgtgccggggcaaggacgagatcgagggcagccgagccggtacccgaaactctaggcgaggttcccacaatagaagtatacccaatggatcgtggaggttctcaaaagaaaagacataaatctgttacaaatgttgacatcatcagtaatctacctgatgttattaaagacaaaattctctgctgtttgccaataaaagaagctgcaatggtaatgaagacggtgacagcgacagatttgtttacttcgtcataacgtttctctccctccatgatggccctattttgaagtttgaaatgaatgctcgacgggttcacatgttttctcctggaggacacatccacaggtggatgcttatgctgtcaagaaatggaataaaagaaattcaaattaagacaaggatatggaggaattacaaaatcccttcttctttcttctcatgcgtggaattggaatatgcttgcctgcaaggatgtatattccagttgccacctctgtttgcaggctttaagcggatgcgtacccttcatttcgttgagttctgtgcaacggaaaacaatattggggaattagtagcgagctgcccgaacttggaggaacttattctctccaggttgctcagctttgctgatatcaccatccactcaacaaagctcaaagtcctaagagttgatggcatgtttaaacatctcaatcttgtgacgccgcacgtctcttcagcagtgattaacctgcaagttaacactggttatgtcaaaagggctgggtccaactttaatctttcccaattcattggttctcttttggatattgaaaatatttcattgctcgggcacgcttttgagtgtgcagcacatggaatcgtgcctggtaaactaccgagatcgttaaatcggctgaccgagataaccctggagcttgaccttggtaacctgaaggaagcaaacgcggctcactgtttgtttcaaattgctcccaacttgcgacgcatggagctacagcttatgcacaggggctattctgcacccacctcgagtttctgggactcggttgatcgtcaggattgtctcttcaagaacctttacacagttgtcatgaacaacttcactggttcctgtgcagagtcaggcttcttgaaacttctgctcgatgacgcgcctgtacttagaagtgcgcggatagaagacaacaacaaactggacaaagaatccctcaaacgcctcctgaagatgagaagagcatccaaggacgcagaaataatcctcctttgaggcgtggtcccctggctccagtagatgcccactgttctttcctggtgaagcgatttggtctgctgtgttataggttttattcaactaggcgtttgggcacaacttcgtctgaacaaaagttgtgtcttcgcgtatacctgtgtttcagtgtgtcaccttcagcaaagctaaatgttgcacccgagtcagagtcgtgtttcttttagcattttgtgttggtacttcgaaattctcttgctgcgctggccaacatgggtttgcttatatggctttggaatgatggacaaaatagtgcttgttagttgtggaattgtccatttaggcaacaaagtttttgaaaaccac

SEQ ID NO: 210248 - DNA, 6184 bp, Zea Mays
atcttcgttctgagctctctctctctagtctctcccgtccctacccaccaaatctcgcagtcgcagcaggtccaggtgctcccgaggaatccattcccaatttgcgttcccactcccaccaccgcttcttcccgtatcccttgtcctccctaatttcctctcacaaaaagcgggtgcggcgtcctgccactcacctcggtctcggggggcgccgtgcggcgggcgcccgtgctgctggtttcgctccaggggagaaggggcagagggagtagagcaggttaggtccgtttgcgttttcttttgcgggtttgtaggtcaaaagctcggcgagcactttccgctccacctcctcacgctcggaatcaaatcgatgccccccctgatttggttcctggtatcggtgcatgagcttgctccaagagatctcccttttggttcggcgtcaggggttctgtgaggtcacgcggcttcttcctcttggcgctcctcacatgtccgggcgcttcgatctctgcccactgcgcgagtgattctgctgctgcagcagctgttaggtgcgcgcggtccgttatggggtgaaccgaagcgttcctcgcagggctgtgggtttattacgccgcctgtttgcttccccgctccatgtccttgtgcccatgcttctttgcttttgtcacgcctgaaccgtgtcttcttgtagtatctgaggcttggcagttggcaagtacaaactagcaacttgcttaggtataaagtataaaccagtgtctggtgcagagcccaaaggggtcacgaatcgttgatgcatagatctgcttctggctgagataaggctctaagttcgctctgttgatggggctaccatgagccacgggaacgggatgttgaattctgtcaaggtggagaggtggccagcagcagtcgctgcaaatggccagcctaggccgatggatgtgctccacgacggcagctcgccgccgttccttaccaagacgtatgacatggttgatgacccaaccacgaacgccgttgtgtcatggagtgccgccaacaatagctttgtagtttgggatcctcatatctttgggacggtgctgctgccaaggtacttcaagcacaacaacttctccagctttgttcggcagctcaatacttatgttgccgttcttccgtgtttgtttctgcggctgtggaaccatgcacggagggatgatgcggccgtgtgaaagggcttcagaaaggtggatcctgacagatgggaatttgctaatgaggagtttctgagaggtcagaggcacctcctcaaaaacattaggcgtcggaaacctccacactcatctccaaatcaacaatctcttggctcttacctcgaggtaggacactttggatatgaagaagagattgatcagctgaagagggataaacagctcttgatggctgaggtagtgaagctgaggcaggagcaccaaaatactagatcagatctacaggccatggaagagaaattacaagataccgagcagaagcagcagcagatgatggcattcatggcacgcgtcatgcagaaccctgatttcatgcgtcagctgatctcccagcgggagatgaggaaggagctcgaggatgccatctcgaagaagagaaggcgccgcattgaccagggacatgaagctggtagcatgggcactggttctagcctggagcaagggccacagggagtgtttgaaccgcaggagccggtggaatcactcgccaacggtgtgccatctgatctggagagttcgtctgttgaggcgaagggattggaggttcgacagggtgtttcttcaggtggttctgagcatctgaatggcaggccaagcggagagttaaatgatgatttctgggaggaccttctgcacgaggggggacttggtgcagatgcaggcaatgctgttggtcaggatgatatgaacatggacatggacccagatgttagcctgcctcaactgaaacaacatggacccagacattagccgctcttgtgctatcacaatggctgtgactctgtgagtatctttacagttatgctcgttatacccctgtggtgtacctgtttcgatcgtcttcgaccaaatgtcacgtcgactgcagtctccagttgttaatacagtctgttcagcacgctgatttaagtatttgggtcaagatgttcatataatcctgtggtatccagagatattatagtttgttttcgtaactgtttgcgcagagaccatgctatgttgcctgcaggctatcagtgtatttgttctaacagatcgcaacgctggtacaacgcagtgacctgccagactgggccactatgagattgtagggaaagaccagatagcttgtgtatgtaaaagctgatccatagtagcctatcatgtgcaacgctattgccctttgggatttggcatttcactgtatataacatatcatcgccgtattgccgcatccatcgttgtcttggtttacccatttaagtttgttgtcttcccttttagcttacacatgtaccggctcggtcagtgcccgaggatctatttgcgtgcaaaagtgttcttttttcaatttctgaaatctagaggcttctgtcttcttattctgtttgatgctacttttccctcgagggaattgtctcatgctagcagtcccttcgaccgaccctacgttcatcatgcaaacttgaatggtttttattcatcaaactttgaagtggtactactgtggtggtgtttggttcatgcctcgttcttagaatctcattattagccaaacagattctggatgttatattggatttgccagaatctcacaatatcaacaaaagttgataatataatttgtattggattttgtgtagtgtgcaacttttcaaaatctatggagaaccaaaaccacctatgcaagaagacataacttacatgtctacattggggccatttccgaaatgggcctcgacagagaatagaatagcctaatcaattcagttggttatttcttatctagaagcaaaagagaaattgctaatgctatttttacccgttttgtctttatcctttccgcgtccgacgagtgcgcggcggccggtgatgactggtcgcgacaggtgtgccgcgggccccgcggtgccgtgccgtgtggatcagtcccgatccttctcccgccttcggccttccccgcgcgcgcgcgcacgcaccagcaccaccgcgatataaagcccgccaccaatccgctcgtggtcgtcgtcatcatcccgattcccgacacgcttgtgttgtcgcgattggcaagctcggcggctcgtggcagcgggaacttacgaggcgaaggagagcgagggcgaccgcgcggatcgcatcgcagctctgggcggaggtggggccttgcgcggagatgctagcggtgttcgatcgggcggtggcgccgagcccggaggggctgcggcagccgggcgccgcggggggcggctgcgcggcgggcctcgcggaccggttcagagaggcgcggcccgacgcggtcaccgtcaaccttggcgggtccggcgccctggcgtactcctcgagcaaccagaaccccctcctccccaggttgtttggcgcggtggacggcgtattctgcatgttccagggaacaattgcgaacgttgctgtgctgaagcagcagtatgggttgagcaaaggcgctaatgaggtcagcatcatcatcgaggcttacaggaccttgagggacaggggcccttatcctgcagatcaggttgtgagggacataagtgggaaatttgcatttgtcctgtatgattgctccactaagtcggtcttcatggctgctgtaagtgaactactcctatgttgtaccaaattgtttttttttggctattctcattattaacatcttatgagcagacattttgtcaataaattagtcagtgactcagtggtgttgtccttttaaaaaggattgtgcatagtggtgttctggttgctctatgtggatgagaactcaaatcatcttgggatgcacatagaatcggcatcatatatagtagacaactaaaggttttgcttaaggtcgaagtggcaatgccattttttcagcagactattggatcatagtggtgctagtgcagaactggcagcataaaatcgaatcaaattcccgctaattgggattatgacacctatctagtgagtagtgatgtcacttttttttcaagtaaaaaaaaatgagaccttcacttctagactagtctagagaccccagcctattctgttcgtgtgatcagcatcatctatgtgacatttatcaatgttttgagtttccaccttcaacaagaacagcaacatcactatctacctgcatttcactaaattggctggttcttgacgatgcttctgcctaacattttcatgtcatcgtcctacatttacaaagaacagatgcagctgttcagttattcccgaagacatatatctgatcacaggctactgctacgacgtacaatggtaccactggtattgaccggcaactgataggtagctcagctcgtgttcgtaacctcataacaggacaccgatggaaatgttccgttctactggggcgtggacaccgacgggcgtcttgtggtctctgacgacgccgaactcgtgaagagtgcctgtgggaaatcctgtgccccgttccccaaaggcttcttcttcacgacgtccggagggctgaggagctacgagcaccccatgcacgaggtgaagccggtgccgagggtggacagcaagggcgaggtgtgcggcacgacgtacacggtcgacgcaagcgccaggaaggagaccaccatcccaagggtcggcagcgccgccgactggtcttcgcagtactaaaattcgttatctttctctgtgtgtgttgaacgggttcgagcgcaggtagcagggcgtcgcacgggcgtggcccgtgtttgttcgcatggaaaccctagctgtctggtgtttatctgaatgaatagactgttctctatgaatcaacacggatttctctctaagttcacatgatttccgttgctgctttgctgcacgcctgtactgtaacaagaattactgcctttgttatcaggaaataagttcacatgatttcctgtctgcagatgcgctgccagtcgagcatccttgaggaaggatagggataaggcagtaccggctagtagaagaagcaatgaagcatgacacgggcgttactgtgcgcaaatagtgccggaactcgaatcacgcaaccgtgtgccactgccacaggcgttcgctgtgcctgcacattcccccttgatcggcttgggggcctggtagttggcaccaataatctgccgtgtatatatgggctgtctgggctgggctgggctgccactgccgtggacgggatctgttgcgacagggaaagaggccgaccagcagcccattccttttgtatgtatctcaccgtctcttcccggcaggcataggggacgcacgatggcgtcacccacttctcttgctgttgctcccatcccatccgccgacaacgtggcgtcggatcctgagacggacgttccagatctgcgcataacatatgagccccagcccccaggagaggacttccggcgcggctagcaaagagacccaagagaggagagggacggacggacggcgcggcgtgcgcggcttttgcatgcacgcatgcatggcagcgcacgcgggagagccggctgccggcgggccgggaccgggaggggtgcccgtgccgtgcgtcggtgcgtgcacatgcagatgcagaggcagcaggcgcgcgttcccatggccatgcacgatcgatactcctagtatctgataaaaaaaaactagctagctactaggcccgccaaaatatgcctacatgttgctaactacgagtgtggctaccatagttttggtagccttcgatcatttgttaactttgctaccatagttttgctaactacgagtatgttgcaacttggctagccttcggtcatttgttaacctcgtagagcctgtttggtttctcaaaaccatgattttataatactatactttgtaattgtcataacaataccatagttttagtagctcaaaagatactatggttttgagaaacattgtttggatataacattgtaaac

SEQ ID NO: 210249 - DNA, 4712 bp, Zea Mays
ttgtgcagaagtaatcaaagcaagggcttcagaaaggtggatcctgacagatgggaatttgctaatgaggagtttctgagaggtcagaggcacctcctcaaaaacattaggcgtcggaaacctccacactcatctccaaatcaacaatctcttggctcttacctcgaggtaggacactttggatatgaagaagagattgatcagctgaagagggataaacagctcttgatggctgaggtagtgaagctgaggcaggagcaccaaaatactagatcagatctacaggccatggaagagaaattacaagataccgagcagaagcagcagcagatgatggcattcatggcacgcgtcatgcagaaccctgatttcatgcgtcagctgatctcccagcgggagatgaggaaggagctcgaggatgccatctcgaagaagagaaggcgccgcattgaccagggacatgaagctggtagcatgggcactggttctagcctggagcaagggccacagggagtgtttgaaccgcaggagccggtggaatcactcgccaacggtgtgccatctgatctggagagttcgtctgttgaggcgaagggattggaggttcgacagggtgtttcttcaggtggttctgagcatctgaatggcaggccaagcggagagttaaatgatgatttctgggaggaccttctgcacgaggggggacttggtgcagatgcaggcaatgctgttggtcaggatgatatgaacatggacatggacccagatgttagcctgcctcaactgaaacaacatggacccagacattagccgctcttgtgctatcacaatggctgtgactctgtgagtatctttacagttatgctcgttatacccctgtggtgtacctgtttcgatcgtcttcgaccaaatgtcacgtcgactgcagtctccagttgttaatacagtctgttcagcacgctgatttaagtatttgggtcaagatgttcatataatcctgtggtatccagagatattatagtttgttttcgtaactgtttgcgcagagaccatgctatgttgcctgcaggctatcagtgtatttgttctaacagatcgcaacgctggtacaacgcagtgacctgccagactgggccactatgagattgtagggaaagaccagatagcttgtgtatgtaaaagctgatccatagtagcctatcatgtgcaacgctattgccctttgggatttggcatttcactgtatataacatatcatcgccgtattgccgcatccatcgttgtcttggtttacccatttaagtttgttgtcttcccttttagcttacacatgtaccggctcggtcagtgcccgaggatctatttgcgtgcaaaagtgttcttttttcaatttctgaaatctagaggcttctgtcttcttattctgtttgatgctacttttccctcgagggaattgtctcatgctagcagtcccttcgaccgaccctacgttcatcatgcaaacttgaatggtttttattcatcaaactttgaagtggtactactgtggtggtgtttggttcatgcctcgttcttagaatctcattattagccaaacagattctggatgttatattggatttgccagaatctcacaatatcaacaaaagttgataatataatttgtattggattttgtgtagtgtgcaacttttcaaaatctatggagaaccaaaaccacctatgcaagaagacataacttacatgtctacattggggccatttccgaaatgggcctcgacagagaatagaatagcctaatcaattcagttggttatttcttatctagaagcaaaagagaaattgctaatgctatttttacccgttttgtctttatcctttccgcgtccgacgagtgcgcggcggccggtgatgactggtcgcgacaggtgtgccgcgggccccgcggtgccgtgccgtgtggatcagtcccgatccttctcccgccttcggccttccccgcgcgcgcgcgcacgcaccagcaccaccgcgatataaagcccgccaccaatccgctcgtggtcgtcgtcatcatcccgattcccgacacgcttgtgttgtcgcgattggcaagctcggcggctcgtggcagcgggaacttacgaggcgaaggagagcgagggcgaccgcgcggatcgcatcgcagctctgggcggaggtggggccttgcgcggagatgctagcggtgttcgatcgggcggtggcgccgagcccggaggggctgcggcagccgggcgccgcggggggcggctgcgcggcgggcctcgcggaccggttcagagaggcgcggcccgacgcggtcaccgtcaaccttggcgggtccggcgccctggcgtactcctcgagcaaccagaaccccctcctccccaggttgtttggcgcggtggacggcgtattctgcatgttccagggaacaattgcgaacgttgctgtgctgaagcagcagtatgggttgagcaaaggcgctaatgaggtcagcatcatcatcgaggcttacaggaccttgagggacaggggcccttatcctgcagatcaggttgtgagggacataagtgggaaatttgcatttgtcctgtatgattgctccactaagtcggtcttcatggctgctgtaagtgaactactcctatgttgtaccaaattgtttttttttggctattctcattattaacatcttatgagcagacattttgtcaataaattagtcagtgactcagtggtgttgtccttttaaaaaggattgtgcatagtggtgttctggttgctctatgtggatgagaactcaaatcatcttgggatgcacatagaatcggcatcatatatagtagacaactaaaggttttgcttaaggtcgaagtggcaatgccattttttcagcagactattggatcatagtggtgctagtgcagaactggcagcataaaatcgaatcaaattcccgctaattgggattatgacacctatctagtgagtagtgatgtcacttttttttcaagtaaaaaaaaatgagaccttcacttctagactagtctagagaccccagcctattctgttcgtgtgatcagcatcatctatgtgacatttatcaatgttttgagtttccaccttcaacaagaacagcaacatcactatctacctgcatttcactaaattggctggttcttgacgatgcttctgcctaacattttcatgtcatcgtcctacatttacaaagaacagatgcagctgttcagttattcccgaagacatatatctgatcacaggctactgctacgacgtacaatggtaccactggtattgaccggcaactgataggtagctcagctcgtgttcgtaacctcataacaggacaccgatggaaatgttccgttctactggggcgtggacaccgacgggcgtcttgtggtctctgacgacgccgaactcgtgaagagtgcctgtgggaaatcctgtgccccgttccccaaaggcttcttcttcacgacgtccggagggctgaggagctacgagcaccccatgcacgaggtgaagccggtgccgagggtggacagcaagggcgaggtgtgcggcacgacgtacacggtcgacgcaagcgccaggaaggagaccaccatcccaagggtcggcagcgccgccgactggtcttcgcaatgcgctgccagtcgagcatccttgaggaaggatagggataaggcagtaccggctagtagaagaagcaatgaagcatgacacgggcgttactgtgcgcaaatagtgccggaactcgaatcacgcaaccgtgtgccactgccacaggcgttcgctgtgcctgcacattcccccttgatcggcttgggggcctggtagttggcaccaataatctgccgtgtatatatgggctgtctgggctgggctgggctgccactgccgtggacgggatctgttgcgacagggaaagaggccgaccagcagcccattccttttgtatgtatctcaccgtctcttcccggcaggcataggggacgcacgatggcgtcacccacttctcttgctgttgctcccatcccatccgccgacaacgtggcgtcggatcctgagacggacgttccagatctgcgcataacatatgagccccagcccccaggagaggacttccggcgcggctagcaaagagacccaagagaggagagggacggacggacggcgcggcgtgcgcggcttttgcatgcacgcatgcatggcagcgcacgcgggagagccggctgccggcgggccgggaccgggaggggtgcccgtgccgtgcgtcggtgcgtgcacatgcagatgcagaggcagcaggcgcgcgttcccatggccatgcacgatcgatactcctagtatctgataaaaaaaaactagctagctactaggcccgccaaaatatgcctacatgttgctaactacgagtgtggctaccatagttttggtagccttcgatcatttgttaactttgctaccatagttttgctaactacgagtatgttgcaacttggctagccttcggtcatttgttaacctcgtagagcctgtttggtttctcaaaaccatgattttataatactatactttgtaattgtcataacaataccatagttttagtagctcaaaagatactatggttttgagaaacattgtttggatataacattgtaaac

SEQ ID NO: 210250 - DNA, 2866 bp, Zea Mays
tgaagaagaatattggcaaatatgttttataactgaaacatgttgtgagctgcaattggtgaaagataaataatttatatttttcatacgacccctcttcattttggtaatttatccaatctgaaatgatttcagcagttaattcttcctcaatgaaaaatggcgattgatatttctggtgactggattagcggattatttggtttggcagggcttcagaaaggtggatcctgacagatgggaatttgctaatgaggagtttctgagaggtcagaggcacctcctcaaaaacattaggcgtcggaaacctccacactcatctccaaatcaacaatctcttggctcttacctcgaggtaggacactttggatatgaagaagagattgatcagctgaagagggataaacagctcttgatggctgaggtagtgaagctgaggcaggagcaccaaaatactagatcagatctacaggccatggaagagaaattacaagataccgagcagaagcagcagcagatgatggcattcatggcacgcgtcatgcagaaccctgatttcatgcgtcagctgatctcccagcgggagatgaggaaggagctcgaggatgccatctcgaagaagagaaggcgccgcattgaccagggacatgaagctggtagcatgggcactggttctagcctggagcaagggccacagggagtgtttgaaccgcaggagccggtggaatcactcgccaacggtgtgccatctgatctggagagttcgtctgttgaggcgaagggattggaggttcgacagggtgtttcttcaggtggttctgagcatctgaatggcaggccaagcggagagttaaatgatgatttctgggaggaccttctgcacgaggggggacttggtgcagatgcaggcaatgctgttggtcaggatgatatgaacatggacatggacccagatgttagcctgcctcaactgaaacaacatggacccagacattagccgctcttgtgctatcacaatggctgtgactctgttgtttggcgcggtggacggcgtattctgcatgttccagggaacaattgcgaacgttgctgtgctgaagcagcagtatgggttgagcaaaggcgctaatgaggtcagcatcatcatcgaggcttacaggaccttgagggacaggggcccttatcctgcagatcaggttgtgagggacataagtgggaaatttgcatttgtcctgtatgattgctccactaagtcggtcttcatggctgctgacaccgatggaaatgttccgttctactggggcgtggacaccgacgggcgtcttgtggtctctgacgacgccgaactcgtgaagagtgcctgtgggaaatcctgtgccccgttccccaaaggcttcttcttcacgacgtccggagggctgaggagctacgagcaccccatgcacgaggtgaagccggtgccgagggtggacagcaagggcgaggtgtgcggcacgacgtacacggtcgacgcaagcgccaggaaggagaccaccatcccaagggtcggcagcgccgccgactggtcttcgcagtactaaaattcgttatctttctctgtgtgtgttgaacgggttcgagcgcaggtagcagggcgtcgcacgggcgtggcccgtgtttgttcgcatggaaaccctagctgtctggtgtttatctgaatgaatagactgttctctatgaatcaacacggatttctctctaagttcacatgatttccgttgctgctttgctgcacgcctgtactgtaacaagaattactgcctttgttatcaggaaataagttcacatgatttcctgtctgcagatgcgctgccagtcgagcatccttgaggaaggatagggataaggcagtaccggctagtagaagaagcaatgaagcatgacacgggcgttactgtgcgcaaatagtgccggaactcgaatcacgcaaccgtgtgccactgccacaggcgttcgctgtgcctgcacattcccccttgatcggcttgggggcctggtagttggcaccaataatctgccgtgtatatatgggctgtctgggctgggctgggctgccactgccgtggacgggatctgttgcgacagggaaagaggccgaccagcagcccattccttttgtatgtatctcaccgtctcttcccggcaggcataggggacgcacgatggcgtcacccacttctcttgctgttgctcccatcccatccgccgacaacgtggcgtcggatcctgagacggacgttccagatctgcgcataacatatgagccccagcccccaggagaggacttccggcgcggctagcaaagagacccaagagaggagagggacggacggacggcgcggcgtgcgcggcttttgcatgcacgcatgcatggcagcgcacgcgggagagccggctgccggcgggccgggaccgggaggggtgcccgtgccgtgcgtcggtgcgtgcacatgcagatgcagaggcagcaggcgcgcgttcccatggccatgcacgatcgatactcctagtatctgataaaaaaaaactagctagctactaggcccgccaaaatatgcctacatgttgctaactacgagtgtggctaccatagttttggtagccttcgatcatttgttaactttgctaccatagttttgctaactacgagtatgttgcaacttggctagccttcggtcatttgttaacctcgtagagcctgtttggtttctcaaaaccatgattttataatactatactttgtaattgtcataacaataccatagttttagtagctcaaaagatactatggttttgagaaacattgtttggatataacattgtaaac

SEQ ID NO: 210251 - DNA, 1421 bp, Zea Mays
cgacagcccaaacaggcgcaaacgcatcggcgggcaagcatatcatccgtcccacacttgtgagcgactagtcacatgaaaaacctacactacacaagtcttccaaattctatcacaaggttcaaaggttgaaattcaaaatgcttccgaatcaatctactaattcttcgtgcaattccattggaaaattggcagactagttaaaagcaccattcttatccaacaagggtcatcagatgaacaaggatgcatttgcaacatatcttaccatgaacgaatgtgcagggtgattgtcgaactagctattcgttgtgttaaaagtggtcccagagtatttaaaggtttcacggtgggcttccatccccgctcatcagaaattgtttataatggattcactcagcctggatttgaacaacctcaccatggatttagcttccagactgagcagattcatgtgtctctttaccttagcgccaagtcctcactctcaggccttgttgggaaaccgaccttcaaggttaatccagtgaaagggcttggtgttacacttgcaggatcaggattcaatgatgccatgcctagtaccctgtctcctacagttttgaatgtggattggagatgtgaaattgttcgaaccagtccttatgaggtccatatttttatccctgtggagggctatgacccaattgaatttacactaacgaaaaaatgtggttacagacaagaaaaagagagtgatcccatgaaaggctgggcaaaatttggaattgtttcttgcgtgttcattgtcttatcatgcatactttgttgtggagggttcatctacaaaactcgcacattgcatttgtacggtttagatgcgctgcctggtattgcggtcttgtctgccctattggatgctgttgggagaccaagaggctacttgcctgcagttaatcctaatgaaaaccatgcaagccatgcatcttgagagcacgtggttggtaccacacaagtaggaagtagcacaatggataaatcatagggcatatgggccaatgtgaactaatgggtatattctgaggactgtttcctgtatgttttcattatatattcaattaatctagtctctactttatcagacataattcgttgacacatccagcatcagcctacccaagaaattttccctctgctacaagcaagtgagctcatggagcgttgctaattatcgcactattagtgtagcttttatgcacaagttctttacatgttcaaaaatgaaaagcatatacaccatcctttgtatcacgctttgtaacatttaatatcttattatcttgcagtagagtaggatactcaaaatttaattgagctcgtagcatagagcttacgtgtcatcaacatcagaaaagtcaaaagataaaaaaaaaatccataat

SEQ ID NO: 210252 - DNA, 408 bp, Zea Mays
aaaatctccgtttcttcggagccaggctccactcattccctgtcgtcgcagctcagagcacgcgcagccgcctcgcctcgcctggagctcacgcagccgcctcgcctggagctcgcgcagccgcctcgccttgcctggagcttgcgcagccacctcgtctggatctcgtgctagggttggagccagggtcctctcgcagccgcctctatcctcgcctggagctcgcgctagggttcctctcgcagccgccgctgttgaggtgctacttgcaaaagcgtgtactgaacagctcaaaaggccctgctatatgtgcactgcgtgctcagcctgataagagagagtatgcaatagagatgaagaacagtgtggaaaggacatcaatgcctgctgggcgagctggagagtcag

SEQ ID NO: 210253 - DNA, 1249 bp, Zea Mays
aaaatctccgtttcttcggagccaggctccactcattccctgtcgtcgcagctcagagcacgcgcagccgcctcgcctcgcctggagctcacgcagccgcctcgcctggagctcgcgcagccgcctcgccttgcctggagcttgcgcagccacctcgtctggatctcgtgctagggttggagccagggtcctctcgcagccgcctctatcctcgcctggagctcgcgctagggttcctctcgcagccgccgctgttgagccttgtaaccctgctgttggtggccctgcaacgtctcaacttgtccatgaggtagatgcccttggtggtaaaattggaaaaattactgataggtgctacttgcaaaagcgtgtactgaacagctcaaaaggccctgctatatgtgcactgcgtgctcagcctgataagagagagtatgcaatagagatgaagaacagtgtggaaagaaaatcttttcattagagaagcaatggctacagaggttttaattggaaaaaatgacaccattgagggtgtttgcactttcttcagcatggactttatgcaccatctgttgtacttagcaccagaacattcatgagtgtttctggggccaagctgctcggctcctggggcgtggacctccccatcaggccgctgcacacgctccacctctactggcgcgtgaagcccggccaggagcagactgtctcgacgagcgccgggttcccgaccttctccagctacggcgacccgcccgtgtacggcgcgccgtcgctggagctcccggggctcatcaagatcagctgcattagatcttagagtacactgttttacacaatttggagttgttactactatcaagctttagactttagactttggagtacactgtttttacactgtattaagctttagccttttatgctacagtgtgtaaaaaagcaagctttagacagttaggctaatctatagacagtgtaaagcttgattttttgacaatacagttcaaattcttagaacaatgcggtctgaaagtttaatacagttctgacaatagagttgagtacactgttttgaggctaatatgtcaagcttagataccagtttgtcaagcttgttttagtccaaatttgtatttacttagctgtgtaaattgtgtacaatttgaagactgttttagttggtgtagaaattgtgtagaatttctagatagttttatgttgctcggtgtgagacgtgtaaattgtg

SEQ ID NO: 210254 - DNA, 1484 bp, Zea Mays
agattcgacaatgaaccaactgctgcatcattggcctatgggttcgagaagaaaaataatgaaacaattctagtgtttgatttgggaggtggtacctttgatgtctctgccgttctgcagtattggaagttggagatggtgtgtttgaggtgctttccacatcaggtgatacacaccttggtggtgatgactttgataagagaatagtagattggcttgctagcaacttcaagaaagatgaaggtattgatcttctgaaggataaacaagcccttcagaggcttactgaggcatcagagaaagctaagatggaactgtcaacgctgacacaggcaaatattagcctgccattcattactgctactgctgatgggccaaaacacattgaggcaaccctctcgagagccaaattcgaggaactatgttcagaccttatagacaggcttaaaactcctgttaataatgccttaagagatgccaagttgtctgtcagtgatctagatgaagttattcttgtgggtggatccacccgaatccctgcagttcaagaacttgtgaggaagcttactgacaaagatcccaatgttacggtcaaccctgatgaggttgtttctcttggggcagctgtgcaggtgattttctttatcctcaaatgttgtttattgttgcagagcataatcctcacatggagagcccctacaactacaacaaagccttttagtcccaagcaaggttggtagggtagagttgaaacccaaccaaaaccacaagtcaaggttcagacacatggatagctgttttccatgcactcttatttaaggctaaatcttgggtatattccaccctcctttagtcctttttctctcttcccatgtcaaattcggccttcccttgcccctctttccattgctatcgcgccttaggatcccactacgcattcatgcctctgggagtcttcgttggattcgtccaaaccatctcagttagtgttggacaagtttttcttcaactggtgctatgcctagcacttgtatcatcatttcagactagatcccttcttgtatggccacaaatcaaacgcaacatgcgtattttcacaacaattatctgttgaacatgtcgtctttttgtagattaacattctgcaccttatcaattcagttgcttcttagaatgaactaaaaacaggcaataagcagaagttgctttcaccagcttctcagataagctgctttttcaataagcaacagctgtaccaaactatgccttgatcttccaaactgacatatccttcctcatgtttagtagtgccaaaatcacatctcatatattcggttttagttctactaggtaaaaccttttggatctagagtctcccgctacaactctagttttctatttactcttgcccgacttcatcaactagcactacattgttcgctaaggcaaaaatgtaagggctcaaagccgattcttgatatggt

SEQ ID NO: 210255 - DNA, 2149 bp, Zea Mays
cgcgacccgccgacgcgttggcgtaacggtccaaccaatggccgggttcgcgcgcgccaccgcccccgcgtccccgtcaccggcggcggcgctgctcaccggcgagcgcctcgtggtcttcctcttcgcggcccgcgtggcactcgcggccccggtgcacctcgccgcggcgctcgcggtcctcgtggcggccgccctcgccgtcgagctcgccgtggacggctccggctccgccccgcttcgccgcttcaggaccaggccaggtgcttcgtcaggcatacttcttggcgccactactctgcccagcgtcatgctttctcggttaattcaactgtcaaggctcctaccagctgatcctaatggacctaaagaatttgcatacctggaaatgcagtactgggcagcatcaatcagctgtctcagtgtgctagctttattcctttggcatctacagaagtctcccagcaatgggatctctaaacatttggagtacggctcattgtttatagttttatatctcatgacattctttttgtcctttctactgaagactgatgaaggcttgatggtaacgaccaatatggcgtatatgctctgtcatggagtggctgctgtgatcttaatcaagcatatcctagagaagtttccctcatgcgcatcttttggggaggcgcttttggtgtcaggtggtcttgttctctactttggtgatatgttggcacatacactttcaaagatggagttctccatgtcatcaaaagcattcattcacacacctcaaactagaagcgatatgaccgcaattattcaggattgttaactatatgttcactgattcacatgagcgacttgttttatgtgcatactggatatgtgtaatatatgtatcagttagaaggttctacagtatatcaaagcaaagcaagacagagaggattcttttgcgcaagtattatcatcttgtcgctgttctcattttctctcctgcagttatatttcagcctgctttcttggacttggcatttggtgcagcatttgcagttttcttgatattggagatgttacgaatttgggaaatataccctcttggacgtgttgtgcatcagtttatgaacgcctttactgatcatcgtgattctgagattcttattgtcagccatttttcactcttactgggctgtgcacttccgaaatggatgtcatctggattaaatgaccgaccacttgccccttttgccggaattctcagcttggggataggtgataccatggcatcaatgatagggtacaagtatggcgtgttaagatggagcaagacaggaaagaaaacaatcgagggcacggcagcgggcataacatcggtgctagcagcctgctcgatcctggtgtcactcttggcttccagtgggtacattctttcgcagaattggctatcgctcctgatagctgtcacattgagcgggttattggaggcatacactgcacagctggacaatgccttcatccccctcgtgttctatagtcttctgtgtctataagggtagcatcctgtacatctaactgaccttgatatcctctttttgtttacacgctattagtatatacgtagtgcaatatgttatttcgacattactcacttggtctcctcggcgcatcaactgcctggtgattcagttcaacagatcacattctgtgtaaccctgcctttcggaagttgagaggacgtgctcatggttgagacagtcggtacaggcatatgaccagaagtagaaaaataaaatgttctccagtcgttcagtagagggtgtttttggcggagctgggcagttggatgctgtacataaagttttttttatatgaacctgttgactgttgttgggacgaacagtattgaaacatgctgtgatgctgatcaatttgatcactctatttgctctttctatccatttttaaatacctcatccattccaccctctatttctcctgttctctaaccattccctccaaacattctctctatccaactctatctttacattttaactaagatatttaacttttatacaccatttttagaagctagaatgaataatatctgtaataatattgttatctagtaatctttactaatataaagcactagtttcta

SEQ ID NO: 210256 - DNA, 1202 bp, Zea Mays
cagccggccagtaggtgatgccgcccgcggtggctaatcgggtgccagcagcttcatgttaaatcaaccagccgccgctcccttcttccatttcctggccgccaagcttccaacgtacgcagcctgctcgtcttccacctccggccatcttcctccctctaccgagcttccctccccacagcagcagaccaccggcgctccctgttcttcttccccgtgggcgcccccccttcatccaggcagcagacgacacacgcacgccaggaacgcccgagctctccatctctaatccagcgcgcagggcatttctcagggtccgagctcgagcaggtccggcagccctccccaaccaagcttctcccatggcgctgctacctccaggatggagctcgacaccccaaagattatcgcagcagcgagctccttcgccggcgcctgtccacaacagcagtcccgacgcgacactgtgacccttggtgaggcaccttgctgtcctagccgctggatcgagctttgtcccagcccgcagcttgctatcgtcgagtattgggcttgccgtcgatgtcgtgcttgtcatgcgcagcaagaaccacagcgccacgacttgttccagctcgacgagagcagccacatcgtcgtcgacccgtgcccttgtcgtcatgcctcgcgcattccatgctcgacgaaagccccaagctgtggacagcatgcggacatgcgcgacacgagtcggccaggaccgagagatgatgatcgtgcaagtgatgtggtgccaaccacaagatgaagttggtggacgacctgaagaatgatggacttaaccagtggatgctcgccaagcgagtacccccccaacaaacactatctagtgttaaattaaaggcaagccccggttttatgcataaccgtttatatatatatgctattttactacacttaatgtttgtaggcttgtacagtgcacttaagtgtaggagttgcctgaaaccctagttgcatgaactcagggttccttttgagatatatactagtatgctaggtcgagtagctgctatgctaaatcaggatctcggtagaagtcgagtgatttttctagcactcgcgcgaggtcaggaattggttgtatccatttttgataataagaatgatgatggtctatggacacggatccatggggatgcgttgtctatgagacaaaattg

SEQ ID NO: 210257 - DNA, 1030 bp, Zea Mays
ctgcagccggccagtaggtgatgccgcccgcggtggctaatcgggtgccagcagcttcatgttaaatcaaccagccgccgctcccttcttccatttcctggccgccaagcttccaacgtacgcagcctgctcgtcttccacctccggccatcttcctccctctaccgagcttccctccccacagcagcagaccaccggcgctccctgttcttcttccccgtgggcgcccccccttcatccaggcagcagacgacacacgcacgccaggaacgcccgagctctccatctctaatccagcgcgcagggcatttctcagggtccgagctcgagcagccctccccaaccaagcttctcccatggcgctgctacctccaggatggagctcgacaccccaaagaaattccccctgggcgctggaggcgccaagctcgcgccggtgagcacctcccatggcgtggccatctccctgctgttgccagggccgacgagtccaagtcttgtctctagccttccttgccgactatggctgcccagcagctcgtcacctccctctctagtgcatgccccggctgtcatttccccacgccgagcgtgccctctcgccatcctttgccttgctgctcgcagctgagtttcctactcgtcgcagctcgcgcaccacctgttcgacgttatgcacagtagctgcatgtctcagattatcgcagcagcgagctccttcgccggcgcctgtccacaacagcagtcccgacgcgacactgtgacccttggtgaggcaccttgctgtcctagccgctggatcgagctttgtcccagcccgcagcttgctatcgtcgagtattgggcttgccgtcgatgtcgtgcttgtcatgcgcagcaagaaccacagcgccacgacttgttccagctcgacgagagcagccacatcgtcgtcgacccgtgcccttgtcgtcatgcctcgcgcattccatgctcgacgaaagccccaagctgtggacagcatgcggacatgcgcgacacgagtcggcca

SEQ ID NO: 210258 - DNA, 618 bp, Zea Mays
cctacgcctcgcatggtcggtcgcaccgaacagcacgaccagaccagttgcccggctcaccaaatccaggcgtggccgtgcgaccatccctcccctcatggcgtcatcggcggcgcgatccctcgcgctcgtcgcgtctgcctcggcatcgctcggcgtcgggcagcggtcgtgggctcgcttggctgtctcttcctcttcggctgggtcggccctccccaagctccgcgggctccgctcgttcgccgcctccgcagggggcgccgtgatggggaagccaggccccggggtcgttgacgccgacgccgggatggacgccgtccagcggcggctcatgtttgaggacgagtgcattttagtggatgaacaagacaatgtcatcggccacgagtccaagtataactgccatctcatggagaagatagaagctggaaatgccctgcacagagctttcagtgttttccttttcaactccaaatatgagttgctactgcagcaaaggtctgcaacaaaagtgacatttccacttgtctggacaaacacctgctgtagccatcctctctaccgcgagtcagagttgattgaggaaaattgtgcagttgcgggctttaaaacctt

SEQ ID NO: 210259 - DNA, 1162 bp, Zea Mays
cctacgcctcgcatggtcggtcgcaccgaacagcacgaccagaccagttgcccggctcaccaaatccaggcgtggccgtgcgaccatccctcccctcatggcgtcatcggcggcgcgatccctcgcgctcgtcgcgtctgcctcggccgccgggatggacgccgtccagcggcggctcatgtttgaggacgagtgcattttagtggatgaacaagacaatgtcatcggccacgagtccaagtataactgccatctcatggagaagatagaagctggaaatgccctgcacagagctttcagtgttttccttttcaactccaaatatgagttgctactgcagcaaaggtctgcaacaaaagtgacatttccacttgtctggacaaacacctgctgtagccatcctctctaccgcgagtcagagttgattgaggaaaattgtgcaggggtgagaaatgcagcccagcgcaaactatttgatgagctgggaatagtggctgacgaattacctgtcgaccagttcattccgcttgggaggatgctttacaaggctccttcagatggaaaatggggcgaacacgagttggattacctcttgttcatggttcgtgacgtgaagctcgacccgaatcctgaagaggtggccgatgtcaagtacatgaaccggcatcagctgaaggagctgctcaggaaagccgatgccggggaagatggcgttaagctctccccttggttcaggctggtggtggacaactttctcatgggctggtgggatcatgtcgagcaagggactctgcagggggcagcagacatgaaaaccatccataaattgtaaatcttctagatcgcttaagcacgagtcttgccctgttgaggaataagcgcttgtcctgctgtttggtgctggaggaataatcgataaaattataacagagtgatcttaattctggaacgtaactattaacattgaaccccatctgtgatgtgtaaatttctacctaagtatcgagacatacaaagaaaaagggggcacgccaagtcaattaggttaggcaaattgatacatactatacattcaaaggcaaaggccaaaggatgtttggaagtgaagtttcactgtcttgaaagaatactgcatgtttggaagtgaagtttcactgtcttg

SEQ ID NO: 210260 - DNA, 2562 bp, Zea Mays
agaaggcctggtagggttttttaacagcccattgcatagcctatcgagcgacggcctacgctcaaaaaacacaaatcgctttccgcgccgccgccgcgccgccgaccggcgctcctcacctctcccgccgcacccatcgtccccccgttcccggctaaaccctgcttgagccctagacaccgcccgcctccgggaggtagagagcatgcacgccaggttcctcagcgcgccgtcccctgcctccgccgccccctccccgtacgttcgcttggccttcacgggcgccctcccgcgccgcgcgtgttggaagccgcgaggccccgcgtccgcgtccgcgccgccgcctcggcctctccactcgctgtgcgcccgggcctccatgcagcccgcctctcccgcgcacgacgggcatggtggtccgccggtgcacggcgtctccaacaccgtcatcggggtcctggggggcggtcagctcgggaagatgctctgccatgcagcgagtcagatggggattagaattgtcatcctcgaccctcttcccggctgccccgcgagctcggtttgcgatgagcacgtcatcgggagcttcaacgatggggacacggtccgggagttcgccaagaggtgtggggtcctaacagtggagattgagcatgttgatgccgccacactggagaagctggaaaaacagggcgttgactgcgagcctaaagcctccacaatcacgattattcaggacaagtacaggcagaaaaagcatttctcaagatacgagatcccattgcctgacttcatggaagtagatactttacgcagtatagaggaggctggggaaaagtttggctatcccctaatggtcaaaagcaagagattagcatatgatggtcgaggaaatgctgtagccaagaacaaagaggagctatcttctgttgttgcttcactgggtgggtttgagcggggcttgtatgttgagagatggactcctttcgtaaaggagctttctgtaattgtggcaaggagcagagacaactctactgtctgctatcctgttgtggaaacagttcacaaggaaaatatatgccatgttgttgaagctcctgctgatgtatctaacaaaataaagaagttagctactagcgtggctgaaaaagctatcaaatcattagaaggagctggtgtctttgctgtagagttgtttttaacagaagatgatcagattttattgaatgaggtagcccctaggcctcacaatagtgggcatcacacaatagagtcatgctacacctcacaatatgagcagcatatacgcgctattcttggccttcctcttggtgatccctcaatgaaagcacctgcagcaataatgtacaacatcctgggcgaggatgagggtgaagcagggttctttctggctcatcagcttatcagtagggcactaaccattccaggcacatcggtccattgagatgcggaagcaaaggaagatgggtcatattacaattgtggggccttctaagataagtgtaaaatcacgcttggacaacttgctgcaaagaaactcgtctgatcccaaggaagttagccctcgtgttgctattataatggggtcccaatctgatcttcctgtgatgaaagatgctgagagggttttgaaagagttcgacataccttgtgagttaactattgtttctgcacatcgtacaccagagcggatgtatgattatgcgaagtctgctaaagacaggggtttcgaggtcataattgcaggtgcaggcggagcagctcatttaccagggatggtggcttcattgactcctcttcctgtaatcggagttcccattaagacttcaacactatcaggatttgattccctcctatctattgtgcaaatgccaaaaggtattcctgttgcgactgttgctatcgggattgcagaaaatgcaggtttgctggcagctaggattctggctgcaagagatcctgagctccaggacagggtaactaagtaccaggatgatctgagggacatggttttggagacggcagaaaggctggaggaccaaggcccggaggaatttctgaagggaatggattgaccccttttgaagccctggctctggggcctgggaggaatacgagtgtattatgggtcggcgataactcactgtccactcgattatggtttaagatggggagtcatcaagaagatactttaataggctcggctgcattcgattttccttacaattcttttttgataattgtgctatcttaacccatctcaacatgcccttttcccttctaatatagggtatgaattttgggtttagagggggaaaaaagaatgggagtaaacgttgtacgtacgaaaaataaaacggttcgagtaacgtaaaaaacatgcctggatttttcagccgcacaagttgctttgagtcaagtaattgtacatattccctccgttctaaataaggccttgtttggttattaccattgttcatggattggatttggttattatcattgcacatggattgaatgagattataaaaaattaagaag

SEQ ID NO: 210261 - DNA, 2541 bp, Zea Mays
tgcatagcctatcgagcgacggcctacgctcaaaaaacacaaatcgctttccgcgccgccgccgcgccgccgaccggcgctcctcacctctcccgccgcacccatcgtccccccgttcccggctaaaccctgcttgagccctagacaccgcccgcctccgggaggtagagagcatgcacgccaggttcctcagcgcgccgtcccctgcctccgccgccccctccccgtacgttcgcttggccttcacgggcgccctcccgcgccgcgcgtgttggaagccgcgaggccccgcgtccgcgtccgcgccgccgcctcggcctctccactcgctgtgcgcccgggcctccatgcagcccgcctctcccgcgcacgacgggcatggtggtccgccggtgcacggcgtctccaacaccgtcatcggggtcctggggggcggtcagctcgggaagatgctctgccatgcagcgagtcagatggggattagaattgtcatcctcgaccctcttcccggctgccccgcgagctcggtttgcgatgagcacgtcatcgggagcttcaacgatggggacacggtccgggagttcgccaagaggtgtggggtcctaacagtggagattgagcatgttgatgccgccacactggagaagctggaaaaacagggcgttgactgcgagcctaaagcctccacaatcacgattattcaggacaagtacaggcagaaaaagcatttctcaagatacgagatcccattgcctgacttcatggaagtagatactttacgcagtatagaggaggctggggaaaagtttggctatcccctaatggtcaaaagcaagagattagcatatgatggtcgaggaaatgctgtagccaagaacaaagaggagctatcttctgttgttgcttcactgggtgggtttgagcggggcttgtatgttgagagatggactcctttcgtaaaggagctttctgtaattgtggcaaggagcagagacaactctactgtctgctatcctgttgtggaaacagttcacaaggaaaatatatgccatgttgttgaagctcctgctgatgtatctaacaaaataaagaagttagctactagcgtggctgaaaaagctatcaaatcattagaaggagctggtgtctttgctgtagagttgtttttaacagaagatgatcagattttattgaatgaggtagcccctaggcctcacaatagtgggcatcacacaatagagtcatgctacacctcacaatatgagcagcatatacgcgctattcttggccttcctcttggtgatccctcaatgaaagcacctgcagcaataatgtacaacatcctgggcgaggatgagggtgaagcagggttctttctggctcatcagcttatcagtagggcactaaccattccaggcacatcggtccattggtacgcaaagccagagatgcggaagcaaaggaagatgggtcatattacaattgtggggccttctaagataagtgtaaaatcacgcttggacaacttgctgcaaagaaactcgtctgatcccaaggaaggccctcgtgttgctattataatggggtcccaatctgatcttcctgtgatgaaagatgctgagagggttttgaaagagttcgacataccttgtgagttaactattgtttctgcacatcgtacaccagagcggatgtatgattatgcgaagtctgctaaagacaggggtttcgaggtcataattgcaggtgcaggcggagcagctcatttaccagggatggtggcttcattgactcctcttcctgtaatcggagttcccattaagacttcaacactatcaggatttgattccctcctatctattgtgcaaatgccaaaaggtattcctgttgcgactgttgctatcgggattgcagaaaatgcaggtttgctggcagctaggattctggctgcaagagatcctgagctccaggacagggtaactaagtaccaggatgatctgagggacatggttttggagacggcagaaaggctggaggaccaaggcccggaggaatttctgaagggaatggattgaccccttttgaagccctggctctggggcctgggaggaatacgagtgtattatgggtcggcgataactcactgtccactcgattatggtttaagatggggagtcatcaagaagatactttaataggctcggctgcattcgattttccttacaattcttttttgataattgtgctatcttaacccatctcaacatgcccttttcccttctaatatagggtatgaattttgggtttagagggggaaaaaagaatgggagtaaacgttgtacgtacgaaaaataaaacggttcgagtaacgtaaaaaacatgcctggatttttcagccgcacaagttgctttgagtcaagtaattgtacatattccctccgttctaaataaggccttgtttggttattaccattgttcatggattggatttggttattatcattgcacatggattgaatgagattataaaaaattaagaag

SEQ ID NO: 210262 - DNA, 1220 bp, Zea Mays
gtaacagatggtctctgttattacctgcgtggctgcttggatcctgagaacttcaggaagttcaaacttgttgaaaagaagcaaataagtcataatgttgccaggttcaagttcgctcttccaactccaacttctgtattgggccttccaatcggtcaacatatcagctgcagaggacaagacgctacaggtgaagaagtaatcaagccttatacccctactacattggattctgatcttggatattttgagcttgtcataaagatgtatccccaagggagaatgtcccatcatttccgcgagatgaaagttggtgattatttgtctgtgaagggacctaagggccgattcaagtaccacgttggccaagtgagggcatttggaatgctggctggtggatcaggcattactccaatgtttcaagttgccagagcaattcttgagaaccctaatgacaacaccaaggttcacttaatttatgctaatgtcacatatgaagacattcttctgaaggatgagctggacgacatggccaaaacctatcctggccgctttaagatctactatgtgttgaatcagcctcctgagaactggaacggtggtgttgggtttgtgtctaaggaaatgatccaatctcattgtccagcgcctgctgaggacattcagatcctgagatgtggtcctcctccgatgaacaaggccatggctgcacaccttgacgagctcaactacacaaaggagatgcagttccagttctaagcaatgttaagtttgcaaataataattagtgaccgacatggttcttcggtcacaggaatagtacctgactctgctcgttagctgatatcaggaggaattcaggatcacatgatgattagtagtgcgccagcattttttgcaatctctatttttgaggtcaaatgatatctacctccacataaatccacattggcagagacaacattttgttactatcattattgattttaaatgtggaccattggatgcgataagaaatgtctcactatcatcagttaaccatagcaatgcaaagaaccttacttttggttcatatatacaaccaaaaagcaaacattttggttatgctgtttccttaaaccgtgacatggattgggaatctctcttcttatctggagtaagcattttggttatgcagtcaccttagccgttaaatcgacaattctgagacatgacattgc

SEQ ID NO: 210263 - DNA, 2360 bp, Zea Mays
ggagaacacctgcatcacgtgtttgactcgttgcctgtgctagtcgccacgttttctgttggattcagcttagtacgtgattttggagctcgtgccggatggttgacttgtgctttggcctttcggcttttggcagcgcgaccgagctttttggaagagtgagagaccgttttcctagttctgttgctatgaattatacgcaaagtggacagtatatacggcatacatacatgtttacgaaattctataagtaaggaatgggctatttcatacaaataattgagcctgcaggctgcagccatgatgaatatgttatttactgtcgtaatgttagctgaattttggtggtaacaaatggagctaccatgctaccttatctgcctttggagtgggtctatgcttattgctcgggcacacttgtgacttgtggaagaacataatcacagaaccctgtcggaatacatttcagaatgaataggtcaatggagtaagctttctagctgctacctgtatgaaattagatcaaacagaggacctgtcatgaagagtgatggtcccctgttatctcatgtactatattgcttgatgctgacgataggatgtaaattacttcaaccccatatttggatgatggttcaactggataagaataaccatttcatagaatagatacatcattgtcttcatctaactatctatctatctagccttttgaactgaaacctgctcatttgttgcatgacgaaattggaacaaaggaaggtggtcccactgaggaaaaacacgagagaaaaatcaacaaaccattttcacttttagggtggggggattagtgtggaagatttgagtcattgttaagtggtgaatgaggttttgattgcacaattaaactcgtctttcatttatatgtgctgcttactggaaggttggagaactgtgaacgggttactgtagttgggctgattatgttggagttactaatgatacccccttttgcattcatgactgaaattgcgctggaagtcacttttgcattgcattcaaaatcattcatctaatccgatctctatgctgcgagtttggacattgcgatctgcttataataccagttgaaggagttctgcacaatgcatgtgttgctagtgatgtttaacaaagcagctctctcttcgtataatttcccttgtgcgaatgtcatcacactccttcagatggtgtgctcaacgtgccttctttatgttctgagacgattaaagatcatctccttcactaatagtgatccatcagtgccttctgattcactattctttgtgccgtttaggttattactacgcaccacacctctttccttggcttatttactctacatgctagcttcaatggaatcggtccgtggagttaatgttcctatgtatacaactctacggcgcacgacagttgtgtttacaatgacaatggagtatttcctggcaaagcagaagcacaccccacctataataggcagtgtggctttgattgtattcggagcattcgttgctggagctcgagacttgtcatttgatgctcgtgggtatgctattgtctttgtggccaacattacgacagccatttaccttgctactatcaaccgtataggaaaatctagtggcctcaatagctttggcctgatgtggtgcaatggacttgtctgtggaccttcagtactgttattgacatatattcagggtgacctaaagagggccatggaatttccgtacctttattcccctgggttcatgactgtgctgctattttcgtgcatcctagcatttctactgaactacactatcttctggaacacaatcctgaattctgcactcacacaatcgatgtgtgggaacttgaaggatttcttcaccgttggaattggttgggtgctatttggtggacttccttttgatcttcttaatgttataggacaaggactaggctttctgggctctggattgtatgcctactgcaagatcaaaggaaagtagacgctgatgtctagtgggatcaactgggggtagacggtggtgtgacttggtgtttcattcagggccagtgtgcttaacaaaagtagcgttgtttatgctgtttgctcctacatatgggagagaaattttgtaggtttcctgtatgtattagacttcagccctaatgaacactgcaaaactgaaaaggaaatagagtataccgaatttttactgttaccttatgagttatgaccgtttctcttttaaactcgaatagacgtgcaaaatacaatgaacttatgtagaagacccagaaactttcatagcttactaaaaaatctcagtatccgtttcacaaatcaa

SEQ ID NO: 210264 - DNA, 2351 bp, Zea Mays
aaattgcgctggaagtcacttttgcattgcattcaaaatcattcatctaatccgatctctatgctgcgagtttggacattgcgatctgcttataataccagttgaaggagttctgcacaatgcatgtgttgctagtgatgtttaacaaagcagctctctcttcgtataatttcccttgtgcgaatgtcatcacactccttcagatggtgtgctcaacgtgccttctttatgttctgagacgattaaagatcatctccttcactaatagtgatccatcagtgccttctgattcactattctttgtgccgtttaggttattactacgcaccacacctctttccttggcttatttactctacatgctagcttcaatggaatcggtccgtggagttaatgttcctatgtatacaactctacggcgcacgacagttgtgtttacaatgacaatggagtatttcctggcaaagcagaagcacaccccacctataataggcagtgtggctttgattgtattcggagcattcgttgctggagctcgagacttgtcatttgatgctcgtgggtatgctattgtctttgtggccaacattacgacagccatttaccttgctactatcaaccgtataggaaaatctagtggcctcaatagctttggcctgatgtggtgcaatggacttgtctgtggaccttcagtactgttattgacatatattcagggtgacctaaagagggccatggaatttccgtacctttattcccctgggttcatggtaacattaatttgtgcattgctgaccctccttttgtcagttttagtaggcatttaaaggctgtttgtggatgcacatcacgaaattcaaaaaccacgagtaatgttaattagcttcatcggtgtgcttgtactgtcagttactcagttagccagttagcccttgaactcaagctgcgtctggaagtttagtttgcaagatattgttctgtttgtgtactttcaattggccagttagccttgaactcttgctgcggctggaagtttagttttgcaagatattgttctgtttgtgtactgtcaattgcccagttagccttgaactcttgctgtggctggaagtttagtttgcaaaacattgttctgtttgttccactatctttgagatccggccattcaagtccagaaaaactgccactgaaggaaattttcttagttttttcccatgccccaaacctccattccaaagggtgctatggtaccaagaatcccaagtttttcccgtgaaatttctttgatccaaaggagcccttagcttggattgcagatgttactgaagcacgtgagcactaccttgggtgtagtcagtctcattcactgtcacccaagtcaagttttgtggtgctgataattttgataataccaccctctagtcctttaataccatttatcatgttctaatctaccaacaattatccataataccatagcaagggacatgtcagccaccattacaatgacttgttgatagtgcctccagtttatatcgaaattctttcattcagtgcgattactagtgtatagtactatagtatagctgctgtaggtgatcttgaggtcattttacattctaacttgtttattttttataccatactaatttaacactcaaaacaggtagacaacgaaatagtgagtaatgtcaagtagttccattacagcatctaatgccaataatgtgaagttatgaatgtcactaataacgaaatttcacttgtagactgtgctgctattttcgtgcatcctagcatttctactgaactacactatcttctggaacacaatcctgaattctgcactcacacaatcgatgtgtgggaacttgaaggatttcttcaccgttggaattggttgggtgctatttggtggacttccttttgatcttcttaatgttataggacaaggactaggctttctgggctctggattgtatgcctactgcaagatcaaaggaaagtagacgctgatgtctagtgggatcaactgggggtagacggtggtgtgacttggtgtttcattcagggccagtgtgcttaacaaaagtagcgttgtttatgctgtttgctcctacatatgggagagaaattttgtaggtttcctgtatgtattagacttcagccctaatgaacactgcaaaactgaaaaggaaatagagtataccgaatttttactgttaccttatgagttatgaccgtttctcttttaaactcgaatagacgtgcaaaatacaatgaacttatgtagaagacccagaaactttcatagcttactaaaaaatctcagtatccgtttcacaaatcaa

SEQ ID NO: 210265 - DNA, 2734 bp, Zea Mays
aaatccaactgatctcgttaaagttaggttgcaagctgatggaaaggctaacacagtcaagaggagttattctggagcccttaatgtatatgctacaataatcagacatgttactttaaccatcatgggcacatggctcatttttgaatgtttgctggtgggaggatcgtctcttctatgtctacaagaatattttgccagtgatgacggtgtttagaggatgggatccttgcaattgtcaaacaagatgagagaccccttgaattgcttgctaaagaatatgctatcaactcttttgacatagatcctcaaaacccctctgatgttgttttcacgttagaatgggaatcaatcggtgtcctaccttgtggctagaagaaagaaaatttttactaccgagggatctcaattagaattttaggctcattcatacattcactacaatgccttcgaactcatgaacatttatctctggctctattgtggtgggttacatgaatagagtttttgcatgttcttcgtttcatatggtggcatacttgttactatgtgacattgtttgatgaaacccttgcgacattgtattatttattttgttctatatagtcttaacattttatcaaataagaatttatgtgacatcacaacacattgtactatcatatatagaagtcgacattgtattgatggttgcaatgtagtggtcccgttgcaacgcacggtggttggaagactcgatcatacgacgccagcaaagaggccaattctggtcgttgcgcaggcagcgtggcacgtcattcggcgatcgtggaaaggccttctgccatgagcccatgacgcgcatacgctcgcggcggaagcgaacgggtacttgtcacgtcctttccgagaacctcacagcagagtagcagaccacattttgttttgcagctggtgccgcaacccggacggccggaccggacggacggcatctgctccctgcccgtgggcggctggccccgatataaaactgacaagagatagactaatcaagtctctcaacccgagtctaatcttggtccccaatccaatcccgcacccaccattgcgagagatcatcagaggaccgcgtccaatcgaagcggagaggaggagaagggtgtgctgatggcgacggcggtggcggccacggccgcggcggcgggtggcagcaatgtcgagttcatccgcgcgcgcagcgacaagcgggagtaccgccgtgtggtgctcgcaaacgcgctcgagatcctactaatcagcgaccccgacactgacaaggcggcggcgtgcatggaggtcgaggtgggctcgttcagcgacccggagggactcgagggcctcgcgcacttcctcgagcacatgctattttatgccagcgagaaatatcctggagaacacgagtatacgaaatatatcacagagcacggtggctcttacaatgcatatacaagctcagagacaacaaacttctttttcgatgtcaatgtggacaattttgaagaagccttagatagatttgctcagttcttcattaagccactgatgtcacaggatgctgttcttagagagataaaagctgttgattctgaacacaagaaaaatttgttgtccgatggctggagaatgtatcagcttcaaaagcatctggcttcaaaggatcacccttaccacaaattcagtacaggaagttgggaaacactagaaactaaaccaaaagcgaggggcgtggacatcagacttgaacttctgaagttttacaagaattattcagcaaaccttatgcaccttgttgtttatggaaaggagagcctcgattacattcagggcttggttgagcgtatgtttagtgacataaaaaacactgatcagagatgcttcaaatgtccaagtcatcctctttcagaggaacatttgcagcttcttgtcaaagcactaccaatagaagaaggggactatctaagaattatatggccaattactcctagcatccagttttacaaagaaggtccttgccattatctaagtcacctcattgggcatgaaggcgaggggtccgtcttccatattataaaggaactaggatgggccatgaacttaatggctggagagagcactgacagtaatgaatattcctttttctcagtaagcatcaggctcaccgatgctggtcatgaacacatggaggatattgttgggttgatctttaaatatcttcatctattaaaagtagacggagtccacgagtggatatttaatgagcgataaatgaaatggagttccattatcaagacaaagttgatccaataagctatgtgatgcgtactgtctcaactatgcggttgtttccaccagaagaatggctggttggagcagcattgccatcaaagtatgcaccacaaagaataaatatgatactcgatcaactatcacctgaaagatgttatgcaccttgagtccagccaatgtaacccactagtgttaggtatatgtaatacaaagatcactattaatgacttagggtttttactctccaacattggagttttttcttttgcaccttccctagccgtcgcctgcccactagggatgccaccaccatggtcgacggccctcctctccccctacgggctctcctctcctccctcattggtctttggtagatgctgggattccttccaccccaaccccaccaccatccccagcctctagttgtctg

SEQ ID NO: 210266 - DNA, 2763 bp, Zea Mays
aaatccaactgatctcgttaaagttaggttgcaagctgatggaaaggctaacacagtcaagaggagttattctggagcccttaatgtatatgctacaataatcagacatgttactttaaccatcatgggcagtgtgattacatgagtcatatctgcagcatggctcatttttgaatgtttgctggtgggaggatcgtctcttctatgtctacaagaatattttgccagtgatgacggtgtttagaggatgggatccttgcaattgtcaaacaagatgagagaccccttgaattgcttgctaaagaatatgctatcaactcttttgacatagatcctcaaaacccctctgatgttgttttcacgttagaatgggaatcaatcggtgtcctaccttgtggctagaagaaagaaaatttttactaccgagggatctcaattagaattttaggctcattcatacattcactacaatgccttcgaactcatgaacatttatctctggctctattgtggtgggttacatgaatagagtttttgcatgttcttcgtttcatatggtggcatacttgttactatgtgacattgtttgatgaaacccttgcgacattgtattatttattttgttctatatagtcttaacattttatcaaataagaatttatgtgacatcacaacacattgtactatcatatatagaagtcgacattgtattgatggttgcaatgtagtggtcccgttgcaacgcacggtggttggaagactcgatcatacgacgccagcaaagaggccaattctggtcgttgcgcaggcagcgtggcacgtcattcggcgatcgtggaaaggccttctgccatgagcccatgacgcgcatacgctcgcggcggaagcgaacgggtacttgtcacgtcctttccgagaacctcacagcagagtagcagaccacattttgttttgcagctggtgccgcaacccggacggccggaccggacggacggcatctgctccctgcccgtgggcggctggccccgatataaaactgacaagagatagactaatcaagtctctcaacccgagtctaatcttggtccccaatccaatcccgcacccaccattgcgagagatcatcagaggaccgcgtccaatcgaagcggagaggaggagaagggtgtgctgatggcgacggcggtggcggccacggccgcggcggcgggtggcagcaatgtcgagttcatccgcgcgcgcagcgacaagcgggagtaccgccgtgtggtgctcgcaaacgcgctcgagatcctactaatcagcgaccccgacactgacaaggcggcggcgtgcatggaggtcgaggtgggctcgttcagcgacccggagggactcgagggcctcgcgcacttcctcgcacggtggctcttacaatgcatatacaagctcagagacaacaaacttctttttcgatgtcaatgtggacaattttgaagaagccttagatagatttgctcagttcttcattaagccactgatgtcacaggatgctgttcttagagagataaaagctgttgattctgaacacaagaaaaatttgttgtccgatggctggagaatgtatcagcttcaaaagcatctggcttcaaaggatcacccttaccacaaattcagtacaggaagttgggaaacactagaaactaaaccaaaagcgaggggcgtggacatcagacttgaacttctgaagttttacaagaattattcagcaaaccttatgcaccttgttgtttatggaaaggagagcctcgattacattcagggcttggttgagcgtatgtttagtgacataaaaaacactgatcagagatgcttcaaatgtccaagtcatcctctttcagaggaacatttgcagcttcttgtcaaagcactaccaatagaagaaggggactatctaagaattatatggccaattactcctagcatccagttttacaaagaaggtccttgccattatctaagtcacctcattgggcatgaaggcgaggggtccgtcttccatattataaaggaactaggatgggccatgaacttaatggctggagagagcactgacagtaatgaatattcctttttctcagtaagcatcaggctcaccgatgctggtcatgaacacatggaggatattgttgggttgatctttaaatatcttcatctattaaaagtagacggagtccacgagtggatatttaatgagcttgaagcgataaatgaaatggagttccattatcaagacaaagttgatccaataagctatgtgatgcgtactgtctcaactatgcgggtaatatattgtcttgtggtattctcttttattgacaacactaatcaacaaacattctactgattgtttccaccagaagaatggctggttggagcagcattgccatcaaagtatgcaccacaaagaataaatatgatactcgatcaactatcacctgaaagatgttatgcaccttgagtccagccaatgtaacccactagtgttaggtatatgtaatacaaagatcactattaatgacttagggtttttactctccaacattggagttttttcttttgcaccttccctagccgtcgcctgcccactagggatgccaccaccatggtcgacggccctcctctccccctacgggctctcctctcctccctcattggtctttggtagatgctgggattccttccaccccaaccccaccaccatccccagcctctagttgtctg

SEQ ID NO: 210267 - DNA, 5619 bp, Zea Mays
ctttttttgagttccagtccaagcagtgagcgtctgcaggtggataaacccttagtctatgattacgcggcgccgcagtttagcttagcggtttttgcggtactttctaccatgtgcgtttccacttcgtacgccgctcgttaatttttcgtggattactgagttcatttagcattgatattttttcatcgtttcttcttcttttggcacccgaggcttgccggctgctatgaccgactgatgaatgcaggttgttgctagtatgatatggtatatacatatacaatcagagaacgggcctggagattgcattgcaccataaggggggccagctccaaaatattactgtagcaggaaccaggaattgctgaaatgtacgaaatagaattgaatcttctcagagctagtttaagtatataatgtcatcgcgagacttttaccaaaatggaactgggaatcacagattggttgtggtcttctgggcgtaaatctccctagaactagtaaagacatcgccctcaaggactggcatttactttttccctctcctggtttcatagagaaatgaaacagggcggttttggagggagcaaaaaaaaagtagatttcaatgccattttggactgcccatagatatggtatgacatatattcgtttcccaggggtctactgtattattattatactaatggcaccgaaatggccgcggcttcatttaatgcgatgttgttgtcttttgtcccccattttctgcatgtcattttgtcaacagattcccacggacattgctaaaaccatgtgctgtggcaattactgccatcatagtttggtacttagtggttcctgtaattgcattagcatgtcaaatttgatgctacaaatcgcaaacaaagaggaataaatagaacggtagaggtttgcatgttaatattttaccagtttcccactagttttttttcttgaaaacgaatactccatagctcagagagtatggcaccctgaaagcaacatggttgcaagcttttgcatagaaaaatagttttgactttggatgctgatgtattgcttgagttaccatatctcttggctttactaacttctttgtgcagttgtgcatcagtccaaatacaggtcaacttaccattgaaacaagcgattccacacattttaaagccctgtctttttcttcatttatatattatataaagagtgcttacctctgacccactacgaaggtctcacaccagaaccagattatacatccttaacaaatactcaaagtttgtcgtcaaaataccttgatgacagaatgatggaaaggctttcagcgctggttcttgatggtgacccagcgtccttgtcgaccatctctgagacgcttgcaaagttcaacttcagaggtgcatgcggatcttgaaccattccattttggaacccctcttcctttctgcatttttttctaaaaaaatgaagtgtgttctagagggaaaaaggaagtcaacaggcacagtattcatttcaagcaatctgaaatctttaaaactgagaacctgtatatcaaattaactcatccctattattttccctggaaaagaatttctatatatgttagttgtggtatcatatttgcagtctgtatgaattctgaagctgatggggtgaaaacatgttgacctagatctattttgacaatacttaaagtattccttctcttgacaaagaagtagaggaattcagatcctctgccctaaaaatcaatctacacctactatatgatattcaaggggcttctgtagcatattttgtttcaaggatgtttggtgtcttttcctatttgtgagtgcttacttggattctgatctgcggttatcataatattacacttgttgtatatcataagtttgggtatatgatatgacactttagattccaatatctgaatattccattttgtcgcgtatagtaagtttgggtgcactatgtgacgacgtgacgttttagattctgatttctggatattccattttgtcgtatataataagtttgggagtacagtaggatgcattggattccaatttctgaggattccattttgtcgtatatcataagtttgggcatacagtatgacacaatgtttttaagtcgaacgacttgctggtcgttctggctgaccgacaaggacgattaatcgtgattggttcaaaccgacttggacgattaatcgcgactaatcgcgataaatcggacgacttgaaaacattggtatgacgctttggattccaatttctgagtattccattttgtcgtatatcatacgtttgggtttatgcctttatggtatggtgctttagattccaatctctgaatattccattttgtcgtgtatcatatgcttgattatacagtatgacactttaaattcagtttctgaacgtatcattttgtaacgtatcatatgttttggtgtatggtatgacgctttagattccaatatctgaatattccattttgtcgtgtagcttaagattgggtgtacggtagaggattatgtggactcaaaagtggaggtgtggatacatttgttaattggatttttactagctttactaatttcgacaggctcatatcaaagaacattaaaaaaccacgctggaatagatccatcatttggaacactgagaggagatcctgtttgttgaaagttgtttattggttccttctgcttcgctggaatttctcaccatgaaagttttccttaggagtctaattaaaaattatgtgttgggcctatttgtcaagtgcacggtccattaagtgtagaacagtgataaatacactgtggtatgaaatttccaagtattttaatcttattacctttattgttgcgtagttgtttccttccaaacagcagaagcggccctggatttcattaaatgtggggctgctaaagcagcggaccttgatttggtgttggtggaggttaatcttaacaatatggcaccaggcacttcagcaaaccctgatctgttccatcacatactgaatgaacttcaagtccctcttaccgcaatgtgttctcgtgacgatgaagaggcactttccaaatgtatgaacctgggtgcatgcttccatctgctgaagccactgaacagaagaagcttcagcattctgtggcaccaagcactggaacacaagtctaaaaaggcagcacctcaaagaccaagtcttaatgatagtaccaaaaatagaatggtttcaccatctactgaaaaacccaaggaagtccttattctagagagaaacaatttatctgttcctcaaagcaatggatatgaagagccaaagaagcagaatcgggtcacatggaccattgaactccatgaaaagttcttggaggctgtcgaagctcttggggggaacaagtctgctagacctgagaagatcctgcacctgatgaatgtaaagggtttgactgtgaagcatataggcagccatctccagaaacatcgattgcgcaaccagaatacaaaacaaggacagcgccaagagaatgccagcagaaaacctatatcaaggcaaggtgaagccacttctgaatccatcacacccagagttgagacagacggggaagtgtacccctcaaggctgtggacaaaggtgaagaaaaggtcagtagacacatcggctctgaagactggcatgcacacatgcacatctggaaacgacaatgagggcacagagtctgtgtgggataggtatgaaaataacctgcaagtgttcgctgagaacaagaaacgttggatgttcacgagcgaacatcagtggcctcggagaaacaatattgataccacagacgaaggggatccaaatgaagcccccgaaactgctgctggtgcatccatagaaatctttggttcaagcagcttaataagtgatcaagtgggagagaaaaatcgtgttgaatctgacagagacaataacaccgtgtggagcactgatttactagaaggttatggtgcatccatagaaagctctggttcaagcagcctgttagcaaatgatcaagtgggagagaacaatcattctgaagctgccagagccaatgacagcatggggaacattactttgcttgaagcttacggtggtgcatacataggaacctctggttcaggcagcctgttaacaggcgatctagtcaggcagaacggttgtgctgaagctaccagacacaatgacaatttgtggggcgttaatctacctcaaggttatggcgcattcacagaaatctctggttcgagcaacatgttaacgagttatcaagtgggagagaacaatggcactgaatttgccagagacaatggccacatggagaacattagtttgctcgaagtttatggtgcatccatagaaaacgctggttcaagcagcatgttaacaagtgatcaagtcggacaaagcaatcttaccgaagctgacagaatctatgacaccatggggagcattaattaccttgaaggtaccgtggacccggagtacattgcaccaatggattattctgttgcttgggcgcacctagagggcaatggtccggacctgagaagcccttctgatggccgggaggaagcatattcattttggatgagtcagctggcaggaccacaagactatcaaagccttggcccggagggtttccttcaagtaggtgacgacgcatataacgatgctctgagatcggttggtctggttaacgtggatgaacaagcgactcaaggatggcaagagcagcaaagcctcagcatggaagatctcctgcaggtagatgacgttgcatgggatgacactctgatatctatggggcttatcaacttgttagatgaaccaatggctgaagaggccgccattggaggatcacaaggtcagcaaagcctcgccccggaggtcctccaagcaggtgacaatgcgtacggtgatgatcttgggtcgattgagatggtcaacttgttaaacgaaccaatgactcaagaagccgctattgccgatgctctggtggacgatcctatgaccctgattgcccaagacgatgtgccgtgggcttggagtcctgcagtgccgggtgactatggcattgattggatccaggatcctaacgcagaactgtatgggtaaaagatcgatgaccgagccgtggttgcgtacaagaatcggaccgggtggaagagaggtgtgagacagccttgagtccagtcaaaaataattgacttgcttactttattctaaaactgtttttggatggatttattctcttttatcgacaatcactccccattttacttctaatgaaagcaatgtaagggctagtttggtaaccctattttctcaagggattttcattttcctaagagaaattagttcatttttccataggaaaatagaaatctcttaaaaaaatggggttctcaaactagaaaaatcatggtattttgtttataaggggagtttggtttctagggactaatgtttaatccttccatattatttcattgtacttgtcggagagaaaattctccggccgggtggcggagtgcacccgtcctaaatcttaagatgaggaaggagttt

SEQ ID NO: 210268 - DNA, 5683 bp, Zea Mays
caccggtgccgccggtgtccggttgtcggtttgtgcgcctaaggactgctctatttttctttttttgagttccagtccaagcagtgagcgtctgcaggtggataaacccttagtctatgattacgcggcgccgcagtttagcttagcggtttttgcggtactttctaccatgtgcgtttccacttcgtacgccgctcgttaatttttcgtggattactgagttcatttagcattgatattttttcatcgtttcttcttcttttggcacccgaggcttgccggctgctatgaccgactgatgaatgcaggttgttgctagtatgatatggtatatacatatacaatcagagaacgggcctggagattgcattgcaccataaggggggccagctccaaaatattactgtagcaggaaccaggaattgctgaaatgtacgaaatagaattgaatcttctcagagctagtttaagtatataatgtcatcgcgagacttttaccaaaatggaactgggaatcacagattggttgtggtcttctgggcgtaaatctccctagaactagtaaagacatcgccctcaaggactggcatttactttttccctctcctggtttcatagagaaatgaaacagggcggttttggagggagcaaaaaaaaagtagatttcaatgccattttggactgcccatagatatggtatgacatatattcgtttcccaggggtctactgtattattattatactaatggcaccgaaatggccgcggcttcatttaatgcgatgttgttgtcttttgtcccccattttctgcatgtcattttgtcaacagattcccacggacattgctaaaaccatgtgctgtggcaattactgccatcatagtttggtacttagtggttcctgtaattgcattagcatgtcaaatttgatgctacaaatcgcaaacaaagaggaataaatagaacggtagaggtttgcatgttaatattttaccagtttcccactagttttttttcttgaaaacgaatactccatagctcagagagtatggcaccctgaaagcaacatggttgcaagcttttgcatagaaaaatagttttgactttggatgctgatgtattgcttgagttaccatatctcttggctttactaacttctttgtgcagttgtgcatcagtccaaatacaggtcaacttaccattgaaacaagcgattccacacattttaaagccctgtctttttcttcatttatatattatataaagagtgcttacctctgacccactacgaaggtctcacaccagaaccagattatacatccttaacaaatactcaaagtttgtcgtcaaaataccttgatgacagaatgatggaaaggctttcagcgctggttcttgatggtgacccagcgtccttgtcgaccatctctgagacgcttgcaaagttcaacttcagaggtgcatgcggatcttgaaccattccattttggaacccctcttcctttctgcatttttttctaaaaaaatgaagtgtgttctagagggaaaaaggaagtcaacaggcacagtattcatttcaagcaatctgaaatctttaaaactgagaacctgtatatcaaattaactcatccctattattttccctggaaaagaatttctatatatgttagttgtggtatcatatttgcagtctgtatgaattctgaagctgatggggtgaaaacatgttgacctagatctattttgacaatacttaaagtattccttctcttgacaaagaagtagaggaattcagatcctctgccctaaaaatcaatctacacctactatatgatattcaaggggcttctgtagcatattttgtttcaaggatgtttggtgtcttttcctatttgtgagtgcttacttggattctgatctgcggttatcataatattacacttgttgtatatcataagtttgggtatatgatatgacactttagattccaatatctgaatattccattttgtcgcgtatagtaagtttgggtgcactatgtgacgacgtgacgttttagattctgatttctggatattccattttgtcgtatataataagtttgggagtacagtaggatgcattggattccaatttctgaggattccattttgtcgtatatcataagtttgggcatacagtatgacacaatgtttttaagtcgaacgacttgctggtcgttctggctgaccgacaaggacgattaatcgtgattggttcaaaccgacttggacgattaatcgcgactaatcgcgataaatcggacgacttgaaaacattggtatgacgctttggattccaatttctgagtattccattttgtcgtatatcatacgtttgggtttatgcctttatggtatggtgctttagattccaatctctgaatattccattttgtcgtgtatcatatgcttgattatacagtatgacactttaaattcagtttctgaacgtatcattttgtaacgtatcatatgttttggtgtatggtatgacgctttagattccaatatctgaatattccattttgtcgtgtagcttaagattgggtgtacggtagaggattatgtggactcaaaagtggaggtgtggatacatttgttaattggatttttactagctttactaatttcgacaggctcatatcaaagaacattaaaaaaccacgctggaatagatccatcatttggaacactgagaggagatcctgtttgttgaaagttgtttattggttccttctgcttcgctggaatttctcaccatgaaagttttccttaggagtctaattaaaaattatgtgttgggcctatttgtcaagtgcacggtccattaagtgtagaacagtgataaatacactgtggtatgaaatttccaagtattttaatcttattacctttattgttgcgtagttgtttccttccaaacagcagaagcggccctggatttcattaaatgtggggctgctaaagcagcggaccttgatttggtgttggtggaggttaatcttaacaatatggcaccaggcacttcagcaaaccctgatctgttccatcacatactgaatgaacttcaagtccctcttaccgcaatgtgttctcgtgacgatgaagaggcactttccaaatgtatgaacctgggtgcatgcttccatctgctgaagccactgaacagaagaagcttcagcattctgtggcaccaagcactggaacacaagtctaaaaaggcagcacctcaaagaccaagtcttaatgatagtaccaaaaatagaatggtttcaccatctactgaaaaacccaaggaagtccttattctagagagaaacaatttatctgttcctcaaagcaatggatatgaagagccaaagaagcagaatcgggtcacatggaccattgaactccatgaaaagttcttggaggctgtcgaagctcttggggggaacaagtctgctagacctgagaagatcctgcacctgatgaatgtaaagggtttgactgtgaagcatataggcagccatctccagaaacatcgattgcgcaaccagaatacaaaacaaggacagcgccaagagaatgccagcagaaaacctatatcaaggcaaggtgaagccacttctgaatccatcacacccagagttgagacagacggggaagtgtacccctcaaggctgtggacaaaggtgaagaaaaggtcagtagacacatcggctctgaagactggcatgcacacatgcacatctggaaacgacaatgagggcacagagtctgtgtgggataggtatgaaaataacctgcaagtgttcgctgagaacaagaaacgttggatgttcacgagcgaacatcagtggcctcggagaaacaatattgataccacagacgaaggggatccaaatgaagcccccgaaactgctgctggtgcatccatagaaatctttggttcaagcagcttaataagtgatcaagtgggagagaaaaatcgtgttgaatctgacagagacaataacaccgtgtggagcactgatttactagaaggttatggtgcatccatagaaagctctggttcaagcagcctgttagcaaatgatcaagtgggagagaacaatcattctgaagctgccagagccaatgacagcatggggaacattactttgcttgaagaaatagcttacggtggtgcatacataggaacctctggttcaggcagcctgttaacaggcgatctagtcaggcagaacggttgtgctgaagctaccagacacaatgacaatttgtggggcgttaatctacctcaaggttatggcgcattcacagaaatctctggttcgagcaacatgttaacgagttatcaagtgggagagaacaatggcactgaatttgccagagacaatggccacatggagaacattagtttgctcgaagtttatggtgcatccatagaaaacgctggttcaagcagcatgttaacaagtgatcaagtcggacaaagcaatcttaccgaagctgacagaatctatgacaccatggggagcattaattaccttgaaggtaccgtggacccggagtacattgcaccaatggattattctgttgcttgggcgcacctagagggcaatggtccggacctgagaagcccttctgatggccgggaggaagcatattcattttggatgagtcagctggcaggaccacaagactatcaaagccttggcccggagggtttccttcaagtaggtgacgacgcatataacgatgctctgagatcggttggtctggttaacgtggatgaacaagcgactcaaggatggcaagagcagcaaagcctcagcatggaagatctcctgcaggtagatgacgttgcatgggatgacactctgatatctatggggcttatcaacttgttagatgaaccaatggctgaagaggccgccattggaggatcacaaggtcagcaaagcctcgccccggaggtcctccaagcaggtgacaatgcgtacggtgatgatcttgggtcgattgagatggtcaacttgttaaacgaaccaatgactcaagaagccgctattgccgatgctctggtggacgatcctatgaccctgattgcccaagacgatgtgccgtgggcttggagtcctgcagtgccgggtgactatggcattgattggatccaggatcctaacgcagaactgtatgggtaaaagatcgatgaccgagccgtggttgcgtacaagaatcggaccgggtggaagagaggtgtgagacagccttgagtccagtcaaaaataattgacttgcttactttattctaaaactgtttttggatggatttattctcttttatcgacaatcactccccattttacttctaatgaaagcaatgtaagggctagtttggtaaccctattttctcaagggattttcattttcctaagagaaattagttcatttttccataggaaaatagaaatctcttaaaaaaatggggttctcaaactagaaaaatcatggtattttgtttataaggggagtttggtttctagggactaatgtttaatccttccatattatttcattgtacttgtcggagagaaaattctccggccgggtggcggagtgcacccgtcctaaatcttaagatgaggaaggagttt

SEQ ID NO: 210269 - DNA, 1416 bp, Zea Mays
ctttgtccggctagtttgaaacccacccaattactcggttgctcccgttgtcctctccgcggggcgcggcctggcttttcccttctcggcttctgccgttcgcgtgcggccgtgcggcctctctctttctttcccagcgccaccgccgacctagccaggtgaccaggtcttcgtcaggcccatagccagcgacgaacacctaagtacccaacagatgagttcgaagaaggttccgtaccacaagcatagggaggctgaggaggcgaggaagaagagggaggaagatgaagcagcacgtgtatatgcggaatttgttgagtccttcaaaggtgatagctcatctggggctaagtttatccgaggtggtgtgatcgaccccaatgcaaagctgaagactgactcggaaggtggaaaatccaaagatggggggtctgttccaaagaagggcagtaggtatgttccatccttcttgccaccatcatttgcaaaagagcctgagaaaaagaaggaaggggagaggccaaaggaaaaggaaaagggaaagccacgagtaatagatagattcttggaggaaatcaagcttgaacaagagcagcgagagaagcgccatcaagatcgagatcaccgccgtgaaggtcgccatggcgatagctccatgtcctcgagccggtttgatgaactaccagatgaatttgatccgactgggagatttccaggatcatttgatgatggtgatcctcaaaccaccaacttatatgttggcaatctatctcccaaggtcgatgagaattttcttttgaggacatttggtcggtttggacctattgctagtgtcaagattatgtggcctagaacagaagaggaacgcagaaggcaaagaaattgtggttttgttgccttcatgaatagaacagatggacaagcagcaaaggatgaaatgcaaggtgttattgtgtatgactatgaactcaagattgggtggggtaaatctgttgctcttccgtcacaggctttgcctgctcctcctccaggacacatggcaatcagaaataaggagggtggtacagctacagtcatactttctggtcctggtggccctgctgttgcatctattaaaccacaaacctcagagctggtccttacaccaaatgttcctgatattgtggttgctccacctgatgatgggcatcttcggcatgtgattgacacaatggctctgcacgtacttgatggtggatgtgcttttgaacaagctgtaatggagagagggcgaggaaatcctttatttgatttcttgttcaatcttaaatctaaagagcacacatattatgtttggaggctatactcatttgcccaggtacttgttgctgtctatagtacaaaattttaaagtgacatttcagtattctaatgcag

SEQ ID NO: 210270 - DNA, 1357 bp, Zea Mays
gtttgaaacccacccaattactcggttgctcccgttgtcctctccgcggggcgcggcctggcttttcccttctcggcttctgccgttcgcgtgcggccgtgcggcctctctctttctttcccagcgccaccgccgacctagccaggtgaccaggtcttcgtcaggcccatagccagcgacgaacacctaagtacccaacagatgagttcgaagaaggttccgtaccacaagcatagggaggctgaggaggcgaggaagaagagggaggaagatgaagcagcacgtgtatatgcggaatttgttgagtccttcaaaggtgatagctcatctggggctaagtttatccgaggtggtgtgatcgaccccaatgcaaagctgaagactgactcggaaggtatgttccatccttcttgccaccatcatttgcaaaagagcctgagaaaaagaaggaaggggagaggccaaaggaaaaggaaaagggaaagccacgagtaatagatagattcttggaggaaatcaagcttgaacaagagcagcgagagaagcgccatcaagatcgagatcaccgccgtgaaggtcgccatggcgatagctccatgtcctcgagccggtttgatgaactaccagatgaatttgatccgactgggagatttccaggatcatttgatgatggtgatcctcaaaccaccaacttatatgttggcaatctatctcccaaggtcgatgagaattttcttttgaggacatttggtcggtttggacctattgctagtgtcaagattatgtggcctagaacagaagaggaacgcagaaggcaaagaaattgtggttttgttgccttcatgaatagaacagatggacaagcagcaaaggatgaaatgcaaggtgttattgtgtatgactatgaactcaagattgggtggggtaaatctgttgctcttccgtcacaggctttgcctgctcctcctccaggacacatggcaatcagaaataaggagggtggtacagctacagtcatactttctggtcctggtggccctgctgttgcatctattaaaccacaaacctcagagctggtccttacaccaaatgttcctgatattgtggttgctccacctgatgatgggcatcttcggcatgtgattgacacaatggctctgcacgtacttgatggtggatgtgcttttgaacaagctgtaatggagagagggcgaggaaatcctttatttgatttcttgttcaatcttaaatctaaagagcacacatattatgtttggaggctatactcatttgcccaggtacttgttgctgtctatagtacaaaattttaaagtgacatttcagtattctaatgcag

SEQ ID NO: 210271 - DNA, 2549 bp, Zea Mays
cccacttggaatctggaatttgactgaggggatgtagaccgttcgatttccaatcgcacggtccgcgttcgtttgacgtccttctggcggttatgctgctgcgaccaagtcgagggctttcgtgccttcagcccttcagtcttcaccagtcgcgcgccgccatgtcggagaccgaatcggcggcagcggcgccggtggctgcggctgaatcgaagcctcggcgactgcgggggcacaagaagggcgccgtcacctgctgcgtcgcctcctccgcccgccccggcgtcgtcgcgtcctccggcgaggatggatgtctttgctggtttgatctgcgcaccaaagatgcacttttgaccatggaggcagcaaataaaccaatttcttcaatttgctttaaaccaggaaatgaagattttgtgtatatctctgctggaaatgaaatattgtcctttgatgttcgtatgggaactcaatcaaagccattagagacatataactacaatagagatgaaatcaatcagattgctgtcagctctaaaggttttctcgctgctgcagatgatagtggggatgttaagattgtcaataccattcagaaatgcctgtataaaagattaagggaagcccacacaagtatttgcagcagcgtgcaattcattccttggagaccttggacagcaattactgggggccttgactcaaagctcgctgcatgggatttctccaaaggacgaacactgttttctattgattatggatcacctgaattgcaaaacggcagttcttccggtagtgcagggcaatgtttcaaccctgcttttgttcattcagtagcagtttctgaagagggtattttgggagggctctacaaggtttgtgctgttgcaaggggggatggtgctgttgatgtggttgatcttgagtatgaactggcccctgcgaaatcgaagggacctcctcgggcagctattttgacaacgagatcaaaaggcgctgaacttggagatgggagctgcaatcaaagtcgagcgaaaagaatccatcttgactacaccatgggcggccatactgcagctgtgtcttgtgtagcattttcagcatttggtgagaaggggaagttcctcatttcaggtggcaatgatgcatcagtgaagctgtgggattggtcgaaaggattttactctgaaacaaacagcaaagttgatttggttttggatattgatgtaaagaaaaagtctgagactctcagtggctgcaaactcttgttgtacccattggaacaggaggaagaagaggggagttcaaagcttgcctctttaccagcaatagctaagaaagttttatcttacgaggagggtatttatgcaaaactttccaggaagtggatagaagaaggcctcagaaccgtatccattggaagacaggaaccagggggttttgctgctgttctttggaggagaagagaaatgggaggcttgctcttgccgcatcaccgaacctttccaaattctttgcaagcttccatcccgggacctctctctcttcacaaaggcgaccgcaaaaaccttcattactttgcacctgatgtgcacctcttctgttccctgcggcaaggctttccacgctcatcttggtcggccgtcatcagatcagaagccagcggcaacgcggtggcgtcgccaggcacggtcatcaagcgtagcaaggaggagctcatcaccttcttcagagacatacagacatccattgccgagtgctcgcgtaaagcttccaagaggacgaggaagcagccgcctgatctgttccaagaggtccgcaggagggaggaacagtcacacggcacaggtggaggagatagcggcaccgacgacgtttcagagggaccgaggaaagtgaagagtcttgaggacatgaacgtggctggattgagagagttggcgagggccagaaggatgaggggttactccaagcttaagaagggcgagctcattgatcggttgagaggggctactacgtaataaactaccatgatgcagagcagcttcgcagttaatagggacacatgttcttttcgaacgtatgatgagattaccgatcaaaaaattgtatgatgatgagattaccgactttccaaacgatctagtcagttcattgataagaactagaacaatgtgtgtagttattatactatagaaccggtggagctgtattgttgtactacgccgaaacttttgtgtaggcatggcaatctcctgttgttacgtaagttactttgttatgtacggaattagtttctctaaatctaccatggattgttttttttttttttttaactgagcagacagaccaaagcactcgtgatcagttaccacattgtttgcgtgattgcaggttcacgtatgtaaataaattttgtgggggtgggtcgcttaattatggccaagaccgggcggatgggatgaataagggatatgtgtgatctggtaccataccacgtggtgcctgcggtacggggaatatgcaccgcgagactcatcagagagtcccat

SEQ ID NO: 210272 - DNA, 2664 bp, Zea Mays
ctgctctccatttgatcatttggatggatgtctttgctggtttgatctgcgcaccaaagatgcacttttgaccatggaggcagcaaataaaccaatttcttcaatttgctttaaaccaggaaatgaagattttgtgtatatctctgctggaaatgaaatattgtcctttgatgttcgtatgtggttttcttgtagggaactcaatcaaagccattagagacatataactacaatagagatgaaatcaatcagattgctgtcagctctaaaggttttctcgctgctgcagatgatagtggggatgttaagattgtcaataccattcagaaatgcctgtataaaagattaagggaagcccacacaagtatttgcagcagcgtgcaattcattccttggagaccttggacagcaattactgggggccttgactcaaagctcgctgcatgggatttctccaaaggacgaacactgttttctattgattatggatcacctgaattgcaaaacggcagttcttccggtagtgcagggcaatgtttcaaccctgcttttgttcattcagtagcagtttctgaagagggtattttgggagggctctacaaggtttgtgctgttgcaaggggggatggtgctgttgatgtggttgatcttgagtatgaactggcccctgcgaaatcgaagggacctcctcgggcagctattttgacaacgagatcaaaaggcgctgaacttggagatgggagctgcaatcaaagtcgagcgaaaagaatccatcttgactacaccatgggcggccatactgcagctgtgtcttgtgtcatttggtgagaaggggaagttcctcatttcaggtggcaatgatgcatcagtgaagctgtgggattggtcgaaaggattttactctgaaacaaacagcaaagttgatttggttttggatattgatgtaaagaaaaaggtaaattggctgtgtactgctccaactgattcagataacttgattgtgtgtgacacatccaaggtggtcaaagtatatagtttccggtagatggatcaaggtgtagcctcagtttgtcaggcagttatctgagggagtgaagcttgtctgaccgttggaaccaatctggtcctgactctggtatccagatattacaagcctgccgcagacagttcctgaattgtgaggtcattggttagcaatttgcaatgtcagttgtggcgcagaacagatctgataaagtatatattattttgttactgtcagaactttttgtacaacttccagtctgctagcttagctggactcggcatgtatatctctgttgtacggtgaaatgaatttatgtgtttggagaaaataaggcttgtttgtgctggaagagattatcttgattgtgtttatccttttggtttctatagattgtaggcttgtagcttttatttctcggtatggtgcaacctgtggtagcacatataatataaggatgatgtatgacgaatgtttttctgcgctatactgacggcttgttgaaccgtctctgaatgatctttctgttgcactcttgggcaacttgtcagtctgagactctcagtggctgcaaactcttgttgtacccattggaacaggaggaagaagaggggagttcaaagcttgcctctttaccagcaatagctaagaaagttttatcttacgaggagggtatttatgcaaaactttccaggaagtggatagaagaaggcctcagaaccgtatccattggaagacaggaaccagggggttttgctgctgttctttggaggagaagagaaatgggaggcttgctcttgccgcatcaccgaacctttccaaattctttgcaagcttccatcccgggacctctctctcttcacaaaggcgaccgcaaaaaccttcattactttgcacctgatgtgcacctcttctgttccctgcggcaaggctttccacgctcatcttggtcggccgtcatcagatcagaagccagcggcaacgcggtggcgtcgccaggcacggtcatcaagcgtagcaaggaggagctcatcaccttcttcagagacatacagacatccattgccgagtgctcgcgtaaagcttccaagaggacgaggaagcagccgcctgatctgttccaagaggtccgcaggagggaggaacagtcacacggtggaggagatagcggcaccgacgacgtttcagagggaccgaggaaagtgaagagtcttgaggacatgaacgtggctggattgagagagttggcgagggccagaaggatgaggggttactccaagcttaagaagggcgagctcattgatcggttgagaggggctactacgtaataaactaccatgatgcagagcagcttcgcagttaatagggacacatgttcttttcgaacgtatgatgagattaccgatcaaaaaattgtatgatgatgagattaccgactttccaaacgatctagtcagttcattgataagaactagaacaatgtgtgtagttattatactatagaaccggtggagctgtattgttgtactacgccgaaacttttgtgtaggcatggcaatctcctgttgttacgtaagttactttgttatgtacggaattagtttctctaaatctaccatggattgtgtatttctacaaca

SEQ ID NO: 210273 - DNA, 2696 bp, Zea Mays
gaccagcactagcagccagccatcctccacctccactgctctccatttgatcatttggatggatgtctttgctggtttgatctgcgcaccaaagatgcacttttgaccatggaggcagcaaataaaccaatttcttcaatttgctttaaaccaggaaatgaagattttgtgtatatctctgctggaaatgaaatattgtcctttgatgttcgtatgggaactcaatcaaagccattagagacatataactacaatagagatgaaatcaatcagattgctgtcagctctaaaggttttctcgctgctgcagatgatagtggggatgttaagattgtcaataccattcagaaatgcctgtataaaagattaagggaagcccacacaagtatttgcagcagcgtgcaattcattccttggagaccttggacagcaattactgggggccttgactcaaagctcgctgcatgggatttctccaaaggacgaacactgttttctattgattatggatcacctgaattgcaaaacggcagttcttccggtagtgcagggcaatgtttcaaccctgcttttgttcattcagtagcagtttctgaagagggtattttgggagggctctacaaggtttgtgctgttgcaaggggggatggtgctgttgatgtggttgatcttgagtatgaactggcccctgcgaaatcgaagggacctcctcgggcagctattttgacaacgagatcaaaaggcgctgaacttggagatgggagctgcaatcaaagtcgagcgaaaagaatccatcttgactacaccatgggcggccatactgcagctgtgtcttgtgtagcattttcagcatttggtgagaaggggaagttcctcatttcaggtggcaatgatgcatcagtgaagctgtgggattggtcgaaaggattttactctgaaacaaacagcaaagttgatttggttttggatattgatgtaaagaaaaaggtaaattggctgtgtactgctccaactgattcagataacttgattgtgtgtgacacatccaaggtggtcaaagtatatagtttccggtagatggatcaaggtgtagcctcagtttgtcaggcagttatctgagggagtgaagcttgtctgaccgttggaaccaatctggtcctgactctggtatccagatattacaagcctgccgcagacagttcctgaattgtgaggtcattggttagcaatttgcaatgtcagttgtggcgcagaacagatctgataaagtatatattattttgttactgtcagaactttttgtacaacttccagtctgctagcttagctggactcggcatgtatatctctgttgtacggtgaaatgaatttatgtgtttggagaaaataaggcttgtttgtgctggaagagattatcttgattgtgtttatccttttggtttctatagattgtaggcttgtagcttttatttctcggtatggtgcaacctgtggtagcacatataatataaggatgatgtatgacgaatgtttttctgcgctatactgacggcttgttgaaccgtctctgaatgatctttctgttgcactcttgggcaacttgtcagtctgagactctcagtggctgcaaactcttgttgtacccattggaacaggaggaagaagaggggagttcaaagcttgcctctttaccagcaatagctaagaaagttttatcttacgaggagggtatttatgcaaaactttccaggaagtggatagaagaaggcctcagaaccgtatccattggaagacaggaaccagggggttttgctgctgttctttggaggagaagagaaatgggaggcttgctcttgccgcatcaccgaacctttccaaattctttgcaagcttccatcccgggacctctctctcttcacaaaggcgaccgcaaaaaccttcattactttgcacctgatgtgcacctcttctgttccctgcggcaaggctttccacgctcatcttggtcggccgtcatcagatcagaagccagcggcaacgcggtggcgtcgccaggcacggtcatcaagcgtagcaaggaggagctcatcaccttcttcagagacatacagacatccattgccgagtgctcgcgtaaagcttccaagaggacgaggaagcagccgcctgatctgttccaagaggtccgcaggagggaggaacagtcacacggtggaggagatagcggcaccgacgacgtttcagagggaccgaggaaagtgaagagtcttgaggacatgaacgtggctggattgagagagttggcgagggccagaaggatgaggggttactccaagcttaagaagggcgagctcattgatcggttgagaggggctactacgtaataaactaccatgatgcagagcagcttcgcagttaatagggacacatgttcttttcgaacgtatgatgagattaccgatcaaaaaattgtatgatgatgagattaccgactttccaaacgatctagtcagttcattgataagaactagaacaatgtgtgtagttattatactatagaaccggtggagctgtattgttgtactacgccgaaacttttgtgtaggcatggcaatctcctgttgttacgtaagttactttgttatgtacggaattagtttctctaaatctaccatggattgtgtatttctacaaca

SEQ ID NO: 210274 - DNA, 2324 bp, Zea Mays
cccacttggaatctggaatttgactgaggggatgtagaccgttcgatttccaatcgcacggtccgcgttcgtttgacgtccttctggcggttatgctgctgcgaccaagtcgagggctttcgtgccttcagcccttcagtcttcaccagtcgcgcgccgccatgtcggagaccgaatcggcggcagcggcgccggtggctgcggctgaatcgaagcctcggcgactgcgggggcacaagaagggcgccgtcacctgctgcgtcgcctcctccgcccgccccggcgtcgtcgcgtcctccggcgaggatggatgtctttgctggtttgatctgcgcaccaaagatgcacttttgaccatggaggcagcaaataaaccaatttcttcaatttgctttaaaccaggaaatgaagattttgtgtatatctctgctggaaatgaaatattgtcctttgatgttcgtatgggaactcaatcaaagccattagagacatataactacaatagagatgaaatcaatcagattgctgtcagctctaaaggttttctcgctgctgcagatgatagtggggatgttaagattgtcaataccattcagaaatgcctgtataaaagattaagggaagcccacacaagtatttgcagcagcgtgcaattcattccttggagaccttggacagcaattactgggggccttgactcaaagctcgctgcatgggatttctccaaaggacgaacactgttttctattgattatggatcacctgaattgcaaaacggcagttcttccggtagtgcagggcaatgtttcaaccctgcttttgttcattcagtagcagtttctgaagagggtattttgggagggctctacaaggtttgtgctgttgcaaggggggatggtgctgttgatgtggttgatcttgagtatgaactggcccctgcgaaatcgaagggacctcctcgggcagctattttgacaacgagatcaaaaggcgctgaacttggagatgggagctgcaatcaaagtcgagcgaaaagaatccatcttgactacaccatgggcggccatactgcagctgtgtcttgtgtagcattttcagcatttggtgagaaggggaagttcctcatttcaggtggcaatgatgcatcagtgaagctgtgggattggtcgaaaggattttactctgaaacaaacagcaaagttgatttggttttggatattgatgtaaagaaaaagtctgagactctcagtggctgcaaactcttgttgtacccattggaacaggaggaagaagaggggagttcaaagcttgcctctttaccagcaatagctaagaaagttttatcttacgaggagggtatttatgcaaaactttccaggaagtggatagaagaaggcctcagaaccgtatccattggaagacaggaaccagggggttttgctgctgttctttggaggagaagagaaatgggaggcttgctcttgccgcatcaccgaacctttccaaattctttgcaagcttccatcccgggacctctctctcttcacaaaggcgaccgcaaaaaccttcattactttgcacctgatgtgcacctcttctgttccctgcggcaaggctttccacgctcatcttggtcggccgtcatcagatcagaagccagcggcaacgcggtggcgtcgccaggcacggtcatcaagcgtagcaaggaggagctcatcaccttcttcagagacatacagacatccattgccgagtgctcgcgtaaagcttccaagaggacgaggaagcagccgcctgatctgttccaagaggtccgcaggagggaggaacagtcacacggtggaggagatagcggcaccgacgacgtttcagagggaccgaggaaagtgaagagtcttgaggacatgaacgtggctggattgagagagttggcgagggccagaaggatgaggggttactccaagcttaagaagggcgagctcattgatcggttgagaggggctactacgtaataaactaccatgatgcagagcagcttcgcagttaatagggacacatgttcttttcgaacgtatgatgagattaccgatcaaaaaattgtatgatgatgagattaccgactttccaaacgatctagtcagttcattgataagaactagaacaatgtgtgtagttattatactatagaaccggtggagctgtattgttgtactacgccgaaacttttgtgtaggcatggcaatctcctgttgttacgtaagttactttgttatgtacggaattagtttctctaaatctaccatggattgtgtatttctacaaca

SEQ ID NO: 210275 - DNA, 2249 bp, Zea Mays
cccacttggaatctggaatttgactgaggggatgtagaccgttcgatttccaatcgcacggtccgcgttcgtttgacgtccttctggcggttatgctgctgcgaccaagtcgagggctttcgtgccttcagcccttcagtcttcaccagtcgcgcgccgccatgtcggagaccgaatcggcggcagcggcgccggtggctgcggctgaatcgaagcctcggcgactgcgggggcacaagaagggcgccgtcacctgctgcgtcgcctcctccgcccgccccggcgtcgtcgcgtcctccggcgaggatggatgtctttgctggtttgatctgcgcaccaaagatgcacttttgaccatggaggcagcaaataaaccaatttcttcaatttgctttaaaccaggaaatgaagattttgtgtatatctctgctggaaatgaaatattgtcctttgatgttcgtatgggaactcaatcaaagccattagagacatataactacaatagagatgaaatcaatcagattgctgtcagctctaaaggttttctcgctgctgcagatgatagtggggatgttaagattgtcaataccattcagaaatgcctgtataaaagattaagggaagcccacacaagtatttgcagcagcgtgcaattcattccttggagaccttggacagcaattactgggggccttgactcaaagctcgctgcatgggatttctccaaaggacgaacactgttttctattgattatgtagcagtttctgaagagggtattttgggagggctctacaaggtttgtgctgttgcaaggggggatggtgctgttgatgtggttgatcttgagtatgaactggcccctgcgaaatcgaagggacctcctcgggcagctattttgacaacgagatcaaaaggcgctgaacttggagatgggagctgcaatcaaagtcgagcgaaaagaatccatcttgactacaccatgggcggccatactgcagctgtgtcttgtgtagcattttcagcatttggtgagaaggggaagttcctcatttcaggtggcaatgatgcatcagtgaagctgtgggattggtcgaaaggattttactctgaaacaaacagcaaagttgatttggttttggatattgatgtaaagaaaaagtctgagactctcagtggctgcaaactcttgttgtacccattggaacaggaggaagaagaggggagttcaaagcttgcctctttaccagcaatagctaagaaagttttatcttacgaggagggtatttatgcaaaactttccaggaagtggatagaagaaggcctcagaaccgtatccattggaagacaggaaccagggggttttgctgctgttctttggaggagaagagaaatgggaggcttgctcttgccgcatcaccgaacctttccaaattctttgcaagcttccatcccgggacctctctctcttcacaaaggcgaccgcaaaaaccttcattactttgcacctgatgtgcacctcttctgttccctgcggcaaggctttccacgctcatcttggtcggccgtcatcagatcagaagccagcggcaacgcggtggcgtcgccaggcacggtcatcaagcgtagcaaggaggagctcatcaccttcttcagagacatacagacatccattgccgagtgctcgcgtaaagcttccaagaggacgaggaagcagccgcctgatctgttccaagaggtccgcaggagggaggaacagtcacacggtggaggagatagcggcaccgacgacgtttcagagggaccgaggaaagtgaagagtcttgaggacatgaacgtggctggattgagagagttggcgagggccagaaggatgaggggttactccaagcttaagaagggcgagctcattgatcggttgagaggggctactacgtaataaactaccatgatgcagagcagcttcgcagttaatagggacacatgttcttttcgaacgtatgatgagattaccgatcaaaaaattgtatgatgatgagattaccgactttccaaacgatctagtcagttcattgataagaactagaacaatgtgtgtagttattatactatagaaccggtggagctgtattgttgtactacgccgaaacttttgtgtaggcatggcaatctcctgttgttacgtaagttactttgttatgtacggaattagtttctctaaatctaccatggattgtgtatttctacaaca

SEQ ID NO: 210276 - DNA, 1455 bp, Zea Mays
aaaaatactaatacagtatgaaagtgaaaatgagccggagaccaagactggggagacagcacagtcacggaatcaaaacacaaaaacgatttttacaaacaaaataaaaaagactttcctaaagagagagaaatgacgacaaaaacaaaagagagacttcaactgggcaggcgccgacggcgacgtgtgggtggtggcggctggtcccaagctcggggcgggcgcgacgcgcgagcaccgcaccgatgccgatgctcctcccaccccctcccctcccctcctcctcatcacccaactactacctcccatcccatccgcgccctccttcggtcctctcccatccgctccgctcgcagcccctccccttgccccccgcgatgtcgtcgtcgtcaccgccgccgcggcccgacgacgacgacggtgcgcaggaggtgggcgccagcgatgggaggtcgctgggctacggcgaggcggagtactgggacgcgcggtacgtggaggagggcggcgcgccgtacgactggtatcaacgctacgacgcgctccgccccttcgtccgctgcttcgcgccgccggcgtcccggatcctcatggttggctgcggctccgcactcatgtcggaggatatggtcactgacggctatgtggagatagtgaacattgacatttcgtcggttgtgattgagatgatgagaaagaaatacttcgatgttcctcagctgcaatgtatcctttgactgtttttatcatttcccccaatctattgtccattgatacccttatgaactgcagacttgcgcatggatgttagagatatgagtatgtttccggacgaatcgttcgattgtgcaatcgataaagggactctggactcattgatggtaagtaggagtaggtaacattaagtcaccatgtctttttccttatttctggacttcttcagcaatgccgtcttgctgctttcatagtgtggtgtggatgctcccctcagtgcagctcagatgattttggaagtggacaggttttttagtgtcttgctgcctttctgaagtatcactctgcagtgtcatctgggccaagatatcttgtaaatttcaacagccctgcagccttatcagttatacttttttattgcaggcttcttaaaccaggaggaacctttattttgataacatatggtgatccatcggtacgaatgcctcatttgaatcaatcagcatgtgactggaaagttgtactttatattctaccaagacctgtgttcactggaaagataacgaggcgtgtactggatcctgttccactgaccgagaggggtagactccctgatggatttgtcccagaggatcctgactcccattatgtctatgtctgcaagaagatgcagggattaacaggcacaggttccccaactgtaaaccacatagagagacctgcagttacatgatccgcaag

SEQ ID NO: 210277 - DNA, 2159 bp, Zea Mays
gcgcgatttccaaactcttgttaacgggccaattctatagcggatgtcggagggcacgcgctccagaatccacaatcttggcagccagccaatgagccatcatcccccagaagcgcgcgcacaggaactgggctggaggatccgtttccgcaaccgcaacccagtccccttatcctgaaaactactcctcctctctcgtctctaaacccccgggcagcggacaaacaagcacacagcacgagcgaagagacgcagccatggcgatggctccaccgcctgcctgctcgctcttcccccgggtcgccgctgctgcgcccagttccgtcacctccaactccgttttgacctcgcgtggccccggtatccttccttccccgcgtctcgctttcgcccgccgccacctctccgcggcatggtcatcgaaggcagcagcctccgcttctgtcgaaatccaggatgactacacggatgagatggacgcggtgaacattgcgcaggatgtcacccagctcattggaaaaacaccaatggtgtatctcaatagagttgctgacggatgtgtggctaatatcgctgcaaagctcgagtacatgggaccttgccgaagtgtcaaagataggattggattaagcatgattaatgatgctgaagagaagggattaatttctccagacaagaccattttggtagaaccaacaactggaaatactggtgtagccattgcttctgtggctgcagcaagaggatacaagttgatagcaacaatgccttcatcgttagatgtcgagagacgcattcttctgcgtgcattcggagcagagattgtgttaactgatcctaccaaaggactaaaaggagcttttgataaagctgaggaaatagtcctgagaacaccaaatgcgtatatgtttcagcagttcaacaatgaggcaaatagtgagatccactttcaaaccacaggcccagaaatatgggaagacacgttgggttctgttgatatacttgttgcaagcataggaacaggcggtaccattagtggcactgggcgttacttgaaaaggatgaacaaagatattaaggttattggggtagaacctgctgaaactagtgtgatttctggtgatagccctggttacattccaagtatattagatgtgcagttgattgatgaggttgtgaaggttagcacagcagaagccgttgattctgcaagggaacttgctctaaaagagggcctgctggttggtatttcctctggtgctgcagcgattgctgctatcaatgttggcaaaagacctgaaaatgctggaaagttgattgcggtcattttccccagctttggagagagatacatctccaccattctgttccgtccgatatatgactctgttcgaagaatgaggaagagatagcgagccttgtactacttcaagcgcgttgccagtccccttctctagacctgacaggcttccatgacatgattgataaacgtgaagcagtgaagaccctgtttgattgcaacttcagggtccgaagttttgaagctgcacagagtttctatcaggtgagctgcaggcctgcagcttggttctagcaagactggaggagtgcctcatgtttagaccagctcatacaatcctggtgcaacatgcagaattgcgtgccgcagttagcttgggcctttcgtttagtagtctaggaccgggtacaaaccgcttgttacctggtacgcacttgagctgattttagcgaccaactatctgcaaattctttttgccttccgaattttgattgtttcatcttttatctggcgtctgctttactaactagttttttgcggaactacaattttcttttctctttttcttgtctgcaaaagatcgaaggtcgagcttgcaattgcaagatcaaaggtcaagctgaaaggagcctgtcgaacaaaatgcagcgtcttcactcaggtcgaagcgggaagctctaaaccgtcagagcgtctccaaaactggctgacactgacagacaaaaaaaaaactgatttaggtattggagcgaacacatccttccaatagcagcctaaatcaccaccttattttagctattacctaaaccatcaaatctcctcaaatttatgctctcaaaaaattagccaaatttattga

SEQ ID NO: 210278 - DNA, 1260 bp, Zea Mays
tgttacacccataacatatgcaaatagactagatacaagatcttaccggcctatgaaggtgacaaacagcagcttcaatggttttataatgcatgttgtggcatggcacaggttttgaacacggctccagtagcaccagcaaatctccctatgccaaatccagcaccggcaatttcatctgtggcgccttcagaacaatctgcacccagcaaggaggatgttgaattagcaatggctatcaatgcctccattcaatcagctattgcagagggagtatcagtgcccaatgttcaaccaaatgcatccacccccaacaacaatggctgggctgcccctccaagtaattctcacaacggatggggaccaccagccactcctgcaccatcaaagacgagcggtcagtcccaggtccgggtagacgccccaagcagcagcacttacaatggatgggatgtgcccggaacaagctctagtcaaagttcatcgaaaccccaccaaacccaaaccaaccctccagtcttgattccacaggaagcacttcaggctctcccaaccccaaccgcgccaccatttgctgaagaaaccttctacaacggtcctgttcactatccatccatagactctacgcctgtcgatgtaaccatgccggctaccactggaggcggtagtacaacagtcatcgcaacggcagcacctacagaacagttagaaaatgaagctgatgcaagtgacagcggcaaaactccctctggtacttgcgttatatgtctggatgcccctgtggaaggcgcctgcatcccgtgcggccacatggctggttgcatgtcctgtttgaaggatatagaatccaagaagtggggatgccctatctgccgtgccacgattaaccaggttgttcgcctctatgctgtttgaggagttgaaacggtgggttcagaaagttggcaatggattggagggttctcgcaacaaatgttgatgggaacgtctctatctcaaaattgtgcaattatgctattttgcacttcgtactgcactacaaatatgacttccgtgtaatgtatgtgggctgacgcctttatgtacataggtagtactatacaagacaattttataaaaatctgggtattgttgcaagttgcaactcacgtagtcacgttcaaagttgcacgattgtggagcttttccaagaacctaagatagtggatcgccgggtgcttgtctcatcggttaatgatgtgtttagtttgaggtcaaagt

SEQ ID NO: 210279 - DNA, 1946 bp, Zea Mays
cgccggctggttgactcgcgtcgcgtcatgtgcgcgtctctcgtctcgttgggattatattccccatccgcaccgcttgccaatcacccgataataagtagcaggggcagggagaacgaagacgacgacgacgtacgccacccgtaagtgagccgagagccctcgagataccatcagctagctagataaccagccagcgcgagcatggaggcggcggcggcggcggtcctgcaccggacggtggaggcgaacggcatctcgatgcacgtggcggagtccggccccgacggcgacggcgcgcccgcggtggtgttcctgcacggcttcccggagctctggtactcgtggcgccaccagatggcgcacctggccgcgcggggctaccgctgcgtggcgccggacctccgcggctacggcggcaccgccgcgccgcccgacgtcgcgtcctactccgccttccacgtcgtcggcgacgtcgtcgccctgctcgacgcgctcggcatccacaacaaggtccttccttttccgtatcaacgttgacttcttcaattcctctcgtgtgtactactgctataagcctataacacacttcgtactcatccatcctctgtgaagtgtgtgaacatatatacaaacgcctctacttctataattttttttaattttgaaaactaactaaaacaataattctaaaactgataaaaatcatctactcatcttaaaactaataataagccaataatatggaattcttcgcatccgtgtttcttcgaaattaaatttgatttttttattaattacgatctcccgtacgtacgtattgtttgctatccagccttttgttccgaggttaaagtaacaagctctgcctgttccggccggaccgggtggcggcgcttgtcaacaccagcgccgccgccgtcacgcccatcgactacttccaccgcacctacgggcccacctactacatctgccgcttccaggagcctggtgtcgcagagaaggagttctcgccggccaacgccgggtacctgatgaagcggatcctgtgcaaccgcttcacctcctcggcggccggcgacgacaagcgaccgccggcggacgccgccgaggaggagccgctgccgccgtggctgacggaggaggacgtgggccacttcgcgtcggagttcgagcggacgggcttcacggggcccatcaactactaccgcaacatggaccgcaactgggagctggcggcgccgtgggcggacgccaaggtgcgggtgcccaccaggttcatcgtcggcgacggcgacctcacctaccactacccgggcatccaggactacatccacaagggcgggttcgaggccgacgtcccggggctcgagagcgtcgtcgtcatccccggcgccggccacttcgtccagcaggagaaggccgacgaggtcagccagcacatctacgacttcatctccaagttctgatacatgtgcatggatcgaccatcagcttgcttgcttacctgctaaagcctgtaatctcaacctcgatatccgtgctgccaacttgttttgtttttcgaactaagagtaataagtgttcgcatatatgtctggtttaatttgtgacttggacatggtatgttcgatgtgaaatggataaaccatgcgtttcgtaatttaaatgtacaatgcttgtaccggtgaccgtgtactgttgtcggacgatcaacagtggcatactggcatctatgttggaaactataccatgtccaatagctaccagaagcctaggcccgacgtgcctttcggttgagccagatcacgtacgagcgtctataaaaacaccctagacccctaggaattaaggtttcgaggcctcatagcggctgcaactgcgtgaggtgctagaggaggcgagcggcgaccggacgtcgatgacgacttcctgcaggctgcgac

SEQ ID NO: 210280 - DNA, 1226 bp, Zea Mays
ctttcttgtacacttgaactttgagagagagtccccgaaatatatccaatattgaagactctttgcttggtgcgcttaagcttattatgctaataggtttggtgatcatttcatttggtccaagttattcatatacccttctaaaattactctatggggaaagacacagtgatggagaggctccagttattcttcgttactattgtttatatatcatcagtttagcaatgaatggcacatctgaagcctttcttcatgctgttgcaaatgaaaaccagcttaagcagtcaaatgatatgttgcttctgttctcggtgatttacatcattctaaatgttgttcttattaaatcttctggagctgttgggttaattgctgctaatgccattaatatgttgcttcgaatatcatattctgcagtatttataaaagactatttcaagggctcattctctttccggcgctgtgtgcctgcgggctggggcattttactcatttctggtctgaccactgttttctctgagagggttttcttgaacaaaacgaggttcaagcagactgttcccattcacatagcgattggcatcatgtgcttgagcatcgcgttacttgagatataccgtggcgaaaagcagttcttgatgcaaataatcagaactttgaagcataatgacaaaagccagtgatttgaagacacagcgcatttcatagcgtattctctctggaacgcctgatgaaagagagctggtagtatagtgggtgggtaatttggtgtgtatgcaggagatcgggagttaacagaagaggggggattaatcggtcagatagataaatcggttgcgtatgggaattgctggatttcttgttgacccaatatttatattacaggtttattgagctagtgattcaataatttataattaaatgaagaagtttaggttccttttgttaagaacagcttggccgaatagagccagatgcccagatggatccccaagtgaccaagcacaacgacctggaaccatctgacgccggtcgccggcacattgtgccaatcagctgctataaagttacctagcgcgcagctgcggccgatgtggcgtcgctggatcatgtggacgaagccccaatttttcgtagattggagctgtttgaatccataaccgtccctttcccttctttttcacttatttggttactaggtgagtacacgtgcgttgcaacgg

SEQ ID NO: 210281 - DNA, 2555 bp, Zea Mays
gtgcaatcactcattttggtgcaagcgtgcaatcaaactatccagagcatccaatctagatccaacggtttcatatggaaggggttaaaagtaaaataggtactatgttttaggtggaaggggttaaatataaaataacagtcatcattagatttagatcggatgtaccagatcgcttgattgcatgcttgcaccaggataagtgattgcataggatatttcccccttagtgacaatgcctatgtacgaagagtcaaaggttctcaggaatgaacggtccggatcgcgttttaaggggcgagggccgagtccaagctgacacgcgccgctgcccgatctcccggtgtttgtttttgctgcatccgccggactctcgccgccgcgctcgacttcctgccgccgcctgggccgactcctccgtccgcgcgaaacaccggccggccgaggcgcaactcagtaagccggcgcgatggatgatgcggcacttctctccggagcaggggtggctgccgccgcgccgccccatgcggcggctgccggagccgccgtgatgggcgtcttcaagtacaacttcgcggcgcagttcctctcgaggattatccctttcgtatttaacatctggttcgtgcgccagctcggggcggacgatggcgctgtgtcggcatttgcactgcagcttcctctatttatgaactgcatcttatttttaagccgggaggggtttcgacgtgcatgtttgcgtaatgattcccagagtgatgtgttgacttctgaagcgatactaatggtcgcttggatggtaattccagtgtccatcttaattacttctgttggcagcatacttgtgttgagtttaaagagagtgaagctatctgacccctatgcgaaagctgtattgatcatcggatttgcttgtattctggaattactggcggaaccattatacattatttcccagaaaaagaaatactataatataagagtgtacgttgaaccgacagctacactcttccgttgtttaacaactttcatcctcataaaaggacatattaaagtgaacaagctggttctagtttctctgtcccaggttgtctatggggcctgcattctctttggatattggtcatattttcttatgtatactgatactaaaccttcagatctttttccgttaaggccaggctttcaggaagttgatactccaagaaggcgagaaatttgtccttgtgttatttgatactccatacaaccaggccgcatatggtattgtggataaactagggagtctggttgttaggatagttttcttgccatttgaagagagttcatatgccacttttgcccgattggcaggagagagtccccgaaatatatccaatattgaagactctttgcttggtgcgcttaagcttattatgctaataggtttggtgatcatttcatttggtccaagttattcatatacccttctaaaattactctatggggaaagacacagtgatggagaggctccagttattcttcgttactattgtttatatatcatcagtttagcaatgaatggcacatctgaagcctttcttcatgctgttgcaaatgaaaaccagcttaagcagtcaaatgatatgttgcttctgttctcggtgatttacatcattctaaatgttgttcttattaaatcttctggagctgttgggttaattgctgctaatgccattaatatgttgcttcgaatatcatattctgcagtatttataaaagactatttcaagggctcattctctttccggcgctgtgtgcctgcgggctggggcattttactcatttctggtctgaccactgttttctctgagagggttttcttgaacaaaacgaggttcaagcagactgttcccattcacatagcgattggcatcatgtgcttgagcatcgcgttacttgagatataccgtggcgaaaagcagttcttgatgcaaataatcagaactttgaagcataatgacaaaagccagtgatttgaagacacagcgcatttcatagcgtattctctctggaacgcctgatgaaagagagctggtagtatagtgggtgggtaatttggtgtgtatgcaggagatcgggagttaacagaagaggggggattaatcggtcagatagataaatcggttgcgtatgggaattgctggatttcttgttgacccaatatttatattacaggtttattgagctagtgattcaataatttataattaaatgaagaagtttaggttccttttgttaagaacagcttggccgaatagagccagatgcccagatggatccccaagtgaccaagcacaacgacctggaaccatctgacgccggtcgccggcacattgtgccaatcagctgctataaagttacctagcgcgcagctgcggccgatgtggcgtcgctggatcatgtggacgaagccccaatttttcgtagattggagctgtttgaatccataaccgtccctttcccttctttttcacttatttggttactaggtgagtacacgtgcgttgcaacgg

SEQ ID NO: 210282 - DNA, 971 bp, Zea Mays
gctcctttcctatataaaagccctctgccttgctcgcccttctagcacacaagcacaccgctccgcacttctccctgtcgtctcgcccgcccgcgcgcgcggtcgtttaaccttttttctcccaccgctcgccccgtcccgctttccccccggcagcgacgactcctgcggaggtacagagagatgaggacgaggagcgggtcccggtattccaacggcggcgagccggactacctggacgcgcttcccgatgaccttgtcctctccatcctgtccaagctcgccgccgcctcctcggcgccgtccgacctgctctcggtccacctcacgtgcaagaggctgaacgagctcggcagccatgacatggtgttcgccaaggcctcgccggcgtcgctggcggtcaaggcggcggcgtggtccgagccggcgcagaggttcctcaagcgctgcgccgacgccggcaacctcgaggcctgctacaacctgggcatgatccgcttctactgcctgggcagccgcagcggcggcgcggcgttgccgttggcggcggcgtcgaggcgcagcagcaccagcagtgagcgaggaaacggctcggcggctgacatgacgtaccagcaccgagtcccctacaggcccacggctccgctgcgtggaccgggcgtagcggaaagcggcgcagggaggggaaggcgtttcggctgttttctctttctttttgcctctttttcacctgctgatgaattgaatgaggtgtatatcgctggcgctgcctgccgttcagatgcgcattttctactaggtagtaccagggaagcaaagagccaaagagcagtggagatccagcagccgcgcctctcctttattttcttgtaatgttctggcatttccaagctagaaatcgtagaattccaatttccaagccgttttgtaatggagctttggagctgaggttttccatgggggtttctgtc

SEQ ID NO: 210283 - DNA, 3090 bp, Zea Mays
gtttcgtcgacaagccagcagcccagcacgcaaagggcactgtgccgttacggcgcggcggagccggaaactcccgagtcgcgtgacagtaaacgaaggcacgaacgcgactcttccatccaactgtcgaagcaaccgaatcggggacaaccgagggcgagggcggccggcatggggatcgtggaggcgtggatgcgggagaagcccatccgcacattcctagcccgcctcgcccagcgccgggcggcggctgccgccgccttcctcgcttccccctctgccaccacggtcatcgatggcgagggcggcagcgacgggagcatcccgcagctttcctccgttgccaactccgtcgtgtcccgctgctcaaggattcttgctctttcaattgagaacttacagcgaagctttgagactgattttccacacagttgtaatgaggctaatacatatgcaagagaccttttagagtattgctgccataaagctcttcatgaagttacaacacgtccagattatttggccgataagaatcttcgccgcttgatgtttgatatgatgcttgcatgggaaactccaggtgctcaggatgtgtcagtagataatggttctattgtgcgtgattcccttgagattgaagatgaggatgaggggtcaattttttatgcaaattccacaagattggctgctcaagttgatgacaagaagacagtcgggttaagtgcttttgcacgaatagcaccttcatgcccaataatagctgacctggttactgtacgcaatctgtttgacgcacttacaagttcatctggaggccgattgcattttcttgtttatgacaagtatctcaagagtttagacagggaattgaggtctgtgaaaggtatcatgcaatcatcacttgcctcaagttttcatcttgatgctggagaatgcatattagctattgatggagacaagcccattcaaccggtactgcaacatattggaatatcagcatggccaggaagattggtcctcacaacacatgctctttattttcagagtattagagtgggatatggtgataagattgttaaatacgacctatcaacagattcaaatcaagtgattaagcgtgatttgactggaccactgggtgtccgcctctttgataaagctgtgatgtacaaatcaagcactttgacagaaccaatttatttcgatttctttgaattaggaggcccttcacgaagagactattggttagcaatcacccgtgaagtattgcaggtgaacagatttattaggaagttcaatcttggagatgttcagaaagcagaagcactctcaaaagctatcctaggcattttgagatactctgctgtcaaagaagcttttcatattgctccttctcactttaagacaacacttacttttagcttagcagaaaagcttccgaaaggagatatggtcttagaagcactgtataacaattatttccaactcttggactcttcattgagacatttggcaattgattctgcagtcgatagaatgtcggagaaccattctataccattttctttgtatgctctctctagaatgggttttcttctgctgaagacaaacgataaatctgaaaaggaaatgagcttttgtgctgtttgctttggtgtaacaaaatctttggaggctgccctagaagagtcaatttgttactctgagagaatagagtcagcacgtgctacagttgatcaagtaaaggtagaaggcgttgatgcaaatcttgccctcatgcaggagttactcttccctttaattcaagcaggcaagattgtttactctctcagccaatgggaagatcctttgaaatcacttctattcttagcttttatgttgtatgctattcaaaggggtctcatcagttacatcgcaccctttgttttcttaacttttgctattatcatgctttggcataagtatattggagacggaaaattgttggaagtgcttgaagtgaaacctcctccaagtaaaaatgccgttgagcagattttgacattgcaggaggctatatccaagttagaaaattttctacagtctgcaaatattactcttctgaagttcagatctgtcttgtttgcctgtgttcctaaggcctctgatacagatgttagtcctggaaatgtacacaagggagatgcccctaaggaaacagaacactgaaaaattccgcaggcgaattagagagtggtgggctcgcattccagctgcacctgtgcagatgatcagacctaatgaaagcaagaaaaagagatgatcatgggcttttagggttgatttggtgacaaggggatcccgagaggattggaggggattaaggggaaagtaaattaatttccccctcaatcccctccgatcctcccatgatcccgggtcaccaaatcaacccttaggcttttggcagacctagtgccggaggcacccacaccgagaagggacaaactgaggaattctttccttcacaaatgcggagacactgctttgaacccgtgacctagcacctgccactgcactaggccagaatttaagatctcaaagagagaaaaaatagcccacatattctgttccctagtttgaacctaatcagctaacttaggcttcttcggttcgctctcaatccatgtggattaagtgtgattaggtgtgattaaattccaagcaagtcaaacttcttatttttttccagtcatatccaattcatatgtaatgggaataaccgaacaaggccttatgtagattttgacctactaagaaaaactagccccggtaaccagtgtatagcatcatgtcgctatgagtgtaaaatgatgactgcagaagaattattcatttttcttgcaagccatttcttagaagtttctagagctctgatgtgttctagaagaatttatcagatgtttgaactgatggttggaatgtaaggtggtttcatatggattctttgaacttatttgctctagtaaaattgatgtatccccacagcacattggagaagcagctgaaagtgtgtcgtgtagtccagtttagcactttatcttcaaaatt

SEQ ID NO: 210284 - DNA, 3150 bp, Zea Mays
gtttcgtcgacaagccagcagcccagcacgcaaagggcactgtgccgttacggcgcggcggagccggaaactcccgagtcgcgtgacagtaaacgaaggcacgaacgcgactcttccatccaactgtcgaagcaaccgaatcggggacaaccgagggcgagggcggccggcatggggatcgtggaggcgtggatgcgggagaagcccatccgcacattcctagcccgcctcgcccagcgccgggcggcggctgccgccgccttcctcgcttccccctctgccaccacggtcatcgatggcgagggcggcagcgacgggagcatcccgcagctttcctccgttgccaactccgtcgtgtcccgctgctcaaggattcttgctctttcaattgagaacttacagcgaagctttgagactgattttccacacagttgtaatgaggctaatacatatgcaagagaccttttagagtattgctgccataaagctcttcatgaagttacaacacgtccagattatttggccgataagaatcttcgccgcttgatgtttgatatgatgcttgcatgggaaactccaggtgctcaggatgtgtcagtagataatggttctattgtgcgtgattcccttgagattgaagatgaggatgaggggtcaattttttatgcaaattccacaagattggctgctcaagttgatgacaagaagacagtcgggttaagtgcttttgcacgaatagcaccttcatgcccaataatagctgacctggttactgtacgcaatctgtttgacgcacttacaagttcatctggaggccgattgcattttcttgtttatgacaagtatctcaagagtttagacagggaattgaggtctgtgaaaggtatcatgcaatcatcacttgcctcaagttttcatcttgatgctggagaatgcatattagctattgatggagacaagcccattcaaccggtactgcaacatattggaatatcagcatggccaggaagattggtcctcacaacacatgctctttattttcagagtattagagtgggatatggtgataagattgttaaatacgacctatcaacagattcaaatcaagtgattaagcgtgatttgactggaccactgggtgtccgcctctttgataaagctgtgatgtacaaatcaagcactttaaccaatttatttcgatttctttgaattaggaggcccttcacgaagagactattggttagcaatcacccgtgaagtattgcaggtgaacagatttattaggaagttcaatcttggagatgttcagaaagcagaagcactctcaaaagctatcctaggcattttgagatactctgctgtcaaagaagcttttcatattgctccttctcactttaagacaacacttacttttagcttagcagaaaagcttccgaaaggagatatggtcttagaagcactgtataacaattatttccaactcttggactcttcattgagacatttggcaattgattctgcagtcgatagaatgtcggagaaccattctataccattttctttgtatgctctctctagaatgggttttcttctgctgaagacaaacgataaatctgaaaaggaaatgagcttttgtgctgtttgctttggtgtaacaaaatctttggaggctgccctagaagagtcaatttgttactctgagagaatagagtcagcacgtgctacagttgatcaagtaaaggtagaaggcgttgatgcaaatcttgccctcatgcaggagttactcttccctttaattcaagcaggcaagattgtttactctctcagccaatgggaagatcctttgaaatcacttctattcttagcttttatgttgtatgctattcaaaggggtctcatcagttacatcgcaccctttgttttcttaacttttgctattatcatgctttggcataagtatattggagacggaaaattgttggaagtgcttgaagtgaaacctcctccaagtaaaaatgccgttgagcagattttgacattgcaggaggctatatccaagttagaaaattttctacagtctgcaaatattactcttctgaagttcagatctgtcttgtttgcctgtgttcctaaggccactgaagtagttgcagctgtacttattgtcgcagctgcatttcttgtcttcctaccttccaggcctctgatacagatgttagtcctggaaatgtacacaagggagatgcccctaaggaaacagaacactgaaaaattccgcaggcgaattagagagtggtgggctcgcattccagctgcacctgtgcagatgatcagacctaatgaaagcaagaaaaagagatgatcatgggcttttagggttgatttggtgacaaggggatcccgagaggattggaggggattaaggggaaagtaaattaatttccccctcaatcccctccgatcctcccatgatcccgggtcaccaaatcaacccttaggcttttggcagacctagtgccggaggcacccacaccgagaagggacaaactgaggaattctttccttcacaaatgcggagacactgctttgaacccgtgacctagcacctgccactgcactaggccagaatttaagatctcaaagagagaaaaaatagcccacatattctgttccctagtttgaacctaatcagctaacttaggcttcttcggttcgctctcaatccatgtggattaagtgtgattaggtgtgattaaattccaagcaagtcaaacttcttatttttttccagtcatatccaattcatatgtaatgggaataaccgaacaaggccttatgtagattttgacctactaagaaaaactagccccggtaaccagtgtatagcatcatgtcgctatgagtgtaaaatgatgactgcagaagaattattcatttttcttgcaagccatttcttagaagtttctagagctctgatgtgttctagaagaatttatcagatgtttgaactgatggttggaatgtaaggtggtttcatatggattctttgaacttatttgctctagtaaaattgatgtatccccacagcacattggagaagcagctgaaagtgtgtcgtgtagtccagtttagcactttatcttcaaaatt

SEQ ID NO: 210285 - DNA, 3095 bp, Zea Mays
gtttcgtcgacaagccagcagcccagcacgcaaagggcactgtgccgttacggcgcggcggagccggaaactcccgagtcgcgtgacagtaaacgaaggcacgaacgcgactcttccatccaactgtcgaagcaaccgaatcggggacaaccgagggcgagggcggccggcatggggatcgtggaggcgtggatgcgggagaagcccatccgcacattcctagcccgcctcgcccagcgccgggcggcggctgccgccgccttcctcgcttccccctctgccaccacggtcatcgatggcgagggcggcagcgacgggagcatcccgcagctttcctccgttgccaactccgtcgtgtcccgctgctcaagttgtaatgaggctaatacatatgcaagagaccttttagagtattgctgccataaagctcttcatgaagttacaacacgtccagattatttggccgataagaatcttcgccgcttgatgtttgatatgatgcttgcatgggaaactccaggtgctcaggatgtgtcagtagataatggttctattgtgcgtgattcccttgagattgaagatgaggatgaggggtcaattttttatgcaaattccacaagattggctgctcaagttgatgacaagaagacagtcgggttaagtgcttttgcacgaatagcaccttcatgcccaataatagctgacctggttactgtacgcaatctgtttgacgcacttacaagttcatctggaggccgattgcattttcttgtttatgacaagtatctcaagagtttagacagggaattgaggtctgtgaaaggtatcatgcaatcatcacttgcctcaagttttcatcttgatgctggagaatgcatattagctattgatggagacaagcccattcaaccggtactgcaacatattggaatatcagcatggccaggaagattggtcctcacaacacatgctctttattttcagagtattagagtgggatatggtgataagattgttaaatacgacctatcaacagattcaaatcaagtgattaagcgtgatttgactggaccactgggtgtccgcctctttgataaagctgtgatgtacaaatcaagcactttgacagaaccaatttatttcgatttctttgaattaggaggcccttcacgaagagactattggttagcaatcacccgtgaagtattgcaggtgaacagatttattaggaagttcaatcttggagatgttcagaaagcagaagcactctcaaaagctatcctaggcattttgagatactctgctgtcaaagaagcttttcatattgctccttctcactttaagacaacacttacttttagcttagcagaaaagcttccgaaaggagatatggtcttagaagcactgtataacaattatttccaactcttggactcttcattgagacatttggcaattgattctgcagtcgatagaatgtcggagaaccattctataccattttctttgtatgctctctctagaatgggttttcttctgctgaagacaaacgataaatctgaaaaggaaatgagcttttgtgctgtttgctttggtgtaacaaaatctttggaggctgccctagaagagtcaatttgttactctgagagaatagagtcagcacgtgctacagttgatcaagtaaaggtagaaggcgttgatgcaaatcttgccctcatgcaggagttactcttccctttaattcaagcaggcaagattgtttactctctcagccaatgggaagatcctttgaaatcacttctattcttagcttttatgttgtatgctattcaaaggggtctcatcagttacatcgcaccctttgttttcttaacttttgctattatcatgctttggcataagtatattggagacggaaaattgttggaagtgcttgaagtgaaacctcctccaagtaaaaatgccgttgagcagattttgacattgcaggaggctatatccaagttagaaaattttctacagtctgcaaatattactcttctgaagttcagatctgtcttgtttgcctgtgttcctaaggccactgaagtagttgcagctgtacttattgtcgcagctgcatttcttgtcttcctaccttccaggcctctgatacagatgttagtcctggaaatgtacacaagggagatgcccctaaggaaacagaacactgaaaaattccgcaggcgaattagagagtggtgggctcgcattccagctgcacctgtgcagatgatcagacctaatgaaagcaagaaaaagagatgatcatgggcttttagggttgatttggtgacaaggggatcccgagaggattggaggggattaaggggaaagtaaattaatttccccctcaatcccctccgatcctcccatgatcccgggtcaccaaatcaacccttaggcttttggcagacctagtgccggaggcacccacaccgagaagggacaaactgaggaattctttccttcacaaatgcggagacactgctttgaacccgtgacctagcacctgccactgcactaggccagaatttaagatctcaaagagagaaaaaatagcccacatattctgttccctagtttgaacctaatcagctaacttaggcttcttcggttcgctctcaatccatgtggattaagtgtgattaggtgtgattaaattccaagcaagtcaaacttcttatttttttccagtcatatccaattcatatgtaatgggaataaccgaacaaggccttatgtagattttgacctactaagaaaaactagccccggtaaccagtgtatagcatcatgtcgctatgagtgtaaaatgatgactgcagaagaattattcatttttcttgcaagccatttcttagaagtttctagagctctgatgtgttctagaagaatttatcagatgtttgaactgatggttggaatgtaaggtggtttcatatggattctttgaacttatttgctctagtaaaattgatgtatccccacagcacattggagaagcagctgaaagtgtgtcgtgtagtccagtttagcactttatcttcaaaatt

SEQ ID NO: 210286 - DNA, 1816 bp, Zea Mays
acacctggaaagtggtgttccctcgtctgaagccgaggaaaaaatctcgcattcgcaaagcagacaaaacagcgtccccctccctctactaaaaaaaaaatggaggcatgagctccgcctcctcctcgtctctcgccgatctccccaaaccctagccccgacctgaccgccggcgggcccgccggccggagaaggagtcgctcccacccacccaacttctgcggcggaaggggagcgggcggcggacgagatgccgtcgcacggggatctggaccggcagatcgcgcagctgcgcgactgcaagtacctgcccgaggcggaggtcaaggcgctctgcgagcaggccaaggccatccttatggaggagtggaacgtgcagcccgtgcgctgtcctgtcaccgtctgtggcgacatccacggccagttctatgacctcatcgagctcttccgcatcggcggcgacgctcccgacaccaactacctcttcatgggcgactacgtcgatcgtggctactattcagtcgaaacagtttctctgttagtggctttgaaagtccgttacagagatagaattacaatacttagaggaaatcatgagagcagacaaatcactcaagtatatggcttctatgatgaatgcttaagaaaatatggaaatgcaaatgtctggaagtattttacagacttgtttgattttttgcctctcacagctcttatagaaaatcaggtcttctgtcttcatggtggcctctctccgtcattggacacgttggataatattcgttctcttgatcgcgtacaggaggtcttcatcagagcaatgagtgggaattgcagaatcctgccaaattagttctcagatccaagacatgttcaatcctattcagaagcttgataacattgagataattgcaagacagccatacaaaaatgacagcgttgtcagcgtagaaagatacccagtgcttctagtgtttttctctcattcctcttttcttttggggtgggggatggggagcttgaggctgacatttcaccattagtgaagtgaccaaccagtagtcatttgcaatgaggttcctcatgaaggacccatgtgtgatcttttgtggtctgacccagatgaccgatgtggatggggaatttcaccaagaggagcaggttacacatttgggcaagacattgcgcagcagttcaaccatacaaatggtctttctctcatttcaagggcccatcaacttgtaatggaaggatttaattggtgccaggataagaatgtagtcacagtcttcagtgcgcctaactattgttaccgctgtggtaacatggctgctattcttgaaatcggggaaaacatggaccagaacttccttcaattcgacccggcacctcggcaaattgagccagacacaactcggaaaaccccagactactttttgtaattgtggtggtgacattaacttactggtgttgatgctcctcttttccgcagcatcagggtctgtagatcatctgtccttagatatgggttccatgagcccgacctgtacgtctcccaattcttttgtttggagattttgttgccgcttaacgatctttatacaatatgttaaaaagttaaatgccattggatttttcttctttctgttgtacgtcgactttgtattatttgtagacggtgaatggaagtcgcagcaggaaagccagcccctgctatggttttgttttgatgtgcatcatatcatccgcgtggctgagtaaattatgtccagacgggtaggttttggtttgggtttgcagcatcccgatctgatgt

SEQ ID NO: 210287 - DNA, 952 bp, Zea Mays
cgccgagcagggtgcagggagagagatatggcttctatgatgaatgcttaagaaaatatggaaatgcaaatgtctggaagtattttacagacttgtttgattttttgcctctcacagctcttatagaaaatcaggtcttctgtcttcatggtggcctctctccgtcattggacacgttggataatattcgttctcttgatcgcgtacaggaggttcctcatgaaggacccatgtgtgatcttttgtggtctgacccagatgaccgatgtggatggggaatttcaccaagaggagcaggttacacatttgggcaagacattgcgcagcagttcaaccatacaaatggtctttctctcatttcaagggcccatcaacttgtaatggaaggatttaattggtgccaggataagaatgtagtcacagtcttcagtgcgcctaactattgttaccgctgtggtaacatggctgctattcttgaaatcggggaaaacatggaccagaacttccttcaattcgacccggcacctcggcaaattgagccagacacaactcggaaaaccccagactactttttgtaattgtggtggtgacattaacttactggtgttgatgctcctcttttccgcagcatcagggtctgtagatcatctgtccttagatatgggttccatgagcccgacctgtacgtctcccaattcttttgtttggagattttgttgccgcttaacgatctttatacaatatgttaaaaagttaaatgccattggatttttcttctttctgttgtacgtcgactttgtattatttgtagacggtgaatggaagtcgcagcaggaaagccagcccctgctatggttttgttttgatgtgcatcatatcatccgcgtggctgagtaaattatgtccagacgggtaggttttggtttgggtttgcagcatcccgatctgatgt

SEQ ID NO: 210288 - DNA, 1850 bp, Zea Mays
aaaacctcagctccaaagctccattacaaaacggcttggaaattggaattctacgatttctagcttggaaatgccagaacattacaagaaaataaaggagaggcgcggctgctggatctccactgctctttggctctttgcttccctggtactacctagtagaaaatgcgcatctgaacggcaggcagcgccagcgatatacacctcattcaattcatcagcaggtgaaaaagaggcaaaaagaaagagaaaacagccgaaacgccttcccctccctgcgccgctttccgctacgcccggtccacgcagcggagccgtgggcctgtaggggactcggtgctggtacgtcatgtcagccgccgagccgtttcctcgctcactgctggtgctgctgcgcctcgacgccgccgccaacggcaacgccggcgaggagccaccggtccatgggcacgcactgcgccttgtgcgcgcgcttccagtccagcgcctggcacgcgcgggagcagtagttggccgcgccgcacacggagcaccgccggaactcgtgccgccgcgtctcgcgccgcccgcaccgcacgtgggagcaaagacggagctccgcgccgtctccgtcgccgtccacgccgctgccgtcgccgtccttcttcccgcccgcctgggcggcgcagcgggaggcccaccagtccaccatgaactggttcgccgcgtggggctccgcctcggggaggctccacccgaagtcggacaggagggggcaccccccgccgccgccgacgacgccggcggccgcggcgaagggcagcgcggcgacggcgtggcgcgaggcggccgcggagagcgcgagcgtgagctcgcgggcgttcgccgcgaccagcaggcgccggccctcggcggggtcccgccgcacgccgtagccgtcctggaggcagtgcccgagctcgcggagcgcgtcgacgtggcccagcgaggccgcgcgcgcgcacagggcagcccccgcgcgcaggtcgcggtccgacttggccccgccgctgccgttgaactggatgaccgccagcgagtagagcgccgccgcgtgcccgccgacggccgccctcgccagcagcgccgcgccgccgctgcggctgcccaggcagtagaagcggatctgcagaagttgtagcaggcctcgaggttgccggcgtcggcgcagcgcttgaggaacctctgcgccggctcggaccacgccgccgccttgaccgccagcgacgccggcgaggccttggcgaacaccatgtcatggctgccgagctcgttcagcctcttgcacctgcaaacgcgaaagacgtcagcgcacgatccttggcctctccctccagcttatgtttccgaaaacagcacaactgccgtcgctcccccccacgcatttcgattactccatagcgcgagggagacggtgcgctcgccgtgcgaggaaacacgaggagttgatgacaaaacgcaaaggatgctcgggcaggcaggcagacgtacgtgaggtggaccgagagcaggtcggacggcgccgaggaggcggcggcgagcttggacaggatggagaggacaaggtcatcgggaagcgcgtccaggtagtccggctcgccggcaggccgcttcctgcgcccgccgcagtcgcactctccggcgacggccgacggcgacctcttcctcttctgacccaccaaggcaaccacctcgccgccgttggaataccgggacccgctcctcgtcctcatctctctgtacctccgcaggagtcgtcgctgccggggggaaagcgggacggggcgagcggtgggagaaaaaaggttaaacgaccgcgcgcgcgggcgggc

SEQ ID NO: 210289 - DNA, 1103 bp, Zea Mays
aaaacctcagctccaaagctccattacaaaacggcttggaaattggaattctacgatttctagcttggaaatgccagaacattacaagaaaataaaggagaggcgcggctgctggatctccactgctctttggctctttgcttccctggtactacctagtagaaaatgcgcatctgaacggcaggcagcgccagcgatatacacctcattcaattcatcagcaggtgaaaaagaggcaaaaagaaagagaaaacagccgaaacgccttcccctccctgcgccgctttccgctacgcccggtccacgcagcggagccgtgggcctgtaggggactcggtgctggtacgtcatgtcagccgccgagccgtttcctcgctcactgctggtgctgctgcgcctcgacgccgccgccaacggcaacgccgcgccgccgctgcggctgcccaggcagtagaagcggatctgcagaagcgagcgtcccaggtcagcgcccatatccaccatgaccatgccatgcgcgcttgagtcgagaggaagcaacggaatcgacccgatcaagtctacttgcaactcgttagggtttgggtcgcgtggcgtaccatgcccaggttgtagcaggcctcgaggttgccggcgtcggcgcagcgcttgaggaacctctgcgccggctcggaccacgccgccgccttgaccgccagcgacgccggcgaggccttggcgaacaccatgtcatggctgccgagctcgttcagcctcttgcacctgcaaacgcgaaagaccaggtcggacggcgccgaggaggcggcggcgagcttggacaggatggagaggacaaggtcatcgggaagcgcgtccaggtagtccggctcgccggcaggccgcttcctgcgcccgccgcagtcgcactctccggcgacggccgacggcgacctcttcctcttctgacccaccaaggcaaccacctcgccgccgttggaataccgggacccgctcctcgtcctcatctctctgtacctccgcaggagtcgtcgctgccggggggaaagcgggacggggcgagcggtgggagaaaaaaggttaaacgaccgcgcgcgcgggcgggc

SEQ ID NO: 210290 - DNA, 4263 bp, Zea Mays
ggacagcaaaagcacactcgcctcgcctcgcctctccggctctcccgtcctcggtcgcaacgcggcgtggaaaaccccaaccggcgccggtgcggtgcctgcaccgcgccgtagggtttccgcctcgcctcgcctcgcaaccggcgatcgccggcgcgcaaaggaagggattttgttgacgccgagtgccagatgccaattgtttagccatggggaaaccacaaaccgatggtgaccagtcacctgtaaactcagatactgatgtgatggattgcctgaacttcgatggccatggagatgttgaagacccccacaaggaggttgcaaaaggggagcagcagccttctggcgaagttgatgaacagcagtctgttatggatgttgatttgacatgtataacatctgtgggagatgaagggaatgaaaagcagaatgctatggatgtggatttgaaagaaatactatctgaggaagatggaggggaaggaaaggcttcttcagatctaccctcacaagtaccagtggatttcaacgttgcaagcctcgagaagttctgtaaagaagcagcaagatcgtttttcagtgaaactggactggttagccatcagataaactcgtacgatcattttgtctcccatggactccaagagctctttgattctcttggggaaatcactgtggaacctgattatgacccttcaaataaacatggtgcttggaaacatgcaactgtcaaatttggtagggttaagcttgatgagccagtgtttatgcttgaaaattctgaccttgaagagcaagatctcaaatttaagcctagacatgctcgcctccagaagatgacatatgcgtctaggatgaatgtggaaatgactgttcaggtttatatattcgacacaagtgacaaagccaaaactggcaaggatacacatgttcataaaagagagataatgacagaaactaaacaaatcaacattggattgttacctgtaatggtgaagtcgaatttgtgctggctgcataaatctcaaaaaggtgactgcccgtttgattttggtggctactttttgatcaaaggaacagaaaaggtattcattgctgaagagcaaaggtttttatcaaggatttgggtcacagaccaccccagctgggatgcaagttacctatctcagatcagacgagaaaagatcaatataaaacttgttccgtccaaaagcaatgaaagctgcaaagtcataaacatttgcttcatgggtacgattatgccaatttgggtagcattttttgcacttggtgtatcgtcagacaaggaagcttttgatatgattgatatcctagactgtgatgctgacatagttaacataatatcattaactattaaagaatctcatgaagaatttgaaggcttccgcactccaggtagagcccgtcaatatgttgatgagctgatcagaaaatcaaagtttccgcccaaagaatcctttgatgagtatgtttgtaggtatatgtttcctggtgtcaatgggtttaggagcaaggcacttttcttgggttacatggtcaaatgtctgctaatggcatactctggcaatcgaaaatgtgataataaggatgatctccgtaacaaaaggctagatctttcctgccaattgcttcggagagaactctggactcatattaaaagagcagaaaggcgcatggttaagctcatgcagagagatttgagcaatgatggcaacttgcaagaccttaggcgttatgtggatgcatcaattattaccaatggattgaaccgggccttctccactggttcttggcggcatccttataaaaaagaaaggtgttcaggggttgtagcaacccttcggagaacaaatccacttcaaatgatgtctgatgttaggaagacgcgacagtggtttgcatatgctggaacggctggagatgcaagatacccgaatccatcctactggggaaaattgtgttttttgtccaccccggatgctgaaaaatgtggatttgtgaaaaaccttgctgttactgctgtggttagttctgtagtgaggaaaccgttgattgatacatttgtttcttgtggaatgaagaaactggatgatatttctctacaagatatttctgggaaggacaggattttcttgaatggaagcttgctaggagtatgtgcagacccacacgaattgactttgcgtttaagaagcttgaggcgtagcaagctaattgatcctcaggttgaaatcaaaagggacaagcaccataaagaagttcgtgtattttctgatccaggcagaattatgagaccacttcttgtagttgaaaatctaagaagaatcacaagaccaaaagatggactatactcttttcaggaacttatagatcaaaacatagttgagctgattggtgttgaagaagaggaggatatccaatgtgcgtacggaattagacatctattctccagcagggagaaagaagactggtcttcttctggctatactcattgtgaacttgatccttctttcttgctagggctgagctgcagtctcattccctttggcaaccatgataacgctaggagggttcagatgcaagctgaaaaaatatcacagcaggctatcggctactcccctacaaattctcagtacagactggacaccctttcacatcaaatgttctatccacaaagacccttgtttagaactgtggtgtcctacggtcttggagaggcgaagacagactgcagctccggacgaaaagacgacttcaacacaccagaatatttcaacggacaaaacgcgatagtctcagtgaacgttcatcagggattcaaccaagaagactctctggtgatgaatagggcctccttagagcgtggcatgtttcgcacgctacatttcaagagctacaaagcacaggtcgagaacaaagagatcacaaggcgtctcaagcacagggaaaacatcaatttcggtaaagtgcagagcaagagggggaaggtcgacagtctggacagtgatggcttaccatacgtcggagcaagtcttcagagtggtgacattgtcattggtaaggtcacggagtctggtgaagatcatagcgccaaactgatgcatactgagaaagggatggtggacaaggttgttctttcggcgaacgatgatggggttaactttgcaactgttactctaagacagtctcgctcgccatgcgtcggagacaagtttgccagcatgcatggacagaaaggagttgttggcctgttggattctcaggagaatttcccattcacttcccaagggattgttccagacatggtcataaacccacatggttttccaactcgtcaaactcctggacagctgcttgaggctgctctggggaagggcatcgcccttggtgggaaggtcaggtacgcaacgccgttcaccactccgaccgtggaggtgatcgccgaacagctgcacaaggccgggttttgcaggtggggtgaggagagcgtgctgaacgggcagaccggcgagcggatgaagtcgctggtgttcatggggccgaccttctaccagcggctggtccacatggcggaggacaaggtgaagttccggaacacgggtccggtgcacccgctcacgcggcagccggtggaggacaagaagcggttcggcggcgtcaagttcggggagatggagcgcgactgcatgctggcgcacggcgccgccgccaacctccacgagcggctcttcaccctcagcgacttctcgcggatgcacatctgccaggcctgcgagcgggtggccaacgtcatcgtgcgggccgccgagggcggcggcggcaagaaggtgcgcgggccctactgcttgttctgccgctccgcggagcgcgtcgtccgggtcgacgtgccgtacggctccaagctgctgtaccaggagctcttcagcatgggcatctgcctcaagtttgaaaccgaggtccgctagaacgaacgccatggcagttcaccagtgagactccctcgatgcatatgcaagtatgcaactgcactgcctaggatcttggtgctttatgggctggtgttgaaacctgcagttttggcggcacgattttctgggcatgcattcagtagcaggcactggttgatactgtgattctggacggattttctgctgatactgtgatctagggggggcatggttttttgtttgtgaattgtgatgtggcgaggcaggaattttctgttcgtgcagcgtgcag

SEQ ID NO: 210291 - DNA, 1943 bp, Zea Mays
gttgtttgccattggcatgatctacaggttttctgtaacctatgtcgtctccaattcgataataacaaacggaagagggaggaacagatttctccttgctatccataattgcggagttcgtcgtgatccgccatgctcgacgaccatccctttgctcaggatggcatctcgagccccatagcagcgcacatctttgacttctgcgacaatggcagcggcggcgacctcttcacggccgtgaacgtggcctcagacctgttcacggcgccatcagaggatgcctcgtcgtcgtccgtagtgacgacgcctcccgcgccctgcggccacggcgacgacatgccgttgggcaccgccgcggcgcctgctgcctcggccttctcccccatgccgtccttcgactccaccctctccgctctcctcgaagaagaagacccatcggttccaaacccagaactcctcctacccatcgactacccgttcgcggcggcggcggctggagacgagcctcaccccgaacagcagcagcagcagttcgcgcaggtgccagtaatgcttccactggccggtgcggcccagcacccgggtctgcagacgcacagcacggcgtccgagctgatgcagctagacgagtgcttcgcggcggcaatggctggaggaggagggtacgtgggcctaaacgagtccatgtgccagcagccgcagcccggcgcgttgttctccaccaccggcggcatgatggaaaccggcgcgccgggctgctactttgacaaggacatggcggcggcggcggcggcgcagggtggcttcttggggaccggttgcaatggcatgatgatgtcgataatggggatggaggagatcggcgagtaccagcggatgatggagggcgccagcgactcgctggccggcacgcacattcccgacgcggactgtgccgccgcggcacagatggcgttcagcggcaacgccgttgccggggagatgcagatgggcggcagcatgagcccggggcggctgccggcggcgacggcgacggaggcgtcgagcctggaggacgccaacttcaagagcgcccgcatcaccgtggaggagaggcgggagaagatcatcagtacgcttgcagaaagaccctggcggacagcaggccccgcgtccgcggcaggttcgccaagaatgacgactacggcgagccgtcgtcaagggtgatgcagaaccacgaggagtacgaccaaatggcggccagcatgaaggcagaagacattctcgatcccgacgccgcgcacttcaacgggatgaattcctacttgttcaaccacaccgtcgaatcctggctgtgacgcgaacgaacgccggctaaaccaccctgaattttccggatccttcggcttcctgatcctgtgcagagttctcagcagcgcctttaatttttcgttgtttcggccccatggaataactggtcacgtgtaggttattatataaatcacgcgcgcagctccatcgggcgctagataaatggctcgtcaagctaaagtttagctactaaacagaaaaatagaaaaataactcttcaacagactaactatttaactcgtcagttatccgactcttaaattggcttcaccaccagcggaacttacactctgacgagccaaactagatagatagtctgttggagtaagatgctatatatatagtgcaatctttatgtaaaagtaaaatagaaggttaaatagagagagaaaaaaataaaagtcacttggagatgctctatgtagtctcttgtcactgtatatgcaaatctgatttcaccagcttgcggtagaacctgtgggtatatagttgagagttttgaagaaaataaagcttggatatacaaatttgtacttgatttcttaatagaaacaaagcttgtgggatcatacatgtacacgtgcatggtacgt

SEQ ID NO: 210292 - DNA, 1979 bp, Zea Mays
attggcatgatctacaggttttctgtaacctatgtcgtctccaattcgataataacaaacggaagagggaggaacagatttctccttgctatccataattgcggagttcgtcgtgatccgccatgctcgacgaccatccctttgctcaggatggcatctcgagccccatagcagcgcacatctttgacttctgcgacaatggcagcggcggcgacctcttcacggccgtgaacgtggcctcagacctgttcacggcgccatcagaggatgcctcgtcgtcgtccgtagtgacgacgcctcccgcgccctgcggccacggcgacgacatgccgttgggcaccgccgcggcgcctgctgcctcggccttctcccccatgccgtccttcgactccaccctctccgctctcctcgaagaagaagacccatcggttccaaacccagaactcctcctacccatcgactacccgttcgcggcggcggcggctggagacgagcctcaccccgaacagcagcagcagcagttcgcgcaggtgccagtaatgcttccactggccggtgcggcccagcacccgggtctgcagacgcacagcacggcgtccgagctgatgcagctagacgagtgcttcgcggcggcaatggctggaggaggagggtacgtgggcctaaacgagtccatgtgccagcagccgcagcccggcgcgttgttctccaccaccggcggcatgatggaaaccggcgcgccgggctgctactttgacaaggacatggcggcggcggcggcggcgcagggtggcttcttggggaccggttgcaatggcatgatgatgtcgataatggggatggaggagatcggcgagtaccagcggatgatggagggcgccagcgactcgctggccggcacgcacattcccgacgcggactgtgccgccgcggcacagatggcgttcagcggcaacgccgttgccggggagatgcagatgggcggcagcatgagcccggggcggctgccggcggcgacggcgacggaggcgtcgagcctggaggacgccaacttcaagagcgcccgcatcaccgtggaggagaggcgggagaagatcatcaggtacatcaagaagcggaacaaacgcaacttcagaaagaagatcaagtacgcttgcagaaagaccctggcggacagcaggccccgcgtccgcggcaggttcgccaagaatgacgactacggcgagccgtcgtcaagggtgatgcagaaccacgaggagtacgaccaaatggcggccagcatgaaggcagaagacattctcgatcccgacgccgcgcacttcaacgggatgaattcctacttgttcaaccacaccgtcgaatcctggctgtgacgcgaacgaacgccggctaaaccaccctgaattttccggatccttcggcttcctgatcctgtgcagagttctcagcagcgcctttaatttttcgttgtttcggccccatggaataactggtcacgtgtaggttattatataaatcacgcgcgcagctccatcgggcgctagataaatggctcgtcaagctaaagtttagctactaaacagaaaaatagaaaaataactcttcaacagactaactatttaactcgtcagttatccgactcttaaattggcttcaccaccagcggaacttacactctgacgagccaaactagatagatagtctgttggagtaagatgctatatatatagtgcaatctttatgtaaaagtaaaatagaaggttaaatagagagagaaaaaaataaaagtcacttggagatgctctatgtagtctcttgtcactgtatatgcaaatctgatttcaccagcttgcggtagaacctgtgggtatatagttgagagttttgaagaaaataaagcttggatatacaaatttgtacttgatttcttaatagaaacaaagcttgtgggatcatacatgtacacgtgcatggtacgt

SEQ ID NO: 210293 - DNA, 1815 bp, Zea Mays
tgcttacccaagcgtgtctctctccctggcctcaatctccagccgccactcactaggagatcttctccttcacgccacctaacgtgccatcgtcttcacccggccgtcgtccaccctgccttctccagcttgcgccaaacgtgcgctctttgtgccgccttcgtgacctcccctagctcggccatggatgtcgcgccgcccttctcctatctctctgctcgaccgtgcctcttcttccttgagccacgcccggtgctcctccaccaagcctcgtcggcatgctctcctggcagcggtcggatctggcctcctgcttcccctctagtacgctctcgcttccagctcgttgtgcctctgtactggagttcgccggacagtgcccttgctcggcttctccaatgcgccctaccgccagcacccctctcttggtcatcccttcccctgcgcatgcgctgggcgtgtctcccagccgccagctcggctcctcgcttcaaccgtagacctggtactcctcccgtcgtgcctgtcctctgtgcgcacgcgccatcgccttctctagccattgtgctcggccgatgactcacttcgtgccactcaggggtggatctacgaccggggctgcctgggctgcagccccggtcgcggccagtaaagcgaataggctcatcacgcgtgacagcccagctctgcatccagccgcctagctctagccgtgtccagtccgtgctgtgattctgtgagcatttttcctaccctaaaccagctgccgccgccgcccgccagccgtggaggagccacccagacacccaccgcctacggcccgccgccgcagcacgcagcgctgctagcttggaggccgcagccagcccaccgccgcagcacgcagcgctgctcgcttggaggccggagccagaccgccggacggccggagcctcggagcaccgccgccggcccgccgccgcagcacgcagcgctgctcgcttggaggccggagccagaccgtcggacgcccggaggcccagaggccggagctagaccgccggacggccggagcccggaggcccagagcactgccgcagcaatggctgaactaccaaagtgtacactgctagtatttgctaatgatcggattcggagctgcacgtttcagaagggaatatagtagctcaagttgataggccatatatggctgaggacaatctggaagcatcgacatgacgccacctcatcgctcgcggaacgcgtggttagttgatggattaatcctgtatccgccactggtgccactgcttcggtgattgcactcagtcctgcgatgtcgacccatctcagttgtcctccagccctaccgtacgcctcgtgttgtcgatggcagcccatgacttcaacatcgacatataccaagagtcggcaattgcatgtgtgtgtggtggtttggtgaagatggagctatggacggagtagagagtgaatcccagttcgacgctcgtgacgaaaaaccaaatccaagaattattggcattcttgcgaattttgagccaggttatttgtgcggagtcccgatgtgtcgctcgccaagggcttgataaaacgactgaaccagaaatccattgccattcttgtgatatcgtgtcgacttggtcttggtaagaaaaattattgtttgtgttagttcggctgatgaatggagtaactagatatcttagttgtgagcattgatatggtcgcaatcgtgattggcaaatcagcatttttgtcgtgtaagctaagtttatgtttgaagatttaggttatgcgatagggattaaattggtg

SEQ ID NO: 210294 - DNA, 1036 bp, Zea Mays
tctagccgtgtccagtccgtgctgtgattctgtgagcatttttcctaccctaaaccagctgccgccgccgcccgccagccgtggaggagccacccagacacccaccgcctacggcccgccgccgcagcacgcagcgctgctagcttggaggccgcagccagcccaccgccgcagcacgcagcgctgctcgcttggaggccggagccagaccgccggacggccggagcctcggagcaccgccgccggcccgccgccgcagcacgcagcgctgctcgcttggaggccggagccagaccgtcggacgcccggaggcccagaggccggagctagaccgccggacggccggagcccggaggcccagagcactgccgcagcaatggctgaactaccaaagtgtacactgctagtatttgctaatgatcggattcggagctgcacgtttcagaagggaatatagtagctcaagttgataggccatatatggctgaggacaatctggaagcatcgacatgacgccacctcatcgctcgcggaacgcgtggttagttgatggttgtcctccagccctaccgtacgcctcgtgttgtcgatggcagcccatgacttcaacatcgacatataccaagagtcggcaattgcatgtgtgtgtggtggtttggtgaagatggagctatggacggagtagagagtgaatcccagttcgacgctcgtgacgaaaaaccaaatccaagaattattggcattcttgcgaattttgagccaggttatttgtgcggagtcccgatgtgtcgctcgccaagggcttgataaaacgactgaaccagaaatccattgccattcttgtgatatcgtgtcgacttggtcttggtaagaaaaattattgtttgtgttagttcggctgatgaatggagtaactagatatcttagttgtgagcattgatatggtcgcaatcgtgattggcaaatcagcatttttgtcgtgtaagctaagtttatgtttgaagatttaggttatgcgatagggattaaattggtg

SEQ ID NO: 210295 - DNA, 1445 bp, Zea Mays
gtagagtggtcactgttgtaccatcagacacggtgttgacagcatcaaagaagatgctggaactaaaaatgagttcagcagttgtagcaatcgaaagcaaacctgggggaattctgacatctagagatatcctgatgcgtgttatcgcccaaaatcttcctcctgagtccactacagtcgagaaggtcatgactcagtgtcctgaatgtgcctcggtagacaccccaattcttgatgctcttcacacaatgcatgatggaaaatttttacatttgcctgttctggacagggatggaaatgttgtgactgttgttgatgttcttcacataacgcatgctgcaattgctacggttggaaacagcggggcagctggatctgagtcaacgtctgccatgatgcagaggttctgggattcagcaatgtccattggacctcttgatgatgatgatgactccaccagaaggatcgacaaaggtggcatctgaggcagcagatataggaagatcagccttgtttccagcttctgctttatcaaacacttttgggttcaagattcaggacaagcaagggagaatgcacagatttaactgtgaaacgagcagcttgacagacctgataactagcattcttcagagggtcggcgatgacattgacagaaaacacctgccacaaattttgtatgaagatgaggaccatgataaggtcatattgtcgtcggacagtgaccttatagctgccgtagaccacgcaagacaaatcggttggaagagcctaaggctgcacttggactacgcccgccggaagagaggggacggttcctcagacttcgagtacgctggcaaggatgcatgggcttctgcatacagtgctgtcgcggcaggggcggctctggttgctgggctcggcgtgatggcttacttgaaacggtcagggtaatagcttgaggcaagcacggcagggactagggagcacggttttgatcgtctttgtgatacaagtgccacttcatcggaattggcagaatggctgtgtaagtaattcttgtgagagaggaaaaaaatgaagattttaataatactactgtcaaggcagtgaatggtcccttcatacaagtacacggaactgatcgagttttttttggtgggttgagacttgagagtcaccatggctgtcagcttcgtcacgattgtatttattatcataaaaacacatgattcattgtacaagaagagtcttgatagaccttcttcatgcagcgtctggctgattagaatttatccaaggcgatttttgtccatagttactagctcttgctgcaacctgcaatgtactaagctccttgttccagcagacaccagattttttgtatgatactgtgactaaaattttgctctccacagaccatgcgtgtatgaagacatgattttttttgtcatagttttttt

SEQ ID NO: 210296 - DNA, 2027 bp, Zea Mays
ttgtggaatccgaggattaacgataaaaagccgctgactggcgagaggaccgtgaaaaggctgaggttgtccaaggcactgacgataccggatcacacgaccgtgcacgaggcttgtcggaggatggcatcacgcagggtagatgccgtgttactgaccgactccaatgctttgctctgtgggatccttaccgacaaggacataaccacaagagtgattgctcgtgagttgaagatggaagagacactggtctccaaggtcatgactagaaaccctgtatttgttctcgcggacacgcttgccgttgaggcgttgcaaaagatggtgcaaggtaagttcagacatctgcctgttgttgagaatggtgaagtcattgcaattctggacatagccaagtgcctatatgatgctattgcacggatggaaagggcggcggagaaaggaaaagcgatcgccgctgctgttgagggcgttgaaaagcattggggaacagctgtatctggtcctaacaattttattgagactcttcgagaacggatgtttaggccatcactgtctaccattatctctgagaattcaaaagtggtcactgttgtaccatcagacacggtgttgacagcatcaaagaagatgctggaactaaaaatgagttcagcagttgtagcaatcgaaagcaaacctgggggaattctgacatctagagatatcctgatgcgtgttatcgcccaaaatcttcctcctgagtccactacagtcgagaaggtcatgactcagtgtcctgaatgtgcctcggtagacaccccaattcttgatgctcttcacacaatgcatgatggaaaatttttacatttgcctgttctggacagggatggaaatgttgtgactgttgttgatgttcttcacataacgcatgctgcaattgctacggttggaaacagcggggcagctggatctgagtcaacgtctgccatgatgcagaggttctgggattcagcaatgtccattggacctcttgatgatgatgatgactccaccagaagcgaaggatcgacaaaggtggcatctgaggcagcagatataggaagatcagccttgtttccagcttctgctttatcaaacacttttgggttcaagattcaggacaagcaagggagaatgcacagatttaactgtgaaacgagcagcttgacagacctgataactagcattcttcagagggtcggcgatgacattgacagaaaacacctgccacaaattttgtatgaagatgaggaccatgataaggtcatattgtcgtcggacagtgaccttatagctgccgtagaccacgcaagacaaatcggttggaagagcctaaggctgcacttggactacgcccgccggaagagaggggacggttcctcagacttcgagtacgctggcaaggatgcatgggcttctgcatacagtgctgtcgcggcaggggcggctctggttgctgggctcggcgtgatggcttacttgaaacggtcagggtaatagcttgaggcaagcacggcagggactagggagcacggttttgatcgtctttgtgatacaagtgccacttcatcggaattggcagaatggctgtgtaagtaattcttgtgagagaggaaaaaaatgaagattttaataatactactgtcaaggcagtgaatggtcccttcatacaagtacacggaactgatcgagttttttttggtgggttgagacttgagagtcaccatggctgtcagcttcgtcacgattgtatttattatcataaaaacacatgattcattgtacaagaagagtcttgatagaccttcttcatgcagcgtctggctgattagaatttatccaaggcgatttttgtccatagttactagctcttgctgcaacctgcaatgtactaagctccttgttccagcagacaccagattttttgtatgatactgtgactaaaattttgctctccacagaccatgcgtgtatgaagacatgattttttttgtcatagttttttt

SEQ ID NO: 210297 - DNA, 2554 bp, Zea Mays
gccgcacgcaaacgcacgggcatccaatccaaccagaaatttcgctgtgctttgtgcgtatccaaacggaatggacgggaaccccgaaccccaaattgatccgatccactcaccttttttccccttctaatttcactttcacctcctccgccaccagttcggggaaaaggaatttttggagaaaaatcccattggcccagcccagaatactcagccgcgcgccgcgaccttcgctcccgtctccggtctccgcctgccccccgtccccaacctatcgggagcgctcccgattcgcgggagcgagagaaatagagtgccccccgctctccgctctccgccgcggatcagcgccgtcgccgatcggaggccctcgcttccgccggcgggcggcgcgagccgggagatggacggcggcgcgggtgccggtcggaggagcgtcccctcctcctccggattcaggaggagggtcccgcccgccgagaacgggcacggccatgacgccccgccgccctccaggcggtcctccgcctccctctcccgcggccactccacgccgctgactggcgagaggaccgtgaaaaggctgaggttgtccaaggcactgacgataccggatcacacgaccgtgcacgaggcttgtcggaggatggcatcacgcagggtagatgccgtgttactgaccgactccaatgctttgctctgtgggatccttaccgacaaggacataaccacaagagtgattgctcgtgagttgaagatggaagagacactggtctccaaggtcatgactagaaaccctgtatttgttctcgcggacacgcttgccgttgaggcgttgcaaaagatggtgcaaggtaagttcagacatctgcctgttgttgagaatggtgaagtcattgcaattctggacatagccaagtgcctatatgatgctattgcacggatggaaagggcggcggagaaaggaaaagcgatcgccgctgctgttgagggcgttgaaaagcattggggaacagctgtatctggtcctaacaattttattgagactcttcgagaacggatgtttaggccatcactgtctaccattatctctgagaattcaaagtagagtggtcactgttgtaccatcagacacggtgttgacagcatcaaagaagatgctggaactaaaaatgagttcagcagttgtagcaatcgaaagcaaacctgggggaattctgacatctagagatatcctgatgcgtgttatcgcccaaaatcttcctcctgagtccactacagtcgagaaggtcatgactcagtgtcctgaatgtgcctcggtagacaccccaattcttgatgctcttcacacaatgcatgatggaaaatttttacatttgcctgttctggacagggatggaaatgttgtgactgttgttgatgttcttcacataacgcatgctgcaattgctacggttggaaacagcggggcagctggatctgagtcaacgtctgccatgatgcagaggttctgggattcagcaatgtccattggacctcttgatgatgatgatgactccaccagaagcgaaggatcgacaaaggtggcatctgaggcagcagatataggaagatcagccttgtttccagcttctgctttatcaaacacttttgggttcaagattcaggacaagcaagggagaatgcacagatttaactgtgaaacgagcagcttgacagacctgataactagcattcttcagagggtcggcgatgacattgacagaaaacacctgccacaaattttgtatgaagatgaggaccatgataaggtcatattgtcgtcggacagtgaccttatagctgccgtagaccacgcaagacaaatcggttggaagagcctaaggctgcacttggactacgcccgccggaagagaggggacggttcctcagacttcgagtacgctggcaaggatgcatgggcttctgcatacagtgctgtcgcggcaggggcggctctggttgctgggctcggcgtgatggcttacttgaaacggtcagggtaatagcttgaggcaagcacggcagggactagggagcacggttttgatcgtctttgtgatacaagtgccacttcatcggaattggcagaatggctgtgtaagtaattcttgtgagagaggaaaaaaatgaagattttaataatactactgtcaaggcagtgaatggtcccttcatacaagtacacggaactgatcgagttttttttggtgggttgagacttgagagtcaccatggctgtcagcttcgtcacgattgtatttattatcataaaaacacatgattcattgtacaagaagagtcttgatagaccttcttcatgcagcgtctggctgattagaatttatccaaggcgatttttgtccatagttactagctcttgctgcaacctgcaatgtactaagctccttgttccagcagacaccagattttttgtatgatactgtgactaaaattttgctctccacagaccatgcgtgtatgaagacatgattttttttgtcatagttttttt

SEQ ID NO: 210298 - DNA, 617 bp, Zea Mays
agtacattcagtcttgaacccacgatttacattcatgggttttgacagaagatgaaagtaatgtcaaagcgctgttcaggcgaggaaaagctaaatctgaacttggccagacagaatcagcgagggaagatttcctcaaagcgaagaagtactccccagaagacaaggagatcattcgggagctccgtttgctcgcggaacaagacaaggcactataccagaagcagaaggagctctacaaaggtctctttgggccaagtcctgaagcgaaaccgaagaaggcaaagtacctcgttgtgttttggcagtgcctggtgtcatttatcctttatctggctgggatgttcaaacggaagaacgagtaggataatttaccagaaaattgtgtagaactggtggcctaattgaccaaccttgtattataaggagtgttgaattttctgtagaactgtcggccggtccggatcaattagttgttatgaactctatacgatgttgttcactattatgccatagtttcatacagtctttcaactggagctcaaagggccttttatgccattgtatattgcagctttcatatttagattatgctagtaataatactgttgctacaa

SEQ ID NO: 210299 - DNA, 2782 bp, Zea Mays
aaagcccgtcagccggtgtgtagacccaatacggcccggccgatttgtcgctgacgtcacctcatcttcaccaccggagtccggagtaatgcgcaggccacagggtcgggttcgctttttcttggcttcttctctcgtccatccacagggggaaggagcaggagggagggagccatggttgtcagcacattcactggccccgggattgggatcgggttcggtgtcggctgcgggttcggcgtcgggtgggggttcggaggaatgcctcttaacacgttcggcttgggtattggtgggggctgcggagttggtcttggactaggatggggctttggaaatgcttttggttgtcagtatcgatcttcaagagtccagttccagggcattgaatttcagaagaaggctggaggagatgaatcacaaaaagttgtttcacccgagcttgctgaaaagtctcatccttatggctagtattcctgctaccacaaaatccacagagactgagttctgtgtgctgagttgcagtttaattacatacattttcttttctcaggacaagcttaaaaacaaaacaaaataactgctgctataaagttacagtttagggaaggtcttttaagttgaaccaccagaaggttaagaaaaagtacaaaacaaaggcggacgttgtttctgatctgttggtgggtgctgtgactgcataccgggaatcagaacaactggtaacttcgtcatagcatgaagcatccatggacctggcatgatggtgaatgacttgcacaactgtatctcttttcttcctgaaaacacacaactgtgtctttcagtgtttttttccagtgcaaagcctctcatacatcaagcaaatggatggtcaaaggaagcagaatcgttctttgatgtagtagagcttgctggctctgcctccccagtcctgaaccagtatgactgctggaatgaagctgcgcttgtggggacatcctccatgacccattcaaagcccttggggtagtagatccctgtcattggatgtgggacccacaatgatgtttctggggacttcacttcagtaggctccagtcgcttcacaaggttcaacatggattactagttaccggagcagagctgccgatttcgcaagcgcatggcggcccatcgaatgcaggctggggcgtttgctaagatgccactggtggttatccttggtagcaaccagctgatagcagttccttcttgtttggtacctccctcatcctcaacccaggtatttatacactagctgtagccttgcagatgcaatgccacaacaccaaccaccttccgcaataaaagagacaccgtacatccattggattatagagaactagacacgcttaacatacagcaaagctaaagaggaggaggggtttgttaaaggattatagacaattttgttcactgtcgctagcttccaatggagcaactgaaatgacggttttgagcctctgattgaacgcctctggacaaaacaccaccagaactgatgctcctagaatctgaagtcagttttgccaaggagtgcagtcttggactgtactgttttgctattttgtgtaaccatgcgacagcaccaccgaggctgtagctagcattgttagcaaagtggaaccttgacattatgaacaaaagatgagagccggacacaattagaagaaaactctacagttacagaaattccacgatgaagggttgatagctgcaaattattttgttataataaagtcctcaatggcttgtaaaattagcaagctgatgtagaggctaaaaacacttatggagtatgataaaagcttagagtcctcagagcacaggtcagagacagcgttttgggtgacagtcgacattggctcttaaagactcgctagcgcggttatttttcttgttctctcatcactgggtaagatctgtactcagctgtcgaagtcaattagccattgagcacgcccattaacaggtgaactcagagtggaaatccatctggatgtgattatcatgcatatttcaagatatgtatcctcaagcgccatcgacgctctgtttcttgtgcacaataatggagagcatgggatctgattctccgcttccataacgcacagctacggcgcaaaactaaagacaaagcatttcaggccttccgtatttgacagactgacagtacagtcacgagaagcacgacgctgcctgcacaggagttgtactgggacatgtctgggagtggaataaagctgctgattttgttctcatcggcttcgatccgtctgttggctccattgcttttggtagaagggtaggaagtcttccagggctggatggtatgctgctatacaaggaatcttgatcacttcacaggttattggcacttgttttcgcgtcccctattccaaaagaaattatgctggcatgttttgcttgttactccctgtgactggtccgaacagtttccaagacaattatgtactgattttgtctgggcattggaagtctggaacagaatgtggcttcctaaacaaggtaatcgattgcactataaaaagttgaataaattgtaaagggttgggatacatttttttgagattactgcctcctgtttatcctgtttgttttttaatcatatgggaacttaaacgtatggactgtcttgctgacacggtggagcccacttgactgttcaatatgcagaactgactaattgggcatcagtatgacttttaggatcaactagtcggttactcgtgcattgtga

SEQ ID NO: 210300 - DNA, 689 bp, Zea Mays
aaagcccgtcagccggtgtgtagacccaatacggcccggccgatttgtcgctgacgtcacctcatcttcaccaccggagtccggagtaatgcgcaggccacagggtcgggttcgctttttcttggcttcttctctcgtccatccacagggggaaggagcaggagggagggagccatggttgtcagcacattcactggccccgggattgggatcgggttcggtgtcggctgcgggttcggcgtcgggtgggggttcggaggtgggggctgcggagttggtcttggactaggatggggctttggaaatgcttttggttgtcagtatcgatcttcaagagtccagttccagggcattgaatttcagaagaaggctggaggagatgaatcacaaaaagttgtttcacccgagcttgctgaaaagtctcatccttatggctagtattcctgctaccacaaaatccacagagactgagttctgtgtgctgagttgcagtttaattacatacatgtgagttctttgttagtaatgttatgctacacttatggtcatttctgttgtaaccagaagttgttaatggatggaattttcaattaggaagaaatgacgctaatatttgccctacatgctattcatttacttttcatggttgaaggcccgtcactatcatttattgctgtgctttatgttgt

SEQ ID NO: 210301 - DNA, 1047 bp, Zea Mays
attcagcccgcagatttttgtacccgccggctgggcctcggcctcggcgtgcaagaaactagaaagaggagcagacaaacaaaatcgattagaaaattaaccccaggccagaaacccactctctctctcccccgattcctttcctcgtcctcatccgtccaggggagcaaacaagcaagcaagtaaacgggcgaggagctggatagaggccggcgacgcgaagcaaccgccgatcggagccgcggctgaggaggaggagcaagctcgagatggtgggtctcgtcggcggcagcacggcgcgggcggagcacgtcgtggccaacgccggaggagagacggagtacgtgcgccgcctgcaccgccacgcgccggccgagcaccagtgtacttccaccctcgtcaagcacatcaaggcgcccgtccacctcgtgtgggagctggtccggagcttcgaccagccgcagcggtacaagccgttcgtcagaaactgcgttgtgcgcggtgaccagctcgaggtcggtagcctgcgcgacgtcaacgtcaagaccggcctgccggcgacaacaagtaccgagcgcctcgagcagctagatgacgacctgcacatactcggcgtcaagttcgtcggcggggaccaccgcctccagaactactcatccatcataactgtccacccggagagcattgacgggaggccaggtaccctcgtgatcgagtcgtttgtggtcgatgtgcctgacggcaacacaaaggatgagacatgctacttcgttgaggctgtgatcaaatgcaacctcaagtctctcgcagaggtatctgagcagctagcagttgagtcacctacatcgccgatcgatcagtgagtcgcctgcatccctgatcgatcagtaacaccggtacaaagacatgaatcggcaacaaataagaagtttcaaaggctggctagagggttcaacctttttgagattggtggtttcgccatcgtcttctgcgtgtatgtctcttggaatatggaaggtttagtgatgatcttgacgtagttactcc

SEQ ID NO: 210302 - DNA, 3337 bp, Zea Mays
ggcagagagctctgcctccccaggatacttcgcccctcgttccaccgcgagcccttccgcgttccgcctctgttccgccgctcgggacccgggagacgagaagtagtagccccatccccaactggtcctaacccacggtacccaatccttgactcggttctctccatgagcttactgccccatctccatttcttcaatcattactcgcctttccgttcaagggcgttgcttgcctggataaccacggcatcgttctacccgccgggcccgagctaagtcatacgtgcaaacaaagagcagcaaaagaagaacaagtggggcgacagggacagggaggaggggaaggcagaggaaatggaagcctctttcttgaggaaagatggcggtgatcaagccagtgcggcgacaatgtccggcgagcacaggaacaagggccttgactgggatttgaacgactggaggtgggacgccaacctgttcctggccacgccggcggccatcgtgccgtccgagtgcagcagcaggaagctgagtcgagctcagggggagatcgacttcggcgtcgtcgttgacaagaggcggaggctctcgccagaggaggacggcagcgccggttgcagcaattctggggtagcagatggagacaacaatcatgtggtgcctgctcagagagggcggagcagcgaggaggagacacccaggaaaggtgccagttcgagcaccactccgtcctgccaggttgacggctgccatgccgatctcagcggtgccagggactaccataagaggcacaaggtgtgtgaagcacataccaggacgactgtggtctgcatcaagaatgtagagcatcggttctgtcagcagtgtagcaggtttcagcttcttcaagaatttgatgaagggaagaagagctgccgctcgcgtctagcacaacataatggaaggagaaggaaagttcaaccacaaactgttgtgaatgggaattccatgagtgaaaatcaatctctaagtaacacctcaatccttctgttaaaacaactttccaggctagagtgtacagacatagtcattctaaatgtgtgcttgtatgggtggcagctggtagctcctctgagccaatcaatcatcctaattctttggttaaccttttgaagaaccttgctgctattgctagcacacagtcatatcaagatattctaaagaatgcaaattcaaattcaatattgtcaaatgctggtaataatgctgcaaatggatctactgtgcatgagcaaactatacggtcaattccaatcagaggagaatcattagcagaagagcctccagtgaaaaggcgggtacatgattttgatttgaatgatgcttgctttgaagaagttgagagccgaacagataaaattgtgttcaagctgtttggaaaagagccaaaagattttcctgtagatctacgggaacagatccaacactggttatcgcattatccaactgatatggaaagctatattaggcctggttgtgttattctaactatttacctccgcctccctaattggatgtgggatgagcttgatgatgatccagcttcgtggatagaaaagcttattagcatatccaatgatggactttggagaaaaggatggttgtatgctagggtacaggactgcctaacactgagttacaatggtagtcttatgtttgcatctccctggcaactggtaattggcgacaagcatcagagactgtgtgtaactcctattgcagttgcttgttcttcgtctgtaaaattctctgtgaaaggtttcaatatagttcagccaactacaaaattactttgtgtgtttggtgacaaatatttaattcaagaagagacacaaatgctacttgaagattcaactgtgcagcaaggccctcaatgcctgaccttctcatgttccttttcttgtacaagtggaagaggattcatagaggttgaagattatgatcaaagcagcctttgtgttccctttgttgtcgctgacaaagatgagccatgtgcgagctacatctgagcagccacagtattgtccagaccgtttccctgttgaaagatttagatggctgctatcctttgcagttgatcaggaatggtgtgctgttttaaggaagcttctgaacaccatgttccagggtgatattgacctagatgttccgtcaccaattgaattcgccttaggagaaaatgtgttgcttactgctgttaaaaaacgctcaaagcctttagttgagtttctattaagatacacagcaacagattacgccccagtgggcagtggagccggcgctccagttcagttcttgttcactcctgcgatgactggactgtcaaatattacacctctccatattgcagcaacaatcagtgatgctactggtgttttggatgctttaactgatgatcctcggcagttgggaatcaaagcgtggaagaacgctcgtgacgccactggcttcactcctgaggaatatgctcgaaagagaggccacatatcctatatccaattggtacaggacaaaattgacagaagggtgagcagagctcatgtctcggttaccatccccagcacaattgatactgccggaaagcatgctagccgattgaagcctgccgaccaaatcacatttggtgtggagaaaaaacagcgagggatgaaccaaacattgagctgcagacaatgtgtccagcaggtccagcagcttgcattccactcccggacaaataggttcttgtctaataggccggcgatgctttccttggtcgccattgctgccgtttgtgtctgcgtaggattgatcatgaagagcctgccacaagttggtggtatgaggcctttcctctgggacaagatacgttggggccccaattgatagactgcacaagacccaacccaattgtatcagtgtatgatgaagatgtttgcgccgagcgaagctagattcttgtaatgtacatgtttcttagactaaatgcctaaattgaaatttctgttccatagtaaaacctgtgaaatgctctaatttgcctagcttgtagctccattgcatttgcatcctgactgaggtaaagcttttacttgtttttattgagaggaaaaaaaactcagtcttagcttgaaaaaatactcgaagtctcaccctttatcactggcgggccgttactatctactctgcaacgatcacaaggtatagtgagaagatttttttaatcagaaatttgtcctcgaggaatcgaacccgagacctagagaaagaaacccttttacttctgcattttgtttattgttattgcttttttttggtc

SEQ ID NO: 210303 - DNA, 3402 bp, Zea Mays
ggcagagagctctgcctccccaggatacttcgcccctcgttccaccgcgagcccttccgcgttccgcctctgttccgccgctcgggacccgggagacgagaagtagtagccccatccccaactggtcctaacccacggtacccaatccttgactcggttctctccatgagcttactgccccatctccatttcttcaatcattactcgcctttccgttcaagggcgttgcttgcctggataaccacggcatcgttctacccgccgggcccgagctaagtcatacgtgcaaacaaagagcagcaaaagaagaacaagtggggcgacagggacagggaggaggggaaggcagaggaaatggaagcctctttcttgaggaaagatggcggtgatcaagccagtgcggcgacaatgtccggcgagcacaggaacaagggccttgactgggatttgaacgactggaggtgggacgccaacctgttcctggccacgccggcggccatcgtgccgtccgagtgcagcagcaggaagctgagtcgagctcagggggagatcgacttcggcgtcgtcgttgacaagaggcggaggctctcgccagaggaggacggcagcgccggttgcagcaattctggggtagcagatggagacaacaatcatgtggtgcctgctcagagagggcggagcagcgaggaggagacacccaggaaaggtgccagttcgagcaccactccgtcctgccaggttgacggctgccatgccgatctcagcggtgccagggactaccataagaggcacaaggtgtgtgaagcacataccaggacgactgtggtctgcatcaagaatgtagagcatcggttctgtcagcagtgtagcaggtttcagcttcttcaagaatttgatgaagggaagaagagctgccgctcgcgtctagcacaacataatggaaggagaaggaaagttcaaccacaaactgttgtgaatgggaattccatgagtgaaaatcaatctctaagtaacacctcaatccttctgttaaaacaactttccaggctagagtctggtagctcctctgagccaatcaatcatcctaattctttggttaaccttttgaagaaccttgctgctattgctagcacacagtcatatcaagatattctaaagaatgcaaattcaaattcaatattgtcaaatgctggtaataatgctgcaaatggatctactgtgcatgagcaaactatacggtcaattccaatcagaggagaatcattagcagaagagcctccagtgaaaaggcgggtacatgattttgatttgaatgatgcttgctttgaagaagttgagagccgaacagataaaattgtgttcaagctgtttggaaaagagccaaaagattttcctgtagatctacgggaacagatccaacactggttatcgcattatccaactgatatggaaagctatattaggcctggttgtgttattctaactatttacctccgcctccctaattggatgtgggatgagcttgatgatgatccagcttcgtggatagaaaagcttattagcatatccaatgatggactttggagaaaaggatggttgtatgctagggtagtcttatgtttgcatctccctggcaactggtaattggcgacaagcatcagagactgtgtgtaactcctattgcagttgcttgttcttcgtctgtaaaattctctgtgaaaggtttcaatatagttcagccaactacaaaattactttgtgtgtttggtgacaaatatttaattcaagaagagacacaaatgctacttgaagattcaactgtgcagcaaggccctcaatgcctgaccttctcatgttccttttcttgtacaagtggaagaggattcatagaggttgaagattatgatcaaagcagcctttgtgttccctttgttgtcgctgacaaagatgtatgttctgaaattcggatgttggagcatggattgaatttaatttcatttgatgaaacctcggaaagaatagatgatctgatggcttatcgcaatcggtcgttacattttttgcatgaaatcggatggctccttcaaaggagccatgtgcgagctacatctgagcagccacagtattgtccagaccgtttccctgttgaaagatttagatggctgctatcctttgcagttgatcaggaatggtgtgctgttttaaggaagcttctgaacaccatgttccagggtgatattgacctagatgttccgtcaccaattgaattcgccttaggagaaaatgtgttgcttactgctgttaaaaaacgctcaaagcctttagttgagtttctattaagatacacagcaacagattacgccccagtgggcagtggagccggcgctccagttcagttcttgttcactcctgcgatgactggactgtcaaatattacacctctccatattgcagcaacaatcagtgatgctactggtgttttggatgctttaactgatgatcctcggcagttgggaatcaaagcgtggaagaacgctcgtgacgccactggcttcactcctgaggaatatgctcgaaagagaggccacatatcctatatccaattggtacaggacaaaattgacagaagggtgagcagagctcatgtctcggttaccatccccagcacaattgatactgccggaaagcatgctagccgattgaagcctgccgaccaaatcacatttggtgtggagaaaaaacagcgagggatgaaccaaacattgagctgcagacaatgtgtccagcaggtccagcagcttgcattccactcccggacaaataggttcttgtctaataggccggcgatgctttccttggtcgccattgctgccgtttgtgtctgcgtaggattgatcatgaagagcctgccacaagttggtggtatgaggcctttcctctgggacaagatacgttggggccccaattgatagactgcacaagacccaacccaattgtatcagtgtatgatgaagatgtttgcgccgagcgaagctagattcttgtaatgtacatgtttcttagactaaatgcctaaattgaaatttctgttccatagtaaaacctgtgaaatgctctaatttgcctagcttgtagctccattgcatttgcatcctgactgaggtaaagcttttacttgtttttattgagaggaaaaaaaactcagtcttagcttgaaaaaatactcgaagtctcaccctttatcactggcgggccgttactatctactctgcaacgatcacaaggtatagtgagaagatttttttaatcagaaatttgtcctcgaggaatcgaacccgagacctagagaaagaaacccttttacttctgcattttgtttattgttattgcttttttttggtc

SEQ ID NO: 210304 - DNA, 3365 bp, Zea Mays
ggcagagagctctgcctccccaggatacttcgcccctcgttccaccgcgagcccttccgcgttccgcctctgttccgccgctcgggacccgggagacgagaagtagtagccccatccccaactggtcctaacccacggtacccaatccttgactcggttctctccatgagcttactgccccatctccatttcttcaatcattactcgcctttccgttcaagggcgttgcttgcctggataaccacggcatcgttctacccgccgggcccgagctaagtcatacgtgcaaacaaagagcagcaaaagaagaacaagtggggcgacagggacagggaggaggggaaggcagaggaaatggaagcctctttcttgaggaaagatggcggtgatcaagccagtgcggcgacaatgtccggcgagcacaggaacaagggccttgactgggatttgaacgactggaggtgggacgccaacctgttcctggccacgccggcggccatcgtgccgtccgagtgcagcagcaggaagctgagtcgagctcagggggagatcgacttcggcgtcgtcgttgacaagaggcggaggctctcgccagaggaggacggcagcgccggttgcagcaattctggggtagcagatggagacaacaatcatgtggtgcctgctcagagagggcggagcagcgaggaggagacacccaggaaaggtgccagttcgagcaccactccgtcctgccaggttgacggctgccatgccgatctcagcggtgccagggactaccataagaggcacaaggtgtgtgaagcacataccaggacgactgtggtctgcatcaagaatgtagagcatcggttctgtcagcagtgtagcaggtttcagcttcttcaagaatttgatgaagggaagaagagctgccgctcgcgtctagcacaacataatggaaggagaaggaaagttcaaccacaaactgttgtgaatgggaattccatgagtgaaaatcaatctctaagtaacacctcaatccttctgttaaaacaactttccaggctagagtctggtagctcctctgagccaatcaatcatcctaattctttggttaaccttttgaagaaccttgctgctattgctagcacacagtcatatcaagatattctaaagaatgcaaattcaaattcaatattgtcaaatgctggtaataatgctgcaaatggatctactgtgcatgagcaaactatacggtcaattccaatcagaggagaatcattagcagagccgaacagataaaattgtgttcaagctgtttggaaaagagccaaaagattttcctgtagatctacgggaacagatccaacactggttatcgcattatccaactgatatggaaagctatattaggcctggttgtgttattctaactatttacctccgcctccctaattggatgtgggatgagcttgatgatgatccagcttcgtggatagaaaagcttattagcatatccaatgatggactttggagaaaaggatggttgtatgctagggtacaggactgcctaacactgagttacaatggtagtcttatgtttgcatctccctggcaactggtaattggcgacaagcatcagagactgtgtgtaactcctattgcagttgcttgttcttcgtctgtaaaattctctgtgaaaggtttcaatatagttcagccaactacaaaattactttgtgtgtttggtgacaaatatttaattcaagaagagacacaaatgctacttgaagattcaactgtgcagcaaggccctcaatgcctgaccttctcatgttccttttcttgtacaagtggaagaggattcatagaggttgaagattatgatcaaagcagcctttgtgttccctttgttgtcgctgacaaagatgtatgttctgaaattcggatgttggagcatggattgaatttaatttcatttgatgaaacctcggaaagaatagatgatctgatggcttatcgcaatcggtcgttacattttttgcatgaaatcggatggctccttcaaaggagccatgtgcgagctacatctgagcagccacagtattgtccagaccgtttccctgttgaaagatttagatggctgctatcctttgcagttgatcaggaatggtgtgctgttttaaggaagcttctgaacaccatgttccagggtgatattgacctagatgttccgtcaccaattgaattcgccttaggagaaaatgtgttgcttactgctgttaaaaaacgctcaaagcctttagttgagtttctattaagatacacagcaacagattacgccccagtgggcagtggagccggcgctccagttcagttcttgttcactcctgcgatgactggactgtcaaatattacacctctccatattgcagcaacaatcagtgatgctactggtgttttggatgctttaactgatgatcctcggcagttgggaatcaaagcgtggaagaacgctcgtgacgccactggcttcactcctgaggaatatgctcgaaagagaggccacatatcctatatccaattggtacaggacaaaattgacagaagggtgagcagagctcatgtctcggttaccatccccagcacaattgatactgccggaaagcatgctagccgattgaagcctgccgaccaaatcacatttggtgtggagaaaaaacagcgagggatgaaccaaacattgagctgcagacaatgtgtccagcaggtccagcagcttgcattccactcccggacaaataggttcttgtctaataggccggcgatgctttccttggtcgccattgctgccgtttgtgtctgcgtaggattgatcatgaagagcctgccacaagttggtggtatgaggcctttcctctgggacaagatacgttggggccccaattgatagactgcacaagacccaacccaattgtatcagtgtatgatgaagatgtttgcgccgagcgaagctagattcttgtaatgtacatgtttcttagactaaatgcctaaattgaaatttctgttccatagtaaaacctgtgaaatgctctaatttgcctagcttgtagctccattgcatttgcatcctgactgaggtaaagcttttacttgtttttattgagaggaaaaaaaactcagtcttagcttgaaaaaatactcgaagtctcaccctttatcactggcgggccgttactatctactctgcaacgatcacaaggtatagtgagaagatttttttaatcagaaatttgtcctcgaggaatcgaacccgagacctagagaaagaaacccttttacttctgcattttgtttattgttattgcttttttttggtc

SEQ ID NO: 210305 - DNA, 881 bp, Zea Mays
atgagagtcggtggtgtgcggtgcggccgaagctgggcccttccaccacggcttccgtgccgccaggtgggagccaccgaccggccgcagctcatcttcccgaccccgccgcttccacgcctcgccggccagcgaccgcggaagaaactgaggctgccggagatgcagcagctggtgcggtcactcgccgtggacaacgagaggctccgcgaggagatgcgggatctacagggagcttgcgaggcgctgtccaaggaaaacgacgagcttgagacaaggttaggccaatcgagccgtcagagcgaggtcgcttcgaaggagcagagaggaaagggtctgcttgatccgcggcagcccgcacgggacagcttcgcgctacctgatctcaacctcccaccacaggactctgccgatgtctcaacagtttcattgatcgctccagatcgtttgcagctttgttaatcgaacaacaagtgtacagagaggaagcagggtagcagtctatgcatccgttcttttttatttgtcgcagtttagtttaaaaataaactagcggacggcaaattttcgagaactgtagtatttgataagttgttactagatcacagagttttatttcgactatagtcgtaagtgataagccacatctgtagctaaagggagctctaattttaactcacccgacattaattgttttcagatccagctgatcgccacactgtagtgtagtgggtttagatggattttattcatgttatttcgctcgattaggcgaagaaatgttacatgtgaagatctgaaattatgagaaataaaaccgttatttctgaatggttttattttatggggtcttttgttacttcaactgcaactacatcgag

SEQ ID NO: 210306 - DNA, 760 bp, Zea Mays
gacaaagccaacaaaaaatctacctcattaggctgccggagatgcagcagctggtgcggtcactcgccgtggacaacgagaggctccgcgaggagatgcgggatctacagggagcttgcgaggcgctgtccaaggaaaacgacgagcttgagacaaggttaggccaatcgagccgtcagagcgaggtcgcttcgaaggagcagagaggaaagggtctgcttgatccgcggcagcccgcacgggacagcttcgcgctacctgatctcaacctcccaccacaggactctgccgatgtctcaacagtttcattgatcgctccagatcgtttgcagctttgttaatcgaacaacaagtgtacagagaggaagcagggtagcagtctatgcatccgttcttttttatttgtcgcagtttagtttaaaaataaactagcggacggcaaattttcgagaactgtagtatttgataagttgttactagatcacagagttttatttcgactatagtcgtaagtgataagccacatctgtagctaaagggagctctaattttaactcacccgacattaattgttttcagatccagctgatcgccacactgtagtgtagtgggtttagatggattttattcatgttatttcgctcgattaggcgaagaaatgttacatgtgaagatctgaaattatgagaaataaaaccgttatttctgaatggttttattttatggggtcttttgttacttcaactgcaactacatcgag

SEQ ID NO: 210307 - DNA, 635 bp, Zea Mays
tttttttagtatcctttaagcatgagtacaaggttaggccaatcgagccgtcagagcgaggtcgcttcgaaggagcagagaggaaagggtctgcttgatccgcggcagcccgcacgggacagcttcgcgctacctgatctcaacctcccaccacaggactctgccgatgtctcaacagtttcattgatcgctccagatcgtttgcagctttgttaatcgaacaacaagtgtacagagaggaagcagggtagcagtctatgcatccgttcttttttatttgtcgcagtttagtttaaaaataaactagcggacggcaaattttcgagaactgtagtatttgataagttgttactagatcacagagttttatttcgactatagtcgtaagtgataagccacatctgtagctaaagggagctctaattttaactcacccgacattaattgttttcagatccagctgatcgccacactgtagtgtagtgggtttagatggattttattcatgttatttcgctcgattaggcgaagaaatgttacatgtgaagatctgaaattatgagaaataaaaccgttatttctgaatggttttattttatggggtcttttgttacttcaactgcaactacatcgag

SEQ ID NO: 210308 - DNA, 730 bp, Zea Mays
ccctcctcacggtaacccttcctgttcaaggagactcggcagaatcagacgccgccggagtcttctaggcttcctcgccccttccacatcgccggcggcatcatccttgcgccgcccggccagatcacagccggtccgccgcttgcctggtaagacgatctgttgcccgctgggaccaagcagatgtctttaatggtttccctacaacagttaggcggcggcggtagtgttttccattgacgcccccgttccgattgatgaaccaaacaccacctacaccgatgatgatatcgtatcgtcgcaatcggcttgctttgaagggaacccattcaagacagttccaggcccatttaagctcttctggcaatgcatgcgctcaaaacctggggaggaaccaaccgagccctatacctacctgcagctagatcctccgagaagggtggaagtgaatctggagcaaacaggaagtgaaccttgaacgagcatgccatctcgtgccgatttgtcttcacctttggagcaaactagctgcatcaactaataaactaggcatagggagatgctcgttcaccatcttgttcaaggtgaatctggaataaactaacagaagcatcaactaattggctgcataagaaaaaaaatataaaccttcagtggctttttcattatcatcttgcatcaactaataaactagctgcatcaactaataaacgagcatgcctagtttacc

SEQ ID NO: 210309 - DNA, 582 bp, Zea Mays
gtcgctacgtgagcctggaagagagggtggaggaagtgggggaggatgagcgaggagaggccggtgccgcggcgggagagcccgtggggtctgcctgagggcgacacgcggcagcccaaggctcaccgctgtaacgaccgcgccgaggacgtcgtccaggcttgctttgaagggaacccattcaagacagttccaggcccatttaagctcttctggcaatgcatgcgctcaaaacctggggaggaaccaaccgagccctatacctacctgcagctagatcctccgagaagggtggaagtgaatctggagcaaacaggaagtgaaccttgaacgagcatgccatctcgtgccgatttgtcttcacctttggagcaaactagctgcatcaactaataaactaggcatagggagatgctcgttcaccatcttgttcaaggtgaatctggaataaactaacagaagcatcaactaattggctgcataagaaaaaaaatataaaccttcagtggctttttcattatcatcttgcatcaactaataaactagctgcatcaactaataaacgagcatgcctagtttacc

SEQ ID NO: 210310 - DNA, 1585 bp, Zea Mays
gaattcccgtgccggtggggccgtcggcgacgccatgtgtcgccgcgctatcgcctgggtcacacaagtgtgcggggtgggtggccgccacacgctcgctgcgcctgcgtgcgtgtgctcgcctcccaccctccccgcactagctctgcactttccctggcagtcgtcccttgttcctgacttcctgcctgagcgcatccggccaccttctatccgcccgccagtccccgccggcctccgcggatcatctgcctgggatcaagatccgtcgaggccgaggcacccgcgcgccaaagatcgtttcttgatctaaatttgggtggtcgtagggatcaaagctcggttctctgcggtgcagttgagagggcaccaatattcttggcatggtggctgacacggaaagctcagattcactgcctggcagttcaaatgctgcttctgagatgcctgctaatgggtctattcaccgaaagtctcaggaaaagccccccaaaaaaacacataaagctgaacgagagaagcttaaacgtgatcagttgaatgacctttttgttgagctcggcagtatgctagatcttgatcgacaaaacactggaaaggctacagtgctaggtgatgctgcgcgagtactgcgagatctaatcactcaagtggaatctctcaggcaggaacaatctgctcttgtatcggagcgccaatatttccgagaagaatgagctgcaagaggagaacagttcgctcaagtcccaaatatcggaactacaaaccgagctctgcgcaaggatgaggagcagcagcctgagccaaaccagcatcgggatgtcggatccggcaactcaccagcagatgcagatgtggagcagcattccccacttaagctccgtggccatggcggcgcgcccagcaagtgcagcgtccccgttgcacggccaggagggctactctgctgacgccggtcaagcgggctacgcgccgcagccgcaacctcgggagctgcagctctttccggggtcatcggcatcgtcttcaccggagcgtgaacgttcttcccggctcggaagcggccaggccacgccgccgagcctgacagattccttgccgggtcagctctgcctgagcctcctacagccatctcaggaagcaagcggcggcggcggcggcggcgtcatgtcgcgcagcagagaggaacggcgggacgggtagccaactgacagacaacgcacttgaatcggggtgtgtggcggcggcgattgtcctgtaaataccaagaattccgtccctttactggctcgttcatccagaactaatgctggtagctgccctgtgttgagcggcagctctgcttgttctagaagcttctgagaacatgtgtgggctatgttttccatgagattgtaagatgtgaggtggagccgctagaacacttagcgtgcgttttactgacagtgtggagtgctgctccttagttggaatagaaaaatgcaatttgatggctgtgctgctgtcttgatctgttatcttcctgctcctggtgaaagttacccagcacatgtaatcatgccgtctttcaaacaatgagaagagc

SEQ ID NO: 210311 - DNA, 1388 bp, Zea Mays
gccacacgctcgctgcgcctgcgtgcgtgtgctcgcctcccaccctccccgcactagctctgcactttccctggcagtcgtcccttgttcctgacttcctgcctgagcgcatccggccaccttctatccgcccgccagtccccgccggcctccgcggatcatctgcctgggatcaagatccgtcgaggccgaggcacccgcgcgccaaagatcgtttcttgatctaaatttgggtggtcgtagggatcaaagctcggttctctgcggtgcagttgagagggcaccaatattcttggcatggtggctgacacggaaagctcagattcactgcctggcagttcaaatgctgcttctgagatgcctgctaatggatcttgatcgacaaaacactggaaaggctacagtgctaggtgatgctgcgcgagtactgcgagatctaatcactcaagtggaatctctcaggcaggaacaatctgctcttgtatcggagcgccaatatgtcagttccgagaagaatgagctgcaagaggagaacagttcgctcaagtcccaaatatcggaactacaaaccgagctctgcgcaaggatgaggagcagcagcctgagccaaaccagcatcgggatgtcggatccggcaactcaccagcagatgcagatgtggagcagcattccccacttaagctccgtggccatggcggcgcgcccagcaagtgcagcgtccccgttgcacggccaggagggctactctgctgacgccggtcaagcgggctacgcgccgcagccgcaacctcgggagctgcagctctttccggggtcatcggcatcgtcttcaccggagcgtgaacgttcttcccggctcggaagcggccaggccacgccgccgagcctgacagattccttgccgggtcagctctgcctgagcctcctacagccatctcaggaagcaagcggcggcggcggcggcggcgtcatgtcgcgcagcagagaggaacggcgggacgggtagccaactgacagacaacgcacttgaatcggggtgtgtggcggcggcgattgtcctgtaaataccaagaattccgtccctttactggctcgttcatccagaactaatgctggtagctgccctgtgttgagcggcagctctgcttgttctagaagcttctgagaacatgtgtgggctatgttttccatgagattgtaagatgtgaggtggagccgctagaacacttagcgtgcgttttactgacagtgtggagtgctgctccttagttggaatagaaaaatgcaatttgatggctgtgctgctgtcttgatctgttatcttcctgctcctggtgaaagttacccagcacatgtaatcatgccgtctttcaaacaatgagaagagc

SEQ ID NO: 210312 - DNA, 593 bp, Zea Mays
atcaaacatatggtgcttcttgttcatatttctttttccagcgaggttaaaagtttagctcgttgtggtattgtgatttgtgagcaattgatgcttccatggtacagcatcctaaggaactccatatttttatgtggactgtatttgtgttctaaattgtgataccttgcggctcagattagttgccctttgttgctacacatgtttttaactcttttgattcttaaatattcaattttgtgatgcagcaccaatattcttggcatggtggctgacacggaaagctcagattcactgcctggcagttcaaatgctgcttctgagatgcctgctaatgggtctattcaccgaaagtctcaggaaaagccccccaaaaaaacacataaagctgaacgagagaagcttaaacgtgatcagttgaatgacctttttgttgagctcggcagtatgctaggatcgctgcctggcagatcgtgaaccatttcttctgattacgtctatggttgttgccatgaaaagaactgctaatctctctacaaaattcttcaaaattaatgtatggttaagctattaatactacgctgtactttgaa

SEQ ID NO: 210313 - DNA, 3862 bp, Zea Mays
cggcacaccgcacacgctggtcctaattctgaccgttgcaactccaaaatccaaatctgccgcccggtttcatagccacctccaacgtctccttcgccggcgctcatcccccctacacatccccctccccgttcttctccaaggcttcaaactcgcagagattcgcagtctgcactacgtctccttgacctcagcagcggccacacagccacgcgcaccgagagaagagagattccccacggcatggcggcggcggacggggacgccttgatcgcggcgtttgcggtgtccaagggcggcatcgtgctcaagcacattttcctcaacgcaccaccgccggaggcgatgtgcgggtccggcggaagagaagtggagagtgatgaggaggacccgccggtgatggtgggtcggcaccccgactgccacgtgctcgtcgaccaccccagcgtcagccgcttccacctcgagctacggtgccgacgtcgacagagtctcatcaccgtcaccgacctccactccgtgcacgggacatgggtttcggggcgacggatcccacccaacacgccagtggatctcgctaccggtgacacgctgcggctcggggcctctaagagggagtataagctgctctggctgtcgcttcgtgaggcatttgagatggacgatctgatgtatatgccatcgctgcctgaggaggacaaagaggagccatatgttaaggaaccaagcagcaagttattgcctgggcacagggattcagtgaacatggagacccatcaggatacaagtgaacaaattgtgtctgaagacattgcatttccagccaaagtggccccctcagcacctccattgtctgagttccttcaacctttttttgtggaagagcattcactttcccaatttcatgagaaaagaaacggagtgacagaggaaaagttggtcgacaagaatcaaatttcagaatcttttggttcgttgatcatacaggaaatgccaggcacactgacaaatgctggaaaatcaatccagtcaggcgagcaggaggatgcctcaaacaaagtgtccaagaggtccaagttgaagtcagtcaaatcacttcgtgttgacacaggcaggagcagcgagagaagcagcactctgagccatagctttcagaagggagaccaaaatgatattgttgtatgttctcagagctgtgggacagaatgtgcggtatgtatagctttatttggtatttctgaaattgaaaaggctgaagaaaaggaagagttgattgctgaagataacgttgacatgaatcccccggccagcatgatcatggagggaaatatgaacgagagaaaacctgataattatatcccacaagatccaattggtgcaaagctgcagaagaaactaggcttattagattctgctctccctttgcatttcaaagatgatgtgttcgccgacaaggaaattccacaatggaatgttgctagtgttcatacagaatctgagcttctttcagaatatcttataataccagaagtgaagcacgatgacttgaaccatcttaacttggaggaaggtctctcaaaaagcgagaatataaacccaaataagattactgagggccctgggaactgtcagctcgaagggaccattcgtgggaatctatttgacaatttggatactgatggaattgaagaaggtgaagagatctgcccactggacaaggatgaaatcacccccaatggatcaggtaacataataatggagaggagcaatatagttttaaagcctaccatttcccaacagttgatggattctatttcccctctcaatttagatcatggcgacttttctgaaaatgagaactccatgctgaacactggagatcagatgaaattaaatgaacctgtctctgagaatcttaacccattaattccaactgatgaaaaatatctgaagagccaaacggaggagtgtatgcccatttcatatctggaattcaaagatgatatccttctggatagggaaaactcagtgctggctccgagaaagtacgaggctatgtcccctgtgaggcaggaaaatctgttctcagacaaagagaacgtgactcctgcctctaaggtgaagaccgttgttaggggagttcttggtacaaggatggataattcagtgtcagcagcaaatgcttcaaataagaataaagttcttgggtcaagggtcgataattcagtgtcaacagagaatagctcaaataagaagcaatgtgaattatcatcgaagtccaaaaaagtccacacagtagattttgatgttttctattcggataaggagaacttgactcctatatcttcaggaggcatgaaagcaaggaagtgttttcccaaggacctctcagtcgacttagaccaagatcaggaagcattctgctcagacaaggagaacttgacaccactatcttctgcagctcggaaaacaagggacatgtctggaaaccttacacgagttgaaagtgcggtcacaaagaaaagggttgttggtaggctccccttccagactcttgtgtcaaattctcctttgagacctgctagctcgcatgattgtacctgtgctgttgctagaccagctggcgttgctgctggtgacttggcgatcaagttagaagataaattgaacgatctctcagtaatggccacgaatcaggtagtgctggagaaggcatgaaaacctggaccatggtggctaatacagacagtcttcttgatgacgagtctaggaaggctattatgctgctaaaaggcttaaaaggaactcgcctgttcataccaaggattgtgatcagggagttggattccatgaagcagcgggagggcctgttcagacggtcaacgaaggcgacctccatcctgcaatggatcgaggagtgcatggcaagggagagctggtggatccacgtccagagctcggccgacatgttcccggtagcaccaaccccgcccgcgaccccttcagcgcagcgcatcgacgaggagatcgagatcagctccggctccttcaacccgatgatggcgttgttcggccctcgaagctccgccgcgctcgcggatatgatatctcccagacccgaggaccgcgtcctcgactgcgccctcctcgtcagtagggtccggagcaacgagaaggtcgtggtgctgtcaaacagcgtcacgctcaagatcaaagccatggcagagggcctgccatgcgagggagccaaggagttccgcgagtccctcgtggacccgtcctccaggcggttcatgtgggcggccagcgccccacgggggtcggcctggtcctgcctggacgcgtccgcgctggcggagaactactacaacagccgccaccacgctatgaagcggagggttctggtggcggcgaggccctccgagtccgaggccgccaagggcctgaagctgatcctgcgtcacaattccctgtacgcgcaggccacggacgccgtcaacaagacgccgctggtatcgctggccgcggtgtgagatcccccgccctcggttcttgttttggcgtgttgttgtcatgatttccatgccgagcgaaactgtgggccgtgtgcagactttgaacaggacaccgtcagtggtttcgttttgggccatcatgagtttttgagtttgtgcctttattagctagcgcagcgaccgactagtgggtgagcaggaagctcccgagggcaggcagtgtctttgactctgtcttgtggacgtattctacacacatctctcgactgagatacgaatgttttttttcttcaaatatgtagctggcgacgagcagaagaaagattagtgcgtgcacaaagttgatt

SEQ ID NO: 210314 - DNA, 3695 bp, Zea Mays
ccaacgtctccttcgccggcgctcatcccccctacacatccccctccccgttcttctccaaggcttcaaactcgcagagattcgcagtctgcactacgtctccttgacctcagcagcggccacacagccacgcgcaccgagagaagagagattccccacggcatggcggcggcggacggggacgccttgatcgcggcgtttgcggtgtccaagggcggcatcgtgctcaagcacattttcctcaacgcaccaccgccggaggcgatgtgcgggtccggcggaagagaagtggagagtgatgaggaggacccgccggtgatggtgggtcggcaccccgactgccacgtgctcgtcgaccaccccagcgtcagccgcttccacctcgagctacggtgccgacgtcgacagagtctcatcaccgtcaccgacctccactccgtgcacgggacatgggtttcggggcgacggatcccacccaacacgccagtggatctcgctaccggtgacacgctgcggctcggggcctctaagagggagtataagctgctctggctgtcgcttcgtgaggcatttgagatggacgatctgatgtatatgccatcgctgcctgaggaggacaaagaggagccatatgttaaggaaccaagcagcaagttattgcctgggcacagggattcagtgaacatggagacccatcaggatacaagtgaacaaattgtgtctgaagacattgcatttccagccaaagtggccccctcagcacctccattgtctgagttccttcaacctttttttgtggaagagcattcactttcccaatttcatgagaaaagaaacggagtgacagaggaaaagttggtcgacaagaatcaaatttcagaatcttttggttcgttgatcatacaggaaatgccaggcacactgacaaatgctggaaaatcaatccagtcaggcgagcaggaggatgcctcaaacaaagtgtccaagaggtccaagttgaagtcagtcaaatcacttcgtgttgacacaggcaggagcagcgagagaagcagcactctgagccatagctttcagaagggagaccaaaatgatattgttgtatgttctcagagctgtgggacagaatgtgcggtatgtatagctttatttggtatttctgaaattgaaaaggctgaagaaaaggaagagttgattgctgaagataacgttgacatgaatcccccggccagcatgatcatggagggaaatatgaacgagagaaaacctgataattatatcccacaagatccaattggtgcaaagctgcagaagaaactaggcttattagattctgctctccctttgcatttcaaagatgatgtgttcgccgacaaggaaattccacaatggaatgttgctagtgttcatacagaatctgagcttctttcagaatatcttataataccagaagtgaagcacgatgacttgaaccatcttaacttggaggaaggtctctcaaaaagcgagaatataaacccaaataagattactgagggccctgggaactgtcagctcgaagggaccattcgtgggaatctatttgacaatttggatactgatggaattgaagaaggtgaagagatctgcccactggacaaggatgaaatcacccccaatggatcagatcatggcgacttttctgaaaatgagaactccatgctgaacactggagatcagatgaaattaaatgaacctgtctctgagaatcttaacccattaattccaactgatgaaaaatatctgaagagccaaacggaggagtgtatgcccatttcatatctggaattcaaagatgatatccttctggatagggaaaactcagtgctggctccgagaaagtacgaggctatgtcccctgtgaggcaggaaaatctgttctcagacaaagagaacgtgactcctgcctctaaggtgaagaccgttgttaggggagttcttggtacaaggatggataattcagtgtcagcagcaaatgcttcaaataagaataaagttcttgggtcaagggtcgataattcagtgtcaacagagaatagctcaaataagaagcaatgtgaattatcatcgaagtccaaaaaagtccacacagtagattttgatgttttctattcggataaggagaacttgactcctatatcttcaggaggcatgaaagcaaggaagtgttttcccaaggacctctcagtcgacttagaccaagatcaggaagcattctgctcagacaaggagaacttgacaccactatcttctgcagctcggaaaacaagggacatgtctggaaaccttacacgagttgaaagtgcggtcacaaagaaaagggttgttggtaggctccccttccagactcttgtgtcaaattctcctttgagacctgctagctcgcatgattgtacctgtgctgttgctagaccagctggcgttgctgctggtgacttggcgatcaagttagaagataaattgaacgatctctcatgtaatggccacgaatcaggtagtgctggagaaggcatgaaaacctggaccatggtggctaatacagacagtcttcttgatgacgagtctaggaaggctattatgctgctaaaaggcttaaaaggaactcgcctgttcataccaaggattgtgatcagggagttggattccatgaagcagcgggagggcctgttcagacggtcaacgaaggcgacctccatcctgcaatggatcgaggagtgcatggcaagggagagctggtggatccacgtccagagctcggccgacatgttcccggtagcaccaaccccgcccgcgaccccttcagcgcagcgcatcgacgaggagatcgagatcagctccggctccttcaacccgatgatggcgttgttcggccctcgaagctccgccgcgctcgcggatatgatatctcccagacccgaggaccgcgtcctcgactgcgccctcctcgtcagtagggtccggagcaacgagaaggtcgtggtgctgtcaaacagcgtcacgctcaagatcaaagccatggcagagggcctgccatgcgagggagccaaggagttccgcgagtccctcgtggacccgtcctccaggcggttcatgtgggcggccagcgccccacgggggtcggcctggtcctgcctggacgcgtccgcgctggcggagaactactacaacagccgccaccacgctatgaagcggagggttctggtggcggcgaggccctccgagtccgaggccgccaagggcctgaagctgatcctgcgtcacaattccctgtacgcgcaggccacggacgccgtcaacaagacgccgctggtatcgctggccgcggtgtgagatcccccgccctcggttcttgttttggcgtgttgttgtcatgatttccatgccgagcgaaactgtgggccgtgtgcagactttgaacaggacaccgtcagtggtttcgttttgggccatcatgagtttttgagtttgtgcctttattagctagcgcagcgaccgactagtgggtgagcaggaagctcccgagggcaggcagtgtctttgactctgtcttgtggacgtattctacacacatctctcgactgagatacgaatgttttttttcttcaaatatgtagctggcgacgagcagaagaaagattagtgcgtgcacaaagttgatt

SEQ ID NO: 210315 - DNA, 1477 bp, Zea Mays
cgcatataaagaattgtgtcgacgtgtctaatatgttcacaattgatgattattgaagatagatgttgcgatttgagttcttcaatcatacattatataaactattttttgccaatttaaaactatcactatgtgttatattggactattgtgtgattagacattgccatcgtattatgaactataaaattggactattgtagtatttagaagcatgtaattaattcaaagactatccgacaagtatcagatatctgtatgtatccgtctgaataatatctgatatatgttttctacccgtcccctttctctctctctttttggtgacatcttgttgggttcaactttagcctaccccaacttgcttgggactaaaaggctatgttgttgatccgttttctacccgtccgaataattccgatcttgtgctatatctgacccgcacttttactacccgaacctgatcccgaatccaagtgaaaataattagggtaggatacgagatgacctactatccgcccgtcccgttttcagagttcaactgaaagctagtggcctaactttgagaattaaactgaggctatttgctggatacaacaaagctataagagtgtttgatgttcatcggcctggcagagactttgatcagtattctttactcaaggggggtgaaggaccaactggtataatatcttcaatttccttctctccacaaaatgggatgcttgctgttggttcatacagccagacaactgctgtgtatgcagagaataatatggagcctttgtatgtcttacatggccagcttggtggtgttacacaggtgcttttttcgaaagatgggaactatctgtatactggagggcgcaaggatccgtacatattatgttgggatattcgcaatactgtggacattgtttacaagttgtacagatcagctgatactactaatcaaagaatacattttgatattgagccctgcggtagacatctagccactggtgggcaggatggcatggtccatgtatatgaccttcaaggtggtcaatgggtaaccggctaccaagcagcagctgatactgtaaacgggttctcgttccatccataccttccatttgctgtaacatcatccgggcacagaagatttggcatgcaagatgagtttgaagacgagttaaacttggcaggtgatgagaacagctgctctgtctggatgttttcttcctcacaagaagcttgaagcatttagtgaaaatattggatcaggctgaagctaagcgaagcattggatgcacattcaaatctattgtcactttgatgttcgtgtgcagagagcatcgcggcattgaccacttcctgttgtgttggctgtaattggtgtctgcaaaatgcaaatgtattcactgagatctatagaattaatgacttatttttttgacgaaaaacaaatctagcaatagaacatttaaaaaacaaa

SEQ ID NO: 210316 - DNA, 1200 bp, Zea Mays
gtgatttgagttcttgggagggctcgcttatcaggaagcaagtcaaaagctgttaaggagcttgatgccgctacttccaaagaagatgggacagtagcatccactcttgatcgctccaagcgttggcttctttctcactctcaacatctcaacttcttctctatcttgatacttgcttcggttccgaacccactctttgatctcgctggaattatgtgtggccaatttggtgtacctttctgggagttcttttttgcaactttgattgggaaggccatcatcaagactcatattcagacgctgtttatcgtgtccttatgcaacaaccagctcctgtatcttatggaaaaggagctaatctggatattcggtcacattcctgggttttctgctaccctaccatctgtgattgccaaactccatgctgccaaggacaagtatctatcaccaccgacaccagtctcggcgtcctcacagatggaggagaaaagttggaatctctcttttacattggtttggaactctatagtgtggcttgtgcttctgaacttctccgttaagataatcacgtcgacggcacaggattatctcaaaaagcagcaggatatggagatggaacgcgtttctgattctccgcccccggaacaaaactaactagcggcgcaagtttatttcagctgctagctgcacagattctcctctgcatttttagcaactggttaagcgtctgcagacgattccaagttccaacgattatcaattagtattagtagctattcatctacacagtcaacgaaaacatgggcctggcaactggccgggtgatggctgtgacctcctatcatatcattgagcctgtagtgggcagttcctggaggagaattctactgttcttttttgtttttccggacatctacacggatagacagtagggattgtttgtgtgaagcacggttggcttatgccgagatttagcactggtagatgtttctatttgttttggaaatgctatagaaacatgtgagcattcaacaatgatacgctctgttaagtttgttgtgtattttggtttgcaactggtgcccgaaagagcaaacagtggctccatcaatttcctttggcaagtaaaaccccctatagaagacattgcttgtcctaaatcttgtccgctgaagcatgtagggataagctgtatttgag

SEQ ID NO: 210317 - DNA, 2078 bp, Zea Mays
cttcacaacggacgagaggcgtcagacaaaaaatagaatctggttgctcatctcatctcacgactcataaaaaaatagcgtcttttatcatatccgttgctcgcaaaacgcccccacacgccgccggcgaatcggcgactccccttgcgacgggaggaagcagccacgccgccgtctcggcgactccctgacgactgcctctccggtctcgaacgcgatctggcccatggtggctctggcgccgttggttcgtgagatctagggttgtcgagcgccgcggagtgggagcggatggggcgccggaagatgtccgcagcggcgccgccgtcccggagctggtccaacgttggcgggagcgtaatccccgaacattacattttttcctgttagccatgttacaatacttgaaaagattagcaacatatatcctgagaaagagtggtttgttctttctcttaattgttttggtggtagcttccggaatcttactctctatttcagatggcctgcataagaagcatgtgcaggagttccttaattatgctaaattcgtgttgtggtggatttcattaggtgtggcttcatcaattggactaggttctgggttgcatacatttgtgctgtatctaggtcctcatattgctctgttcactattaaagctgttcaatgtggccgaattgatttgaaaacggctccatatgataccatacagctaaaggttgggccatcatggctcgacaagaaatgttctgaatttggtccgcctgtgtatccagcatcagctcattctgttaggatccccgtctttgatttactacctcagatacagctggaagcagttctttggggcattgggactgcacttggcgagcttcccccttattttatatcacgagcagctcgcttatcaggaagcaagtcaaaagctgttaaggagcttgatgccgctacttccaaagaagatgggacagtagcatccactcttgatcgctccaagcgttggcttctttctcactctcaacatctcaacttcttctctatcttgatacttgcttcggttccgaacccactctttgatctcgctggaattatgtgtggccaatttggtgtacctttctgggagttcttttttgcaactttgattgggaaggccatcatcaagactcatattcagacgctgtttatcgtgtccttatgcaacaaccagctcctgtatcttatggaaaaggagctaatctggatattcggtcacattcctgggttttctgctaccctaccatctgtgattgccaaactccatgctgccaaggacaagtatctatcaccaccgacaccagtctcggcgtcctcacagatggaggagaaaagttggaatctctcttttacattggtttggaactctatagtgtggcttgtgcttctgaacttctccgttaagataatcacgtcgacggcacaggattatctcaaaaagcagcaggatatggagatggaacgcgtttctgattctccgcccccggaacaaaactaactagcggcgcaagtttatttcagctgctagctgcacagattctcctctgcatttttagcaactggttaagcgtctgcagacgattccaagttccaacgattatcaattagtattagtagctattcatctacacagtcaacgaaaacatgggcctggcaactggccgggtgatggctgtgacctcctatcatatcattgagcctgtagtgggcagttcctggaggagaattctactgttcttttttgtttttccggacatctacacggatagacagtagggattgtttgtgtgaagcacggttggcttatgccgagatttagcactggtagatgtttctatttgttttggaaatgctatagaaacatgtgagcattcaacaatgatacgctctgttaagtttgttgtgtattttggtttgcaactggtgcccgaaagagcaaacagtggctccatcaatttcctttggcaagtaaaaccccctatagaagacattgcttgtcctaaatcttgtccgctgaagcatgtagggataagctgtatttgag

SEQ ID NO: 210318 - DNA, 1165 bp, Zea Mays
ctcttccctctctgctctcccccaaaaattatcgaatatctgaggaaggatgggaagctacttaatcattgtggaatgacaccacagaagctccctgaccttgttgaacataatccacttatagctgtcgatgttctttcaaagctaatcaactctccggacgtggatgcatactttgatgctattgtccatatggatatgagcttgcattcaatggaagtagtaaacaggctcactactgcagtagttttaccaccaggatttgttcacgactatatctcaaactgcattcgatcatgtgaagacattaaggacaagtatatgcaaaatagactagtgagactagtatgtgtctttctacagagcctcattcggaacaagataatagatgtgcaagatctcttcatcgaggtgcaagcattttgcatcgccttctcgcgaataagggaggcagtggggttgttcaggctcctgaaatctgtagaatgaagagcgctctgcgatctgttggctgctggattctataaatagaaacttccattgtgtacattcatggctctgcttttgtttttccagcgtccaagagttgaaaagatgtggtggccttggtccagggttgggtgtaaatggtatggatattttccgatgatattcgatatcaaatccaattaggcctagtttgttttcgcctgaacagcccgttctgggcctctttctgggtggaaccaatcagcctggtttggtttagtctgatatagtttgctggagctgttcgtttgtcttgggccacaaagccgcctgtttttaactcctctgcctcaaatccttagcccaaaatgaacccaggtgagcaaccattcggattgattcctgtgctggaagttggctgccgaccaggaatgagtgacagcttatgatccactcaatcctgggctggtttggttcctggcttgcttcaatcctggcctgccaaacaggacgagttctctagagtttggatattcaacttatctgaatactcaaattgctatcgtatatttatgatatcgatatccagttgtatcctatccgatatagttgacactatccaaatttgaacatgattcgaatggcaaacaaatataaacaatatttgatccgtttgcatcactactttgggtccttg

SEQ ID NO: 210319 - DNA, 1447 bp, Zea Mays
tcttcctttacccccacagcttgcgtggtctgtggtctcatctcactcacactcactctctctctcggcgacgtctacgccgagtgcccaggcattcttcaggcgcaggtcgctgccgccctacgccaggtgccccggtcttctttcgtcccttcgccggcgacgaccaccgccaggacagtatagcggatggcttcgtcggtgcgggcgccatcggggtcggtgatcgccgtggcatcgtcctcttcctcagcagccttggccggggtgtgcggcacgggctcgccgtgcgccgcgtgcaagttcctgcgtcgcaagtgccagccggactgcgtgttcgcgccctacttcccaccggacaacccgcagaagttcgtgcgcgtgcaccgcgtcttcggcgcgagcaacgtgaccaagctgatgaacgaaatccacccgttgcagcgcgaggacgccatgaactcgctcgcctacgaggccgacatgcgaattcgcgaccccgtctacggctgcgtgggcgtcatctccatcctccagcacaacctacggcagctccagcaggacctcgcccgcgccaagtacgagctctccaagtaccaggcggcagcggcggcagcatccgcgtcgacggcgccgaccgggccgcaggcgatggcagagttcatcggcagcgcgatgccgaacggcgccgcgcacaacttcatcaaccttggacactcggcggcgctcggctccctcggaggctccaccgccatgttcgggcagcaggagcagttcggcagcaacgcgcagatgctgtccaggagctacgacggcggcgagcccatcgcgaggatagggatgaacaacggcggctacgagttcggttactcgagcgcgacgacgatgggcgggtctgcaggcgctgtctctggcggcctcgggacgctcggcatcagcagcccgccgttcttgaagtctggaaccgccggcggcgacgagaagcccagcggcggttactgacgcgatgaagaaacggggaggaaaaaaatatccatgaaacgcgtgcaaggacttatcctagacgtccgccgttgtcaggagggggctaatttccagacgattttacatggaaaaagtgcgtcgcttgcgtgcgtgcgtgcttgcttttgttgctagattcattgcttgtttgttaattaccacgctatctaccctccccatccacatcatccacgagatcgtcagatattccatgccagcgtccacagagtggcctatgttcttgttattagttgctgtactgcgaagggagggggacaaaatgcatgcttgtccggcccggacctttttttttaccccactcggaagactagcgcccatttgtactccatgtattattgctaggttggctgtaatatatgaagttgaccttttgagaagaggtgcagttgcttatgaagacccc

SEQ ID NO: 210320 - DNA, 795 bp, Zea Mays
gcacccaatgatgaggacaaagataagcagaaagatttgtcagttcccggtgctgggttcaacttgcatgggatcatatcttcttgttgtgaaccatatatgattgtatacattgaacttgaggagaaagctttagtggatcaattagaaaaacttgtccagctcatccttctattctacctggaagaaagatgggaaatcgaggaccttgcccttggtcttgcatctcaaacagttcttggtgctgcaactatggtgagccagacaggcaaacatccagggcaactaaaaggtcagaaggattggagagaaaagcgggatgagttcaagaaaaaggtgtccattgtcgagttgaatcatattcttaatgaagtgaatactcacatccttccttcccacaatgatctcaccccaataactacaatagctggtggaagtgttgccaacacaatccgtgggctcttagctggttttggaatatcaactggaatgagttttagtggtgtagatctcacaagtttaagggccaaaaaagggcacaccgctcagactgactctagttcatacaatgttggtgatgaagaatattgtggttatgactatatccttgtagggcagctttcagaagttagaatcagcaacttcgtaactcaccagctattattccttacacctctttcagcttgtttctataagacatatgcaattctaaactgggtggtcccgctggcaaggcagggtagatatgatgaaattgcagactcaaaactgagcgacaagcgacaagttctctga

SEQ ID NO: 210321 - DNA, 444 bp, Zea Mays
cagatgcacagcagcacgagaccagcccgaggtatcatccctgagcactgatttaagatgtatctccagtactacatcaacgagaagggggacaaggtctacaccaccaagaaggagtcacctcttggggtgccaacgcagtctgctcacccagctcggttctcaccagatgacaagtactctcgccagcgatacctgttgaagaagagatttggacttctgccaacgcagaatccaggaccgaagtactgaagcttcaagtcaactgtccaacctgcgatgttctttttgtgtcaatgcttgttggttggaatgtactatcttcgttctcgaatatttgtggtccacttgttcaattttgaactaaaccgcgacaaataaaaaagaccactcatttgtccatttggcgtttacttagtgtaaataagttcggctgcacggtca

SEQ ID NO: 210322 - DNA, 451 bp, Zea Mays
gcaccagcaatccccaaatcagaaatgaactcgcgctggtatcatccctgagcactgatttaagatgtatctccagtactacatcaacgagaagggggacaaggtctacaccaccaagaaggagtcacctcttggggtgccaacgcagtctgctcacccagctcggttctcaccagatgacaagtactctcgccagcgatacctgttgaagaagagatttggacttctgccaacgcagaatccaggaccgaagtactgaagcttcaagtcaactgtccaacctgcgatgttctttttgtgtcaatgcttgttggttggaatgtactatcttcgttctcgaatatttgtggtccacttgttcaattttgaactaaaccgcgacaaataaaaaagaccactcatttgtccatttggcgtttacttagtgtaaataagttcggctgcacggtca

SEQ ID NO: 210323 - DNA, 487 bp, Zea Mays
gtagctgattcatccccagttggatcaatcttcggacaagctcgactacgagaggatatgatggccggccggcggcctcgcagggcaccgtagcgccgccgccgaattcatgcttcatttcgcatcaggagtcggccaagcaggacacacctcttgttgttgacttgttgtaggtatatacgtacatgccagtattgccagaacagtcgacagaggcaatctgagacctcagctgctggaataatcaggaagtagatcgagagcgacgtacgatgacgagattcataattgctgctgcacatcacttctttatgttatttaaactcacatttcataattaatactaataatatattgtctccgttcttgaatatttgtctcgtcgatagtttattttcgaataaaaaacgacaaaataaaaaaatgatagtgtaccgattatgaagcagccacaaacaaaggtttataatatacctttccagcattt

SEQ ID NO: 210324 - DNA, 728 bp, Zea Mays
caagtaaatgcactcgaacgcttcaaagatgatgatgatatgctttggagatctcctggcactcctgttttcactgccccggagtgctgtcaaggttcagcctaccatggtagagcatctgatacatgggcagttggtgtaactttatattgtatggtctctgggcactatccatttctgggggatacattgcaggaaacttatgataagattgccaatgatcctgtggaattacctggcgacgtgaatccccaacttgccgatttgctcctaaggcttctctgcaaagatccaggagatcgcatcacactgcgtgctgcggctgagcatccttgggtcgctggggatgaggggccagtccctgaattcatctgtagatgtgggtttggccgcaggaagaggaatgatgtccgggaagaagttcaataacaaagcatcctcggatggtctaataggtctagcgtagataattgatgatcggcaaagcgaagccctgacgatgagttcgttgttccgtgttccctgtttctaatacgcgctcgactgaacatatttctttttgctacagaatatatactgcgtaaccctatgccagtaaggcaacgtttgtcacagtttcacgttgtcaaacgcagcttaacgggtgatgtttttttttatgatccgagaggaatggataagtgaattttttttttgaaaaaaggtgtatctttacggatggtctacgg

SEQ ID NO: 210325 - DNA, 829 bp, Zea Mays
tggcttctgcatcagacaccaccaagcaccaaaatgttattcatggtgatatcaagccagacaatctcttggttaccagtaccggcaacgtgaagatcggggatttcagtgttagccaggtttttgaggatgatgatgatatgctttggagatctcctggcactcctgttttcactgccccggagtgctgtcaaggttcagcctaccatggtagagcatctgatacatgggcagttggtgtaactttatattgtatggtctctgggcactatccatttctgggggatacattgcaggaaacttatgataagattgccaatgatcctgtggaattacctggcgacgtgaatccccaacttgccgatttgctcctaaggcttctctgcaaagatccaggagatcgcatcacactgcgtgctgcggctgagcatccttgggtcgctggggatgaggggccagtccctgaattcatctgtagatgtgggtttggccgcaggaagaggaatgatgtccgggaagaagttcaataacaaagcatcctcggatggtctaataggtctagcgtagataattgatgatcggcaaagcgaagccctgacgatgagttcgttgttccgtgttccctgtttctaatacgcgctcgactgaacatatttctttttgctacagaatatatactgcgtaaccctatgccagtaaggcaacgtttgtcacagtttcacgttgtcaaacgcagcttaacgggtgatgtttttttttatgatccgagaggaatggataagtgaattttttttttgaaaaaaggtgtatctttacggatggtctacgg

SEQ ID NO: 210326 - DNA, 1673 bp, Zea Mays
ctgagattgagtgacatttttggtttctgcatgtatgctattattgtagtttcatatcatcttcagtgacgatatggcagccaggaaagtagcagaaaaagttgcggctttttttattccggtgttttttttaaccttgtcccttgtttttatcatttaggtttctggcacctactcattctgaatggcggaccttacagacatcggttgctgctgttgctttagctttttaaggaagcccagtgtacctgtatgtgaacatcaggatgctgatggcatgttaactgaagatttactgaagcgtcaatcagctgaagatcatgatggaagtttctacactggagatgatcctggggatgatcttgatagaagcttctacaatggagatgatcatgatagaagcttctacgatagagatgattctgactatcttgacggaagtgatgatggaccatcaaggaagagttctgaagatattatacagatgaaaatggtaataagatggtcaaccaatatgtccacttgggaaagatcggttctggaagctacggaaaagtggttctgtacagaaacattaaagatgggaagctgtatgcagtaaaggttctgaataagccatacatgatgaaagtacatgttgtacatacaaaaactgccatgacagatgttcttcgagaggtatccataatgaaaatgttgaaccaccccaacattgtaaatctcgttgaagtgattgatgacccaaacatggataaattttacatggttcttgagtatgttgaaggaaaaatggtttgtgataatggtttagaagaagctactgcaagattttttttgcgagacataatatctggtcttttgtatcttcactcccataatgttattcatggtgatatcaagccagacaatctcttggttaccagtaccggcaacgtgaagatcggggatttcagtgttagccaggtttttgaggatgatgatgatatgctttggagatctcctggcactcctgttttcactgccccggagtgctgtcaaggttcagcctaccatggtagagcatctgatacatgggcagttggtgtaactttatattgtatggtctctgggcactatccatttctgggggatacattgcaggaaacttatgataagattgccaatgatcctgtggaattacctggcgacgtgaatccccaacttgccgatttgctcctaaggcttctctgcaaagatccaggagatcgcatcacactgcgtgctgcggctgagcatccttgggtcgctggggatgaggggccagtccctgaattcatctgtagatgtgggtttggccgcaggaagaggaatgatgtccgggaagaagttcaataacaaagcatcctcggatggtctaataggtctagcgtagataattgatgatcggcaaagcgaagccctgacgatgagttcgttgttccgtgttccctgtttctaatacgcgctcgactgaacatatttctttttgctacagaatatatactgcgtaaccctatgccagtaaggcaacgtttgtcacagtttcacgttgtcaaacgcagcttaacgggtgatgtttttttttatgatccgagaggaatggataagtgaattttttttttgaaaaaaggtgtatctttacggatggtctacgg

SEQ ID NO: 210327 - DNA, 1962 bp, Zea Mays
gacgaaccggcgtgcgcgggcaggcaggcaggcaggcggttggcctggattcaaaagggactctacttttggcccatttccaaccaccatctgcctaggcgtctgtctgtctgtctgacgccgcgcccaccaccgtcccgcaaaaggcgcgccgcgccgcgccgcgccgtcccgtccgtcttcgtccccagtccccaccaacctgtccggatgggccactcggcgtcgcggcccactgcctgcgccggcgccggcgaggcgctgccctcgcgcttcgcgcggttccgccgccgcctgcgcaaccgcctgcgccgcggcgccggcgacgactcggtctcctccaaggccctcgccgccgacgagttcgccggcatcgcacgcgtccggatagccaaggcggatatgcagttcaaggacaagttcttcgcgtgcctctctctcggcgaccgcacgtaccgcaccgagacgtccgacaacacgcacaggcctgtgtgggactcggagaagaaggttatagtggagacgaatggacctcatattgcacgtatctctgtttttgagacgaaccgattttcgaagaacactttggttggttactgcgaggttaatctctttgaaatgcttactaaggacttggaggaacactctgaggaccttcgtctgttggacccatcgtcacccaatactaccgtgggcagcatatccatctcctgtcacattgaagaccctgttgaaacagaacaaagctttgcccgccgtgtcttagctatagtggactatgatgaagatggaactctttccttatcagaattctcagacttgatgaaagcttttggtaataaattagcagttgcaaagattgaagagcttttccgtcaagcagatacaaatagtgatggcatagttgacatagatgaactggcagccctactggctgctcaacaagaagaagaaccacttataagtaactgccctgtctgtggtgaagatcttggaaaatatgataacataaatgatatgatacatatgacactttgcttcgatgagggaactggtaatcagattatgactggtggatttctaactgacaaacaggcatccttatggggtggatgttcaagctcagtgaatgggcacatttctccacgtatgatgttggtttgcactctggctctacagcttcacatattctggttttcgaccggcgaacaaagaggatagtcgaagaagttattgacggaaaaattgtattgtccatgagggctttataccaatcaaaagtaggactcactcttatcaatacaggtgttaaagacctcttgaagaacctatctgagaagcaaggaaaaaagatgaactcgctggaatctgcaaaagatattcccaagttccttgagttatttaaggatcaaattaatatggatgagatcaaggaccctgttgaaagttttaagacttttaacgagtttttcataagaggactgaagcctggtgctagaccaattgcacatggtgatcaaaacagtattgctacctgtgctgctgatagccgattaatggctttcagttccgttgatgagagcacaaggctttggatcaagggccgtaaattttcaattgagggtctcctaggtaccagtgcacactcgaatgctttaagcaacggatcgttggtcattttccggctcgcacctcaggattaccacaggtttcacgtaccagtctcaggaactgtggagaaatttgtggaaattcccgggtgcctgtacacggtgaatcccatcgctgtgaatagcaagtattgcaatgtattcactgagaataaaagagttgtatcaatgatatcaacttcagagtttggaaaggtagcatttgttgcgattggagcaaccatggtaggaagcatcacgttcttgaaaaaagagggtgactacgtccgcaaaggagatgagttgggtattt

SEQ ID NO: 210328 - DNA, 2126 bp, Zea Mays
ctccgctgctacgcgcatgttccttagcaccgagtctcgctccccgcttcgacgcggccagccgaggcggaatccgcggatatgcagttcaaggacaagttcttcgcgtgcctctctctcggcgaccgcacgtaccgcaccgagacgtccgacaacacgcacaggcctgtgtgggactcggagaagaaggttatagtggagacgaatggacctcatattgcacgtatctctgtttttgagacgaaccgattttcgaagaacactttggttggttactgcgaggttaatctctttgaaatgcttactaaggacttggaggaacactctgaggaccttcgtctgttggacccatcgtcacccaatactaccgtgggcagcatatccatctcctgtcacattgaagaccctgttgaaacagaacaaagctttgcccgccgtgtcttagctatagtggactatgatgaagatggaactctttccttatcagaattctcagacttgatgaaagcttttggtaataaattagcagttgcaaagattgaagagcttttccgtcaagcagatacaaatagtgatggcatagttgacatagatgaactggcagccctactggctgctcaacaagaagaagaaccacttataagtaactgccctgtctgtggtgaagatcttggaaaatatgataacataaatgatatgatacatatgacactttgcttcgatgagggaactggtaatcagattatgactggtggatttctaactgacaaacaggcatccttatggggtggatgttcaagctcagtgaatgggcacatttctccacgtatgatgttggtttgcactctggctctacagcttcacatattctggttttcgaccggcgaacaaagaggatagtcgaagaagttattgacggaaaaattgtattgtccatgagggctttataccaatcaaaagtaggactcactcttatcaatacaggtgttaaagacctcttgaagaacctatctgagaagcaaggaaaaaagatgaactcgctggaatctgcaaaagatattcccaagttccttgagttatttaaggatcaaattaatatggatgagatcaaggaccctgttgaaagttttaagacttttaacgagtttttcataagaggactgaagcctggtgctagaccaattgcacatggtgatcaaaacagtattgctacctgtgctgctgatagccgattaatggctttcagttccgttgatgagagcacaaggctttggatcaagggccgtaaattttcaattgagggtctcctaggtaccagtgcacactcgaatgctttaagcaacggatcgttggtcattttccggctcgcacctcaggattaccacaggtttcacgtaccagtctcaggaactgtggagaaatttgtggaaattcccgggtgcctgtacacggtgaatcccatcgctgtgaatagcaagtattgcaatgtattcactgagaataaaagagttgtatcaatgatatcaacttcagagtttggaaaggtagcatttgttgcgattggagcaaccatggtaggaagcatcacgttcttgaaaaaagagggtgactacgtccgcaaaggagatgagtttgggtatttctcctttggagggagtacagtgatatgcgtcttcgagaaggacgccatccaatttgacgctgatctcgtggcaaacagcgaaaggtcactggagacccttgtttctgttggtatgaccctgggcatctcgacaaggaacaaggagatgcaagtcccggatctgcagaaagtttcgctcggatgacagacagagctgtaaactgtgtgcaggttaacagtagcgtatatttgatactagcaactgccactggtaggcaatactattatcacataatccaagactacatgtatagtcaggctagaggagtctggtttacggcggtgggcgtgggcatgggcattggcccagctgtcatcggctgagagctcactgcatggctcggtggtttttgcaatgacgatactaaccgtgcagttgctcccatacgccattatccgaacacgacacaactaacaccaagacaccagaacatcgaggatagcg

SEQ ID NO: 210329 - DNA, 1995 bp, Zea Mays
ccatatcgtgaatcgcctttgcctcacgcacaggcctgtgtgggactcggagaagaaggttatagtggagacgaatggacctcatattgcacgtatctctgtttttgagacgaaccgattttcgaagaacactttggttggttactgcgaggttaatctctttgaaatgcttactaaggacttggaggaacactctgaggaccttcgtctgttggacccatcgtcacccaatactaccgtgggcagcatatccatctcctgtcacattgaagaccctgttgaaacagaacaaagctttgcccgccgtgtcttagctatagtggactatgatgaagatggaactctttccttatcagaattctcagacttgatgaaagcttttggtaataaattagcagttgcaaagattgaagagcttttccgtcaagcagatacaaatagtgatggcatagttgacatagatgaactggcagccctactggctgctcaacaagaagaagaaccacttataagtaactgccctgtctgtggtgaagatcttggaaaatatgataacataaatgatatgatacatatgacactttgcttcgatgagggaactggtaatcagattatgactggtggatttctaactgacaaacaggcatccttatggggtggatgttcaagctcagtgaatgggcacatttctccacgtatgatgttggtttgcactctggctctacagcttcacatattctggttttcgaccggcgaacaaagaggatagtcgaagaagttattgacggaaaaattgtattgtccatgagggctttataccaatcaaaagtaggactcactcttatcaatacaggtgttaaagacctcttgaagaacctatctgagaagcaaggaaaaaagatgaactcgctggaatctgcaaaagatattcccaagttccttgagttatttaaggatcaaattaatatggatgagatcaaggaccctgttgaaagttttaagacttttaacgagtttttcataagaggactgaagcctggtgctagaccaattgcacatggtgatcaaaacagtattgctacctgtgctgctgatagccgattaatggctttcagttccgttgatgagagcacaaggctttggatcaagggccgtaaattttcaattgagggtctcctaggtaccagtgcacactcgaatgctttaagcaacggatcgttggtcattttccggctcgcacctcaggattaccacaggtttcacgtaccagtctcaggaactgtggagaaatttgtggaaattcccgggtgcctgtacacggtgaatcccatcgctgtgaatagcaagtattgcaatgtattcactgagaataaaagagttgtatcaatgatatcaacttcagagtttggaaaggtagcatttgttgcgattggagcaaccatggtaggaagcatcacgttcttgaaaaaagagggtgactacgtccgcaaaggagatgagtttgggtatttctcctttggagggagtacagtgatatgcgtcttcgagaaggacgccatccaatttgacgctgatctcgtggcaaacagcgaaaggtcactggagacccttgtttctgttggtatgaccctgggcatctcgacaaggaacaaggagatgcaagtcccggatctgcagaaagtttcgctcggatgacagacagagctgtaaactgtgtgcaggttaacagtagcgtatatttgatactagcaactgccactggtaggcaatactattatcacataatccaagactacatgtatagtcaggctagaggagtctggtttacggcggtgggcgtgggcatgggcattggcccagctgtcatcggctgagagctcactgcatggctcggtggtttttgcaatgacgatactaaccgtgcagttgctcccatacgccattatccgaacacgacacaactaacaccaagacaccagaacatcgaggatagcg

SEQ ID NO: 210330 - DNA, 1169 bp, Zea Mays
ttttgcttctgtagctgtagtctgtaggtgttaaagacctcttgaagaacctatctgagaagcaaggaaaaaagatgaactcgctggaatctgcaaaagatattcccaagttccttgagttatttaaggatcaaattaatatggatgagatcaaggaccctgttgaaagttttaagacttttaacgagtttttcataagaggactgaagcctggtgctagaccaattgcacatggtgatcaaaacagtattgctacctgtgctgctgatagccgattaatggctttcagttccgttgatgagagcacaaggctttggatcaagggccgtaaattttcaattgagggtctcctaggtaccagtgcacactcgaatgctttaagcaacggatcgttggtcattttccggctcgcacctcaggattaccacaggtttcacgtaccagtctcaggaactgtggagaaatttgtggaaattcccgggtgcctgtacacggtgaatcccatcgctgtgaatagcaagtattgcaatgtattcactgagaataaaagagttgtatcaatgatatcaacttcagagtttggaaaggtagcatttgttgcgattggagcaaccatggtaggaagcatcacgttcttgaaaaaagagggtgactacgtccgcaaaggagatgagtttgggtatttctcctttggagggagtacagtgatatgcgtcttcgagaaggacgccatccaatttgacgctgatctcgtggcaaacagcgaaaggtcactggagacccttgtttctgttggtatgaccctgggcatctcgacaaggaacaaggagatgcaagtcccggatctgcagaaagtttcgctcggatgacagacagagctgtaaactgtgtgcaggttaacagtagcgtatatttgatactagcaactgccactggtaggcaatactattatcacataatccaagactacatgtatagtcaggctagaggagtctggtttacggcggtgggcgtgggcatgggcattggcccagctgtcatcggctgagagctcactgcatggctcggtggtttttgcaatgacgatactaaccgtgcagttgctcccatacgccattatccgaacacgacacaactaacaccaagacaccagaacatcgaggatagcg

SEQ ID NO: 210331 - DNA, 697 bp, Zea Mays
ggcacgctttgatgtcactgtggtgaatcccatcgctgtgaatagcaagtattgcaatgtattcactgagaataaaagagttgtatcaatgatatcaacttcagagtttggaaaggtagcatttgttgcgattggagcaaccatggtaggaagcatcacgttcttgaaaaaagagggtgactacgtccgcaaaggagatgagtttgggtatttctcctttggagggagtacagtgatatgcgtcttcgagaaggacgccatccaatttgacgctgatctcgtggcaaacagcgaaaggtcactggagacccttgtttctgttggtatgaccctgggcatctcgacaaggaacaaggagatgcaagtcccggatctgcagaaagtttcgctcggatgacagacagagctgtaaactgtgtgcaggttaacagtagcgtatatttgatactagcaactgccactggtaggcaatactattatcacataatccaagactacatgtatagtcaggctagaggagtctggtttacggcggtgggcgtgggcatgggcattggcccagctgtcatcggctgagagctcactgcatggctcggtggtttttgcaatgacgatactaaccgtgcagttgctcccatacgccattatccgaacacgacacaactaacaccaagacaccagaacatcgaggatagcg

SEQ ID NO: 210332 - DNA, 4906 bp, Zea Mays
cttcctcttacggcccatccgctgggattggtaaagcccaagcaaagatggcccacgcgcggccacacccacgtcagcccatccgattcctcgccgccgccgccatgcttctcctttcctccgccatcttcaccaccgcacgcctcccactcgccgtctccgctcgcctcccaaaccctaccaacaccacccgcctcatcttcgccggcctacctgcctcctccccggtccgcgccttctgccccagggcgcgcccctccccctccacttgcgccgccttctcctccaccatggccgcctccgacaaccccctcctcgtcgccgacttcgacttcccgcccttcgaccgcgtcgagcccagccacgtccgccccggcatccacgaactgctaacacgactcgagggcgagcttgaagagctcgagaagggcatcgagcccacgtgggcgaagctggtcgagccgctagaacgcatcaccgacaggctcgaggtgatctggggcatggtcgatcacctcaagtccgtcaaggactccgctgatctccgcgccgccgtagaggaagtgcagcccgtaaaagtcagtttccaactaaggctaggacagagcaagcctatctatgaagctttcaaggccatcaggaactcttctaattgggacagtctcagcgatgctcgcaagcgtatagttgaagctcaaataaaggaagctgttctcagtggagttgcacttgaggatgaacaaaggaagaaatttaaccaaatcgaacaagagcttgaaaaactgacacaaaagtttagtgaaaatgtgctggatgccacaaagaaattcgagaagttaattactgataagaaagaaattgagggtttacctgctacagcccttggtttagcagcgcagactgctgtgtcaaagggccatgaaaatgctacagctgaaaatggaccttgggttatcacgttggatgcaccaagctatattcctgttatgcaacatgctcgaaacagagagctccgggaagaagtttatcgtgcttatctgacccgcgcctcaagcagtgaacttgataacaccaatatcatctgccaaattctaaagttaaggctagagaaggctaaacttcttggctacaagaactatgctgaggtaagcatggctcagaaaatggcaactgttgagcgagtagaagagcttctcgagaagctgcgtgctgcttcctgggatcatgctgtcaaagatatggaagatctgaaagtctttgcgaaagattctggttctcctgaagctaatgatttgactcactgggaccttaccttctggagtgaacgactgagagagtctaaatatgatatcaatgaggaagagctgcgcccttattttgcactacccaaggttatggatggcctcttcactctggcacataagctttttggagttactgttgaacctgcagatgggctggctccgatctggcacagtgatgtcaaattttattgtgtcaaagactcttccagtagccctgttgcttacttttacttcgatccttattcaagaccatctgaaaagcgtggaggggcttggatgaatgtagtcttttctcgaagtcgcgtgctagctcgcaatggtttggctgctaggctgcctgttgcccatatagtgtgcaatcagactccaccagttggcgagaagcccagtctcatgaccttccgtgaggttgaaactgtgttccatgaatttgggcacgcccttcagcacatgcttactaaacaagatgaaggctttgttgctggcattcgtggagttgaatgggatgctgtagagttaccctcccagttcatggagaactggtgctatcacaagaatactcttttgagcattgcaaaacattatgaaaccggtgaaactcttccagaggaaatttatgcgaagcttgtagctgcaaagaatttccgtgctggcaccttgagcctgcgtcagatacgatttgccagtgtagatatggagcttcatacaagttatgaccccaatggctcagtgtccatatatgatgtggaccaaagagttgcagaacggacacaagttcttgctcctctgccggaggacagattcctgtgcagctttagccatatttttgcaggtggctatgctgctggatactacagttacaagtgggctgaagtactgtcagctgatgcattctcagcttttgaagacgctggtttggatgatgagaaggcaatcgaggaaactggcagacgattcagagacactgttcttgcgcttggaggtggaaagtctccgcttgaggtgttcgtttcattccgaggacgggagccttcgcctgaaccacttcttagacaaaacggcttgcttcctgttgctgcctagtgccccaaagatttctctgttatttatgcttaaacagggaccattttcatccggtcaattatttgatgaagatagacatttcacccttgtttgtttaccctcctctagattattaaataagttagaagacaaacaaacaacatatattattaatgtatgtgttttttatatgtgtctagattcatcgtctgctatttgaatatagacataaaaatgaaatgaataccagttttttagaacggaatgataggtggtgcttatataatctataagcttgattgtaaacaaagagggcctaagctgaggtagtcatggtccaactgccggagctgcccgtggaggtctctactggctgacatgatctctggcatcaggggatgcgagcggtcgccggcaacaaactcgcagaccacgccgcccacctctagcatgctgcacccgggcaccttggccaccctcctctcctccatgtcccgccgcaccttgagcacctcctcccacttgccccacccggcgtacatgttggacagctgcacgtgcaccccgctgtggtccagccccagctccgccagccagcgtaccacctgctcgccggcctccacgtcgccgtgcgccgcgcaggcgttcagcaacgcgcccagcacgtacgagtcgggcctcatgggcatcgaacgcacggcctccaaggcgtccgccagctgtccggcgcggcccaggacgtccaccaggcacccgtagtgctccacgccgggctccatgccgtgcaccgcccccatgctgcggaacacctccttggcgcggccgacgaggcccgcgcggccgcaggcggtgagcacgcagatgaaggtcacctcgttggggcgcaccccttccaccagcatctgcccgaacaggtcgatcgcctccccgcagcggccgtggtccgagagccccgagatcatggccgtgtaggcgaacacgtcccgctgcccccgcggtgccgccgcgaacacctgcctcgccgtttccaggctcccgcacttggcgtacatgtccaccagcgccgtcgccactacgccgtccatcgccacgccgtggccgccgccgccgacgagcaaggcgtgcacccacctgccctggtccagcgccccgagcgccccgcaggcggtcagcaccccgaccaccgccgccctgttggggcggacgcacgacctgagcatgtcctcgaacagccgcacggcgtcgccgaagctgcccgcggccacgtaggcgctcagcatggcgctccaggcgacatcgttcctgcggggcattccgtcgaacagggcgcgcgcctcatccacgtgcccggccttggcgcaggccgtgaggagcgacgtccaagagcacacgtcggccgcgcgggaggcgacggcgcctccgaagaggcggcgggcggctggcaggacgccgtgggtggcgtaggcgtggatgaggccgttggcgacgtaggcgtgggcgtcccaggccaggacgacggcgagggcgtggagacagggcacgatggcgtgggagccgaatggggactccggttccagatacggtggcgctgacgagtctgcggcggctttaaggaggaaggagaaggtgtagttgttcggccggaagtcggggatgatgcggcggaggcgcgggaacaggcggagggcgccgagcgggtgcgctgggagcagcgagcggagtagctggttggggaggaagcggtcggcgaggaggagcgtggaggagcggagcaggtgcccgtccacctgccggagctgagcggcgctcagcgacggccggcacagcagctgcagcgccgccgccgtggctattgattgcataattgcagttgctgcccatctccaggcccactgggtatctcaggcacttgggctttgtatcggctgagattgcgagaagggcccggcacaacctggcccactcacaccaaccatccagcctggccttccaagacagaagaggcaagcaacagccgaggcagaggacagtttagttggtgctggtgctggtggaggaagaagcagcgcagcaggtggcagggatgggtcgcggcggcgggatggggaacccagtcaacgtgggcatcgcggtgcaggcggactgggagaaccgcgagttcatctccaacatctccctcaacgtccgacgcctcttcgacttcctcctcagattcgaagctacgacgaagagcaagctggcaagtttgaacgagaagctggacatcctagagcggaagctggaggtgcttgaagtccaagtgggcagcgcgacgaccaacccttccgtcttcaactaggaatcgcgggtttatatgtataaataaatagataaatgtaggtatgaatgttgcttgtaccaacgaattctggtcgctatcaatcatgtaatgtaatggattttgttattattattgtggtatgtgtaaagatgtgcagaattgaaaagataataatagtagaatggagattgggtgggggaagaaaagaaaaaaaggcaag

SEQ ID NO: 210333 - DNA, 4171 bp, Zea Mays
caagcaaagatggcccacgcgcggccacacccacgtcagcccatccgattcctcgccgccgccgccatgcttctcctttcctccgccatcttcaccaccgcacgcctcccactcgccgtctccgctcgcctcccaaaccctaccaacaccacccgcctcatcttcgccggcctacctgcctcctccccggtccgcgccttctgccccagggcgcgcccctccccctccacttgcgccgccttctcctccaccatggccgcctccgacaaccccctcctcgtcgccgacttcgacttcccgcccttcgaccgcgtcgagcccagccacgtccgccccggcatccacgaactgctaacacgactcgagggcgagcttgaagagctcgagaagggcatcgagcccacgtgggcgaagctggtcgagccgctagaacgcatcaccgacaggctcgaggtgatctggggcatggtcgatcacctcaagtccgtcaaggactccgctgatctccgcgccgccgtagaggaagtgcagcccgtaaaagtcagtttccaactaaggctaggacagagcaagcctatctatgaagctttcaaggccatcaggaactcttctaattgggacagtctcagcgatgctcgcaagcgtatagttgaagctcaaataaaggaagctgttctcagtggagttgcacttgaggatgaacaaaggaagaaatttaaccaaatcgaacaagagcttgaaaaactgacacaaaagtttagtgaaaatgtgctggatgccacaaagaaattcgagaagttaattactgataagaaagaaattgagggtttacctgctacagcccttggtttagcagcgcagactgctgtgtcaaagctgaaaatggaccttgggttatcacgttggatgcaccaagctatattcctgttatgcaacatgctcgaaacagagagctccgggaagaagtttatcgtgcttatctgacccgcgcctcaagcagtgaacttgataacaccaatatcatctgccaaattctaaagttaaggctagagaaggctaaacttcttggctacaagaactatgctgaggtaagcatggctcagaaaatggcaactgttgagcgagtagaagagcttctcgagaagctgcgtgctgcttcctgggatcatgctgtcaaagatatggaagatctgaaagtctttgcgaaagattctggttctcctgaagctaatgatttgactcactgggaccttaccttctggagtgaacgactgagagagtctaaatatgatatcaatgaggaagagctgcgcccttattttgcactacccaaggttatggatggcctcttcactctggcacataagctttttggagttactgttgaacctgcagatgggctggctccgatctggcacagtgatgtcaaattttattgtgtcaaagactcttccagtagccctgttgcttacttttacttcgatccttattcaagaccatctgaaaagcgtggaggggcttggatgaatgtagtcttttctcgaagtcgcgtgctagctcgcaatggtttggctgctaggctgcctgttgcccatatagtgtgcaatcagactccaccagttggcgagaagcccagtctcatgaccttccgtgaggttgaaactgtgttccatgaatttgggcacgcccttcagcacatgcttactaaacaagatgaaggctttgttgctggcattcgtggagttgaatgggatgctgtagagttaccctcccagttcatggagaactggtgctatcacaagaatactcttttgagcattgcaaaacattatgaaaccggtgaaactcttccagaggaaatttatgcgaagcttgtagctgcaaagaatttccgtgctggcaccttgagcctgcgtcagatacgatttgccagtgtagatatggagcttcatacaagttatgaccccaatggctcagtgtccatatatgatgtggaccaaagagttgcagaacggacacaagttcttgctcctctgccggaggacagattcctgtgcagctttagccatatttttgcaggtggctatgctgctggatactacagttacaagtgggctgaagtactgtcagctgatgcattctcagcttttgaagacgctggtttggatgatgagaaggcaatcgaggaaactggcagacgattcagagacactgttcttgcgcttggaggtggaaagtctccgcttgaggtgttcgtttcattccgaggacgggagccttcgcctgaaccacttcttagacaaaacggcttgcttcctgttgctgcctagtgccccaaagatttctctgttatttatgcttaaacagggaccattttcatccggtcaattatttgatgaagatagacatttcacccttgtttgtttaccctcctctagattattaaataagttagaagacaaacaaacaacatatattattaatgtatgtgttttttatatgtgtctagattcatcgtctgctatttgaatatagacataaaaatgaaatgaataccagttttttagaacggaatgataggtggtgcttatataatctataagcttgattgtaaacaaagagggcctaagctgaggtagtcatggtccaactgccggagctgcccgtggaggtctctactggctgacatgatctctggcatcaggggatgcgagcggtcgccggcaacaaactcgcagaccacgccgcccacctctagcatgctgcacccgggcaccttggccaccctcctctcctccatgtcccgccgcaccttgagcacctcctcccacttgccccacccggcgtacatgttggacagctgcacgtgcaccccgctgtggtccagccccagctccgccagccagcgtaccacctgctcgccggcctccacgtcgccgtgcgccgcgcaggcgttcagcaacgcgcccagcacgtacgagtcgggcctcatgggcatcgaacgcacggcctccaaggcgtccgccagctgtccggcgcggcccaggacgtccaccaggcacccgtagtgctccacgccgggctccatgccgtgcaccgcccccatgctgcggaacacctccttggcgcggccgacgaggcccgcgcggccgcaggcggtgagcacgcagatgaaggtcacctcgttggggcgcaccccttccaccagcatctgcccgaacaggtcgatcgcctccccgcagcggccgtggtccgagagccccgagatcatggccgtgtaggcgaacacgtcccgctgcccccgcggtgccgccgcgaacacctgcctcgccgtttccaggctcccgcacttggcgtacatgtccaccagcgccgtcgccactacgccgtccatcgccacgccgtggccgccgccgccgacgagcaaggcgtgcacccacctgccctggtccagcgccccgagcgccccgcaggcggtcagcaccccgaccaccgccgccctgttggggcggacgcacgacctgagcatgtcctcgaacagccgcacggcgtcgccgaagctgcccgcggccacgtaggcgctcagcatggcgctccaggcgacatcgttcctgcggggcattccgtcgaacagggcgcgcgcctcatccacgtgcccggccttggcgcaggccgtgaggagcgacgtccaagagcacacgtcggccgcgcgggaggcgacggcgcctccgaagaggcggcgggcggctggcaggacgccgtgggtggcgtaggcgtggatgaggccgttggcgacgtaggcgtgggcgtcccaggccaggacgacggcgagggcgtggagacagggcacgatggcgtgggagccgaatggggactccggttccagatacggtggcgctgacgagtctgcggcggctttaaggaggaaggagaaggtgtagttgttcggccggaagtcggggatgatgcggcggaggcgcgggaacaggcggagggcgccgagcgggtgcgctgggagcagcgagcggagtagctggttggggaggaagcggtcggcgaggaggagcgtggaggagcggagcaggtgcccgtccacctgccggagctgagcggcgctcagcgacggccggcacagcagctgcagcgccgccgccgtggctattgattgcat

SEQ ID NO: 210334 - DNA, 2413 bp, Zea Mays
caacagcaggggctcttttcacagactcctcaatctcttccgttccgtccttccccgaactcgctcaaaaccctagccaaacgccacagggtcgccgccggtcgcccggccgcatccgctgccgccgctgccgccggggacgatggcgaagcctcggcgtggccgctccgcgtctcgctccacctcgggatcttcctcccgctcgccgtcccactccgtctcctccggctccgtctcgtcccgctcccgctccttctcgtcgtcgtcgtcccagtcccggagtcgctcccctcctcctgctaagcgcagttcgcctggagcacggaaaggacgatcaccttcaccgccccctaaaaagggttcaccttcaaaaaaagttcgttcgccatcaccaccccctaaaaaggcttcaccccctaggatgctgtatatgggctaacggtacaaaggatcttcaaaattcttattatattggatgctgcagcttcccacattagaaagcgtcgcctcctgctgagtcggttgttctctgcattgatcatttatcaaggaatgttaacgaagctcatctgaaagagatatttgggaactttggtgaagtggtgaatgtggagctatcaatggaccgaatggttaaccttcctcgtggctatggatatattgaattcaagaagagagctgatgctgagaaggctctactttacatggatggtggtcaaattgatggaaatgttgttaagttgaggttcactcttcaaccacgccaaagggctgtatcacctatgaaagctccaccccctcctccaaaacgagatgttgctcagattgaaaaaggtcttagcagtgctgaaaaggatgcccagcagcgtcctagggaatcatctccacgaaggaagccagcttcaccaccgcggaaacgatctccaaatcgaagggctgaatcgcccaggcgtccacctgacccatcacctaggcgtcgtcctgattctccgcctattcgtcgccgaccagatccttctcctgtcaggcgtggtggcacacctcctcgcaggagaccactgtctccagttagaaggcgttctccttcaccacctaggaggcataggtcaccgatgcgtccttcacctaggaggggacgtggcagtccttcaccacgcaggcgctcccctgggcctcttaggcggcgctcgccacctccaaggcgtttgaggagcccaccaagaaggccaccacctccacgtcgctatagtcgatctcctcctcgccgaccccttcgctccagatcgatttctccaagaaggggacgagggcctctcttgaggcgtggtaggtcaggctcatcatattctcgatcacctactccaccgccaagaaaggggccaagaagggtatcaaggagtcgcagccctagaaggcctcccagaggaagaagcatctctagtgacagccgaagcagcagttctccttcccctagacgtggcaggtagaaggaacccgttgcattgtgtatccggcaggtaaagccttttatcccctgactcagatcaagtgttggtttgaggagaagataaaagaaccctacggcaatgcttccagtggatctgcttaacatgcctggtgggctcactggcttgtgatttgtacccgagacagaattatctgccatgtgacatctggctcatgtacttgattgtaccccaagtgttgaaaggtttcatctactttgttggaaggagtttttcaacattcccattgtattatgattccgttgatcaagcaatttgtgtatgcgcaggcgcacgcacagcgtacaccttttctaatctgaaaagagttgtcattttgccaaaccccgccctgcttgttgccctgtcccatcagtcattggtttactgacgcgacgcaacgccgtttcctacaacatcctcatcgccgcctactctcgcgcgggcctacctggcgacattcgcgcgctaggaacggcaatgtagggtattgggcgtacccacgtgacggcagaaaaacatattgatgttcttctaagggctcagtccctttgggaccaagggtaatgaatggaattttgaggggatcaaaatcccttactatttaaaattgaatattgagggattatggtcctcttaatcccgttcattacacatacacttgctgtcgaagaagtggaatgttgggacttatgactcatctatttgtaaaattgtctcaaatagttaaatgacacaagattatatttgacatttctatgctcgtaattgaaggagagtaaaattggtgtaactggatatatgtactgccttgccttgtgaaaggatcacgatgtacaaatggaatggagggacaaattagactttaattttttttgtgacaattaaattctaataattagtctaat

SEQ ID NO: 210335 - DNA, 5138 bp, Zea Mays
tgcagcccacggggctccgcaggctaccaaacggggcacccctctcccgtgccgtgcgacgttggagctgaacaacggagagaaaaagtgaggcggaagacgagggacatacttcaagcgcccgcggcccgcagcctgctcgcccaggtcttcgccggcgacgagcacccaccaggtccgctcagtccatctctccagaaatccccagatgttccacagcaagtcgctccctaggcccaaggacacatcggtggtggtggtcgtccttgagacgacagaagtgtacattgtgatcagcttgtcgacgaggagagacacccaggtcgtatacgtcgatccgaccaccggcgccctgcgctacctggggaagcatggggaggacgtctttgattcggaggcggcggcgctgaaccacatcaccaacggatcaagggttctatccaagagcactacatatgccaaggcagtgctgggatacgcggtgttaggaagccatgctctgctcttggtcgcgacacagttgagcgcgtcggtccccaatctgccgggaggcgggtgcatatacacattggcagagagccagtggataaagatccagctgcagaatcctcagccccaggggactggagaacagaagaacatacgtgagctggccaatctagacattgatggcaagttcttcttttgcgagacaagggatgttaccaggcccttcccgagtcctattacactacgggaaccagatgaggaatttgtttggaacgagtggctgtcaaagccctttaaggacattggtttgccaggacactgtgtcattcttctgcaggggttcgctgagtgccggaactttggaggtgctgggcagcaaggtgggttagtcgcccttattgcacgccgaagtcggttgcatcctggaactcgctatttggcccgtggactgaacgcatgttcaggcacaggcaatgaggtagagtgcgagcaactcgtttgggttccacggaagggcggacagcgcatcccttttagctcgtatatctggcgccgtggaactattccaatatggtggggcgcagaaataaaaaacgcggtgtcagtggaggctgaaatttacgttgccaacgatccttacaacggaagcttacagtactaccaacggttgggtaaaagatatgggaataaatcatctgaagcgaacgtgtccaggcaaaaaagttctggaagggttcccattatttgtgttaacttgctaagatacggcgaaggaaaaacagagtcagttcttgttgatcatttcaaagaatctatacggtacatgaactctactggaaagctgggaagcacgtggattcagttaataaattatgactggcatgccactgtgaagttaaaagggcagcagcagacagttgagggcctatggaggcatcttaaaccacctacaatggtcattggcttcagtgaagggaattactatgatgcaagacagcagcttaatgaatgtaaaggatcagttatctgcaatgacgatgtaaatggtgggttttgcatggaatctattcaaaatggggtgatacgattcaactgtgcagactctcttgatcgaaccaatgctgctagttactttggtgcacttcaagtttttgttgaacagtgtagtcgattgagcatctcgcttgacatagatgcaatgtttgggttgtcaagtagatattctgaatatgatggtagaaacactcgttctttgccccctggatgggaggagcgctttgactctgtaacagggaaatcattttatattgatcataatacacgtactaccacatgggaacatccatgccaggaggctccacagaagccctggaagagatttgatatgacatttgatcagttcaaaggctcaacaatgcttgctccagtgaaccagcttgctgaactttttcttttggcaggcgatatccatgctacgttgtacactggctcaaaagctatgcacagtgatattctgaacatattcaaggaggaaacaggaaagtttagtaaattctcagctgttgagaatgtgaaaattacggtgctaagaaggtaccaaaattttatgaatgatagttcccgtcaaaagcagttagagatgtttcttggtttgaggctatataggcatctcccgtccatccctatgttccctctcaaagtgctatcaaggccatctggatgcatgttaaaaccagttcctagtatcatcccaatggctgatggtggttccagtcttctgagcttcaaaaggaaggatcttatttgggtgtgtcagcaaggtgcagactatgttgaactttttatataccttggggaaccttgtcacgtttgtcaactgcttcttactgtctcccacggtgctgaagattcttcatatccagcaaccgtagatgttagagttggctcaagcatcgactccctcaaactcgtggttgagggtgcttgcattccacaatgctctaatgggacaaatttactgattccagtcactgggagaactgatccagaggacttggctgttacagggaaaagtgcgaggcccaatgttcaagagagctcctatcttcctttgttatatgactttgaagagctagaaggagaattaaactttttgaatcgggttgttgcattatcttttcatccatctgctgtatcaagaacacccattactcttggcgagattgaagtacttggagtttcccttccatgggcagacatgttaaccaatagtgaacgtgctcctgaatttatggagtttatcaataaaaaatcatcaagtgctcactgtaatctaggttccaagtcttttggaaattcttccatgcctgggaatgattctcatggtattgatgagtcttatactaaaagttcatcattagttcaaccgtgtggttcggaaaatttgttggattttctcacaggtgattttgacatgtcggagtcccatataactcaaaatacttttggtgctggagaacaaacaaacttcttagatgatggatttgatgttaatcctttcgcccctgcattggaagtgcctgttcctgttgctaaagtaaacaaggaggttgaagaatgtggcagcacccagctttatattaaattttttgaatccctttctggctataataagggaaagggtcttgactttgagcaaacgatgaagcttgaaataaaacgtctccgtcttggtctttcagccgctgaaagggaccaggcgttgttatcaattggtgtaattcctgccacattagatccaaaccgtttaattgattattcttacctattgaagttatccagcttagctgataatctagcactgctgggccatacagtccttgaggatcgcgctaatgcttcaatagggcttgaaaagggcagtgaacatgctatagacttttggaacatcagtgaaaatgatgaattctgctatggtggggcatgtgaagtccgtgctctgtcttcattacaagctttagcatctagagaaaatcaatcggtattcatggaatgtttccagtgtgaaaagacagtttgcaaagcttgctgtgctgggaaaggggccttccttttgcttaacacctacagggagttgaagatatatggtgggagtcaaagtggtggctactcagcactcacagatagttttgtgtgcaaatcgtgctgcagtgaaattatcaaacgtgcattgtatgtggattatgtccgggttcttcatagtttgcgcagaaaagatcgttcagagaaagcagcactgagtgctgtgaatcaggtctgccaactggagtacaagaaagcatctgatttatctcaaagtattcaatttggtcagagacaattgaagcagatccttgatggtgaagaatcccttgcagaatttccatatgcaaactttttacaaatggttgaaactgccaatgactctgaaccactgctttcattactggcgccttttggtactggagagtatacgtcttactggaaagctccacaaggtatcacttcagtggaattctcaattgttcttggtggtttatcagatattgcaggagtttccataattgtcagttcttgcggttactcagcatctgactgcccaattgtagagatatgggcgagtaataaaatacaccgagaagatcgtacatttataggaaagtgggatgtacaggatataatatcttcatctccacagcttcgtggacctgaaaaatctagtagattgagtgaagaaccaagacacattaaatttcacttcccaaatcctatccgttgtcgtataatttcaataaaaatgacactttcccatagaggttctcattcaaccaagtttagtgaggagtttgatcttctatcattgaatgatagctcatcttatgaatcgaagccaaccaatttacataattcatttatccatgcaaaaagaattgtagtttttggcagtttgttgagaaaggagatggagcctgacacatcaggggggataatgagaatgaaaagttatttagacagatcaccggccttggggagatttaggatcccagttgaagctgagaggctgagagataatgatcttgttcttgagcaatatctcttagctaattcacctggaatagctggattccggcttgattctttcagtgttataagacctcgtgtgacccattcaccttcttcatcagagttggacatgagggagttttcattgacacgaatggaagatagatttataaacccagcaattctgtatatacaggtcacagttgttaaggagtccggcaagttggttgtagaggaataccgtttaccagaagtaaaagcaaacacgccactatattttgatttcccagatctacaacaggatgcgcgctgtgttatctttagattgcttggtgacgtcactgcctttgtcgacgacatttctgagcttgagaacttaaacttgcggaatcttcctttggcgtcgggactgtctttgtcaaataagatcaagttgtactactatgctgatacatatgagatgggaaagatcggcagtctctcagctgtataatgtatgtgagttatgtggatggatccttaacatactggagtcaaccacatagcca

SEQ ID NO: 210336 - DNA, 1025 bp, Zea Mays
cctaaccctaatggcccgacagtccaacagtggtgccggcccactcacacacacacagtctaacagtttttgatgtcttagaagttagaacagactgttatcgtggttgtcatatatgtgttcatctcaaggtagatactggtatggtgttttctgttccatatgttaacactattagttatatgttttaatggatgtaatgatatatacagaggatgaacaaccttttgtttcattctcatgtgtgcgcatgcaaaaatcctcagtgatgggtagtaatttcctttgattaatttcaatatcatattatattatttgcttatctgcatggtctatcctgttcaagggaaatctccggatacaaggaggaaatctaggaaaggtgcaattcaaactaatgatgaagaaagctgattcgtttgtgctatgttgcaaggggctcctaaaaggaaacgcagtgcagagtttaatgactgccatgatcaatgtacatttggatgggaatgagccatttgctggtaaaccatggcacctgctactgttgatgttgcctcatccgacctggaagatatatctgtaaattcaggctgaagctcaggtggttattgtatcaacaagccctggcacaaaaggcttcgtttgtaacaaactaacaataaagcatcgattgacctgtttgctgaatgtgtgatacggtacttccaatactaggtcagcatcagtccagaagctgtaccctgaacaaagattctggatggcttcttgtgccagctaggaacaatgtaaaattgatgtaagcgtctgtgcgcactcctgatccatgtacaactaagttaaaattttaaactgttatagattgttgtatggatagctctcaattgctactgttctcccctcatgttttatgtttgattgtaaaaaaaacttaaattgtcactcattaaggcagaaatacatgaataaaatagaggatcgaaagacgccagaattttgaaaaacttaagaattttcaaaaacataggaat

SEQ ID NO: 210337 - DNA, 3670 bp, Zea Mays
cggccgcagggctggcgggtagaagtagaatcgatggccaggtcccgccaaccaccgtcctgcttcttccgatcccattcgattccagagttcaacatccatccttttcattcgtacgccgtcgtggtcgtggtcgccacccacgactcttccacctccggcctctctgcccaattcaatctcgggctccgaccacagggaaagatcaatcgaaagcggagccgtgttgagagcaaccgaggaaccaggcgcccgggcggtgatggagaacggcaacaacggcggcaatccgccgcactacccgccgtaccaatacccgtatccgcaggcgcaggcgcaactgtatccttacgggtaccagtacccgcctgcgccgccgtcgccgtcgccgtctgccgcgccggcggggccatacctctctccgtctccatccttcccgagctatgcccccgccccgcatccgccgcagcagtttcactccggcccgctccaggcgtacccgcccccgccgcagtaccacgcctacccgccgccgccgcatccatcgccttacggccacgggtacgacccctacccatccccgtatttctcctacccgagcaccaaccctagccccagccccagcccggggctctcgcccagctccagcttccaccaccagcacgcctccgcgcccgaacccccgtcgcccgcgccctccgcaccctccgcgccgtcctatcccatcgaggatgtccttgccagcatgcgcctctccggccgtcacgattacgcgtcgtcgccctcagtgaccccgccctcgacccccttcttgggcgatgggagcagccacggcggcgggatgcagctggtgccctatggcacggccgccggagggtcgcagcacggaggcgggatgcaggtggtgccctatggtgcggccgcgggagggtcgcagcacggcggcagcttcagggcatcgcttaaggtggtgctgctccacggcagcctcgacatctgggtgcacgacgcgcgacacttgcctaacaaggatatgttctccaagagggtcggcgagctccttggcccacgcatcaccagcgctgttggcagcaagatgtccagcgcgtccatgaccagcgacccctatgtcaccgtacaggtctcctatgccaccgtcgcgcggacctatgtcatccccaactgtgagaatccagtctggtcgcagaacttcatggtgcccgtcgggcatgaggctgccgaagtccagtttgttgtcaaggacagtgatgtcttcggtgctcaaatcatcggtgttgtgtccattcccgccgagaagcttctgacaggggacaggattcagggtgtcttccccgtccttgagcccaatggcaagccttgtgctcctggagctgtactgcatttgtcaatacagttgatccccgttgctcagctcacaatgtaccaccatggcgtcattgctggtccagacagtcatggagtgcctcatacttacttcccacttaggcgtggcatgagagtgaccctgtatcaagacgcccatgtgcctgatggttgtctcccagacatatggcttagcaatgggctgcgctaccagcacgggcagtgttggcgtgacatctatgatgccatatgccaggcaaggaagttaatttacattgtggggtggtctgttttccacacaatccacctcgtgagagatggcactcaagctccatcacttggggacctgttgaagatgaagtcacaggaaggggtgcgtgtgttgctgcttgtttgggatgatcctacatcgaggagcattcttggatataagatggatggtttcatgggcacaagagatgaggagacacgcagatttttcaagcattcttcagtccaagtgttgctctgcccacgatctgctgggaaacgccacagctgggtgaaacagcaggaaacaggaaccatttttacccatcatcagaaaacagttattgtggatgctgatgctggcaactataggagaaagatagttgcttttgttggaggcctagatttatgtggcggacgatatgatacaccttggcatcctctgtttcggactcttcagaatgaacacaaagaggattattacaatccaaactttaatacagttgatgctcgtggtccaagggaaccatggcatgacttgcattctaagatcgatggtccagctgcttatgatgttctacagaactttcaggagcgttggttaaaagcggccaaacgacatgggattaaaaagttggcaaaatcctatgacgatgctctgctcactattgaaagaataccagagattataaacataaatgatgcaatatattttagtgacaatgatccagagacatggcatgttcaggtgtttcggtctattgattcaaactctgccaagggatttccaaaggatccacgagcagcaaccatgaagaatcttgtttgtggaaagaacgtacttattgacatgagcatacatacggcttatgtccatgctatccggtcagcccaacattatatttatattgagaatcagtacttcattggttcttcatttaattgggattcaaacaaggacttaggggctaacaatttaattccaattgaaattgctctcaaaattgcaaataagattaaggcaaatgaaaggttttctgcatacatagtggtacctatgtggcctgagggtaatccaactggggctgcaacacaacgaattctttactggcagaataaaaccatgcaaatgatgtacgagacaatatacaggaccttgaaagaagaaggcctggatgatatgtatgagcctcaggattatttaaacttcttctgtcttggcaaccgtgaagttgctgacagcactagcacttcaaacgcttcgaatacagcaaataatcctcagagatccatggaaggaataagagacactgagattgcgatgggagcgtatcagccacaatatacatgggctaataagctttctgccccacgtggacagatttatggctacagaatgtccttatgggctgagcatattggaagcattgaggaagacttcaactatccggagagcctggagtgcatgaggcgtgtacgtcatcttggggaagagaactggaagcagtttgttgccgatgaggtgacggagatgagaggccacctcatgaagtatccagtaagcgttgaccgtaaaggcaaggtgaaaccgctacccggatgcacaacattcccagatatgggtgggaacatctgtggctcgtttgtggccatccaggaaaacctcacaatataaactttagctgtgcaacttacataatgtctggtggcctctgcccagggggaccctagcactagcttatcctctttcttgagagcgtagatagggtgaaaattttgcaatagctacaggttgcaggcaagcaggggaaatggtaatatgggctttctccccttgacctttttttctggattcgttcagtacatatataagtagccaatcaatttatacctttattgggtacatgtatagaaaaattaaagaggttcaggaatatcacatttggaccaaggtattccaatgtagatcctggaaagtactggtaaatgttcagaatgtaaattgatcctgcagaatattttcaagtgtttttccctt

SEQ ID NO: 210338 - DNA, 2483 bp, Zea Mays
gattattccaacctccaaaccaagggatatcacgcgcgaactccaaatcgaaagcccgagcccacctgcagcctcagggtcaggggctcagggcaccagttcccatttcctcggcctccgcgccggccatggacgtcgatgacccctcaccgcgcgccggcggaggcagcggcgtggacccgccccgcatccggcggctggaggaatcggtggtgaaccgcatcgcggcgggggaggtgatccagcgcccgtcgtcggcggtcaaggagctcgtcgagaacagcctcgacgccggcgcgtccacagtctccgtcaccgtcaaggatggaggactcaagctcatacaggtttccgacgacggctacggcattcggtttgaggatttgccaatactgtgtgaaaggcatactacctcaaagttatctgcatatgaggatttacagaccataaaatctatgggctttagaggggaggccctggccagtatgacttatgttggccatgttactgtgacaacaataacagagggccaacttcatggctaccgtgtttgttataaagatggagtaatggagaacgagccaaaaccctgtgctgcagttaaaggaactcaaatcatggttgaaaatttattttacaatatggtagctcgtagaaaaacattgcagaactccaatgatgactacccaaagattgtagatttcattagtcgttttgcagtccatcacatcaatgtgaacttctcctgcagaaagcatggagccaatagagcagatgttcatagttcgagcacatcttctagactagatactattaggaatgtctatggggcttctgttgttcgtgatctgattgaaatagaagtttcagatgaggatgctggagatgcagtcttcaagatggatggttatatatcaaatgcaaattatgtggcaaagaaaatcatgatgatccttttcataaatgataggcttgtagagtgtactgctttaaaaagggcaattgaatttgtgtactctgcaacgttgccacaagcatccaaacccttcatatacatgtccatcaatcttccatcagaacatgtggatgtcaatatacacccaaccaaaaaagaggttagcctcttgaatcaagagcgtgttattgaaactataaaaaataccattgaggaaaaactgaggaattgtaataccacaaggatattccaaactcaggcagtaaactcagcacttactcaagtttacacgcagaaggacaagggtactgaggtcaaaatggcccctggagtgaaatctcaaaaggctcctgtgagccaaatggtcagaactgatccacgcaatccatctggaagcttgcacgcttactggcatgggcaatcttcaaaacttgaaaataaatatgaccttgtttctgtaagaaatgttgtaagatcaaggaggaatccaaaggatgctggtgatttatctagccgtcatgagcttcttatggaaatagattctcactgccatcctggtcttttagaggttattaagaattgcacatatgttggcctggctgatgaagtttccgctttgatacaatacaatactcacttataccttgtcaatgttgtaaatgttagtaaagaactcatgtaccagcaagctctgtgccgttttggaaacttcaatgcgatccagcttagtgaaccagctcctcttcaggagctgctgctgatggcactgaaagatgatgaatcaatcggtgatgaaaatgacgaggagaaactggagattgcagaggcaaactcgaaaatactgaaagaaaacgctgagatgattaatgagtacttctctattcatgttgatcacgatgggaacttgaccaggcttccagttgtacttgatcagtacacccctgatatggaccgtctcccagaatttgttttgactatggggaatgatgttacctgggatgatgagaaagagtgcttcagaacggcagcagctgctattgggaacttctacgcactccatcctcccatccttccaaatccatcggggagtggtgttcaggtgtacaagaaaaataaagcttgcatggcgagtggtgaacatgttgatagtacagatgaagatgacattgatcacgaactacttgcggaagcagaaacagcatggtcccaacgtgagtggaccattcaacatgtcttgtttccatccatgcgacttttcctcaagcccccaaagtcaatggcaacagatggaacctttgttcagattgcctctctggagaaactttacaggatttttgagagatgttagcccacacttctaactacttacaagaagccaagaaagacaccctataacatgttttgcactgtacatattcgtgtagtgtcgcaaatgttttttttaatagttcattgacttatgagatggaagtataccatgagcatgccctaattgagttgtctaatgatatctaaaggaaaacttcat

SEQ ID NO: 210339 - DNA, 2627 bp, Zea Mays
cgaactccaaatcgaaagcccgagcccacctgcagcctcagggtcaggggctcagggcaccagttcccatttcctcggcctccgcgccggccatggacgtcgatgacccctcaccgcgcgccggcggaggcagcggcgtggacccgccccgcatccggcggctggaggaatcggtggtgaaccgcatcgcggcgggggaggtgatccagcgcccgtcgtcggcggtcaaggagctcgtcgagaacagcctcgacgccggcgcgtccacagtctccgtcaccgtcaaggatggaggactcaagctcatacaggtttccgacgacggctacggcattcggtttgaggatttgccaatactgtgtgaaaggcatactacctcaaagttatctgcatatgaggatttacagaccataaaatctatgggctttagaggggaggccctggccagtatgacttatgttggccatgttactgtgacaacaataacagagggccaacttcatggctaccgtgtttgttataaagatggagtaatggagaacgagccaaaaccctgtgctgcagttaaaggaactcaaatcatggttgaaaatttattttacaatatggtagctcgtagaaaaacattgcagaactccaatgatgactacccaaagattgtagatttcattagtcgttttgcagtccatcacatcaatgtgaacttctcctgcagaaagcatggagccaatagagcagatgttcatagttcgagcacatcttctagactagatactattaggaatgtctatggggcttctgttgttcgtgatctgattgaaatagaagtttcagatgaggatgctggagatgcagtcttcaagatggatggttatatatcaaatgcaaattatgtggcaaagaaaatcatgatgatccttttcataaatggtagaaacatacaagagcagtgctagtgatttttttaggcaacgaatatttctccattcctctgtaaataacatctgctagtttattcatgtagataatccacctttgcagttttgatcagaattagtcaagttagccgctcctttttgttttctactatatgcattatttctttgctttattatttatgtaacttcatatttactcttcagataggcttgtagagtgtactgctttaaaaagggcaattgaatttgtgtactctgcaacgttgccacaagcatccaaacccttcatatacatgtccatcaatcttccatcagaacatgtggatgtcaatatacacccaaccaaaaaagaggttagcctcttgaatcaagagcgtgttattgaaactataaaaaataccattgaggaaaaactgaggaattgtaataccacaaggatattccaaactcaggcagtaaactcagcacttactcaagtttacacgcagaaggacaagggtactgaggtcaaaatggcccctggagtgaaatctcaaaaggctcctgtgagccaaatggtcagaactgatccacgcaatccatctggaagcttgcacgcttactggcatgggcaatcttcaaaacttgaaaataaatatgaccttgtttctgtaagaaatgttgtaagatcaaggaggaatccaaaggatgctggtgatttatctagccgtcatgagcttcttatggaaatagattctcactgccatcctggtcttttagaggttattaagaattgcacatatgttggcctggctgatgaagtttccgctttgatacaatacaatactcacttataccttgtcaatgttgtaaatgttagaactcatgtaccagcaagctctgtgccgttttggaaacttcaatgcgatccagcttagtgaaccagctcctcttcaggagctgctgctgatggcactgaaagatgatgaatcaatcggtgatgaaaatgacgaggagaaactggagattgcagaggcaaactcgaaaatactgaaagaaaacgctgagatgattaatgagtacttctctattcatgttgatcacgatgggaacttgaccaggcttccagttgtacttgatcagtacacccctgatatggaccgtctcccagaatttgttttgactatggggaatgatgttacctgggatgatgagaaagagtgcttcagaacggcagcagctgctattgggaacttctacgcactccatcctcccatccttccaaatccatcggggagtggtgttcaggtgtacaagaaaaataaagcttgcatggcgagtggtgaacatgttgatagtacagatgaagatgacattgatcacgaactacttgcggaagcagaaacagcatggtcccaacgtgagtggaccattcaacatgtcttgtttccatccatgcgacttttcctcaagcccccaaagtcaatggcaacagatggaacctttgttcagattgcctctctggagaaactttacaggatttttgagagatgttagcccacacttctaactacttacaagaagccaagaaagacaccctataacatgttttgcactgtacatattcgtgtagtgtcgcaaatgttttttttaatagttcattgacttatgagatggaagtataccatgagcatgctattgttttctccc

SEQ ID NO: 210340 - DNA, 2209 bp, Zea Mays
cgaactccaaatcgaaagcccgagcccacctgcagcctcagggtcaggggctcagggcaccagttcccatttcctcggcctccgcgccggccatggacgtcgatgacccctcaccgcgcgccggcggaggcagcggcgtggacccgccccgcatccggcggctggaggaatcggtggtgaaccgcatcgcggcgggggaggtgatccagcgcccgtcgtcggcggtcaaggagctcgtcgagaacagcctcgacgccggcgcgtccacagtctccgtcaccgtcaaggatggaggactcaagctcatacaggtttccgacgacggctacggcattcggtttgaggatttgccaatactgtgtgaaaggcatactacctcaaagttatctgcatatgaggatttacagaccataaaatctatgggctttagaggggaggccctggccagtatgacttatgttggccatgttactgtgacaacaataacagagggccaacttcatggctaccgtgtttgttataaagatggagtaatggagaacgagccaaaaccctgtgctgcagttaaaggaactcaaatcatggttgaaaatttattttacaatatggtagctcgtagaaaaacattgcagaactccaatgatgactacccaaagattgtagatttcattagtcgttttgcagtccatcacatcaatgtgaacttctcctgcagaaagataggcttgtagagtgtactgctttaaaaagggcaattgaatttgtgtactctgcaacgttgccacaagcatccaaacccttcatatacatgtccatcaatcttccatcagaacatgtggatgtcaatatacacccaaccaaaaaagaggttagcctcttgaatcaagagcgtgttattgaaactataaaaaataccattgaggaaaaactgaggaattgtaataccacaaggatattccaaactcaggcagtaaactcagcacttactcaagtttacacgcagaaggacaagggtactgaggtcaaaatggcccctggagtgaaatctcaaaaggctcctgtgagccaaatggtcagaactgatccacgcaatccatctggaagcttgcacgcttactggcatgggcaatcttcaaaacttgaaaataaatatgaccttgtttctgtaagaaatgttgtaagatcaaggaggaatccaaaggatgctggtgatttatctagccgtcatgagcttcttatggaaatagattctcactgccatcctggtcttttagaggttattaagaattgcacatatgttggcctggctgatgaagtttccgctttgatacaatacaatactcacttataccttgtcaatgttgtaaatgttagtaaagaactcatgtaccagcaagctctgtgccgttttggaaacttcaatgcgatccagcttagtgaaccagctcctcttcaggagctgctgctgatggcactgaaagatgatgaatcaatcggtgatgaaaatgacgaggagaaactggagattgcagaggcaaactcgaaaatactgaaagaaaacgctgagatgattaatgagtacttctctattcatgttgatcacgatgggaacttgaccaggcttccagttgtacttgatcagtacacccctgatatggaccgtctcccagaatttgttttgactatggggaatgatgttacctgggatgatgagaaagagtgcttcagaacggcagcagctgctattgggaacttctacgcactccatcctcccatccttccaaatccatcggggagtggtgttcaggtgtacaagaaaaataaagcttgcatggcgagtggtgaacatgttgatagtacagatgaagatgacattgatcacgaactacttgcggaagcagaaacagcatggtcccaacgtgagtggaccattcaacatgtcttgtttccatccatgcgacttttcctcaagcccccaaagtcaatggcaacagatggaacctttgttcagattgcctctctggagaaactttacaggatttttgagagatgttagcccacacttctaactacttacaagaagccaagaaagacaccctataacatgttttgcactgtacatattcgtgtagtgtcgcaaatgttttttttaatagttcattgacttatgagatggaagtataccatgagcatgctattgttttctccc

SEQ ID NO: 210341 - DNA, 2527 bp, Zea Mays
cgaactccaaatcgaaagcccgagcccacctgcagcctcagggtcaggggctcagggcaccagttcccatttcctcggcctccgcgccggccatggacgtcgatgacccctcaccgcgcgccggcggaggcagcggcgtggacccgccccgcatccggcggctggaggaatcggtggtgaaccgcatcgcggcgggggaggtgatccagcgcccgtcgtcggcggtcaaggagctcgtcgagaacagcctcgacgccggcgcgtccacagtctccgtcaccgtcaaggatggaggactcaagctcatacaggtttccgacgacggctacggcattcggtttgaggatttgccaatactgtgtgaaaggcatactacctcaaagttatctgcatatgaggatttacagaccataaaatctatgggctttagaggggaggccctggccagtatgacttatgttggccatgttactgtgacaacaataacagagggccaacttcatggctaccgtgtttgttataaagatggagtaatggagaacgagccaaaaccctgtgctgcagttaaaggaactcaaatcatggttgaaaatttattttacaatatggtagctcgtagaaaaacattgcagaactccaatgatgactacccaaagattgtagatttcattagtcgttttgcagtccatcacatcaatgtgaacttctcctgcagaaaggtaaatctccctgccttttttcaccgtcatattatcgccagatttaacaaggcaccctttatatcatcactcatcagatttaatagggtaccatttgcttcttatgtcacagcatggagccaatagagcagatgttcatagttcgagcacatcttctagactagatactattaggaatgtctatggggcttctgttgttcgtgatctgattgaaatagaagtttcagatgaggatgctggagatgcagtcttcaagatggatggttatatatcaaatgcaaattatgtggcaaagaaaatcatgatgatccttttcataaatgataggcttgtagagtgtactgctttaaaaagggcaattgaatttgtgtactctgcaacgttgccacaagcatccaaacccttcatatacatgtccatcaatcttccatcagaacatgtggatgtcaatatacacccaaccaaaaaagagcctcttgaatcaagagcgtgttattgaaactataaaaaataccattgaggaaaaactgaggaattgtaataccacaaggatattccaaactcaggcagtaaactcagcacttactcaagtttacacgcagaaggacaagggtactgaggtcaaaatggcccctggagtgaaatctcaaaaggctcctgtgagccaaatggtcagaactgatccacgcaatccatctggaagcttgcacgcttactggcatgggcaatcttcaaaacttgaaaataaatatgaccttgtttctgtaagaaatgttgtaagatcaaggaggaatccaaaggatgctggtgatttatctagccgtcatgagcttcttatggaaatagattctcactgccatcctggtcttttagaggttattaagaattgcacatatgttggcctggctgatgaagtttccgctttgatacaatacaatactcacttataccttgtcaatgttgtaaatgttagtaaagaactcatgtaccagcaagctctgtgccgttttggaaacttcaatgcgatccagcttagtgaaccagctcctcttcaggagctgctgctgatggcactgaaagatgatgaatcaatcggtgatgaaaatgacgaggagaaactggagattgcagaggcaaactcgaaaatactgaaagaaaacgctgagatgattaatgagtacttctctattcatgttgatcacgatgggaacttgaccaggcttccagttgtacttgatcagtacacccctgatatggaccgtctcccagaatttgttttgactatggggaatgatgttacctgggatgatgagaaagagtgcttcagaacggcagcagctgctattgggaacttctacgcactccatcctcccatccttccaaatccatcggggagtggtgttcaggtgtacaagaaaaataaagcttgcatggcgagtggtgaacatgttgatagtacagatgaagatgacattgatcacgaactacttgcggaagcagaaacagcatggtcccaacgtgagtggaccattcaacatgtcttgtttccatccatgcgacttttcctcaagcccccaaagtcaatggcaacagatggaacctttgttcagattgcctctctggagaaactttacaggatttttgagagatgttagcccacacttctaactacttacaagaagccaagaaagacaccctataacatgttttgcactgtacatattcgtgtagtgtcgcaaatgttttttttaatagttcattgacttatgagatggaagtataccatgagcatgctattgttttctccc

SEQ ID NO: 210342 - DNA, 1832 bp, Zea Mays
aaccaaacgaacaaaaaaaaatccaaaaaaaacgagtctttaatcctcgccatcgaccgcaaagcccccctctgccccctccttttcccctccctcccacacgcaccgccgcgtccgcccccttcgctgcccctgcccggtcggttccgatggggtacgtgctgtcggcggtggcgagggtgctggagcagcccacggcgtggggggcggccccggagatggcgctcctcgcggggccgctctgggcggcggtcctcctcggcctcctgctcggctgggcctggcgcccgcgctgggcagctggcctcgtcgccgcccccgcccccgccgccgctgcgcagccgcccttcgccacgctcggtttctggaaggcccagctccccgcccgtctccgcgccccgctcggctccgccgccgccgtgcggcacggggaggaggaggaggaggacgaggtctccgtgcgaggtggcaggtcgtcggaggcggggagcgaggagctggcggtggggaagcgtgacctggccaacctctggaggctggtggagggcagggacggcggcccggcctggatcaagatgatggacaggtcgcttcccaccatgacctaccaggcgtggcggagggacgcgcagaccggaccaccacagtatcagagtagcagcatctttgaggacgccactccggaggaagtgagggacttcttcggggacgacgagttccgtgtgtccaacaagtgggacgacatgcttgtttaccataagacgctggaggagtgccagaccaccgggacgatgaaagtgcattgggtccggaagtgacagagagtacataattgctcgccggatatggaaactggggggcgcctattattgtgtcacaaagggtataccatgctcgtccattccacggcgcaacaaacctcgaagagttgatctgtattattcaagctggtgcatccgtgcagtggaatccaggagagggaacggagggtcgacagcttgtgaggtgctcttgttccaccacgaggacatgggcatcccgtacgagatcgcaaagctcggtatccggcaagggatgtggggatgcgtgaagagaatcgagcctgggctccgggcctatcagcaagccagggctgcaggggagccggtgtcacggagtgccctgatggcccagatcaacaccaaagtcggcgacagctttgtccggtcgctggagtccgacagcgacgggtccgaaaccgtggaagcggaagagaagcctgcgaggaaccgtgtggcgaggttccttgtgcttggaggggcagttgctctggcctgtactcttgaccaagggctcctgacgaaggctctcatcttcggcgtcgcgcggaaattcgtcgggcagaggaaggcactgtagcatctctggcatttatttctcagcgtcgtccgcttggcccgtggtccgcactaaccggacctgtcctttcactgtcgtagagtggaggatagaggtggttcagtgtctgcctaattggggcaaatgccattgaccattgtggctgaaagagaacagagctgatgaaaaacattttggtgtacagatatgctgccggctgttggatagcgaggaatggggaatagagcaaacaatgtacttctcgtttggagaacggaactcctacgatatatataaatgtgtttcatctaatcttgtatctcagacaagaacagatcagatgactgtgcagatgagaacaagcatttttctatgtagcttactgcggctacggcttctacaatattttgtttctatggattgcaggattgcagccgcagccacttgcagccgca

SEQ ID NO: 210343 - DNA, 900 bp, Zea Mays
cggccggcagcccatcaaggcatcagctatcaatccagtattccagatttccagcgctgcttccttttctccgccgtgctctccccagtcccctccgcctccggtcaccattaacctagccgcaactctcctcggtgcggcggtgcccgcctgcccggagctcggacaccggagcgacctcaagtgttccacaggcgtcacgggacacgacgctcaccgctcgctatcgctggcggactacggacggctggagctggattgctgactgctgtggagaattcggactttgaagcctcaagtctgaaccatatgtgaagtctgaactgtatttttctcgtggatttgtgatgcaatgcaatggcacttggcggctgtcactggcaggcagcagcagcaccgcagcaggcttaatgccttacagccttgcacttttgtatcttttgtcgtcgtcgagtactcagtacattagtgtagtagtaggtagtacctgtcggctgtattggttcttgaattctcgctcctctgcataagcatgtttggagcaaagatgagggcagagttagcaaatatgcttgttatgtatgaagtagcataaatcaggctatagacactagagaagaggctggtattttattttatttccttatatcttgtatatcaaattcctattcttttgtgtttgtaaatcaacgatcaatggacatttccatgaacatgtattaaattgagttgtatattggttttttggcgattaattgtcttgttgaatgttgatccattttaaccacacaatttgcttggtagattgctgttgctgccagagtttatcatgaattggtatatccattgataaacatgtagataaacatgtagggattgttttcgtgactgctcattttg

SEQ ID NO: 210344 - DNA, 1947 bp, Zea Mays
aagtcccaaccgaacctaaaccaaaagcaggcgagagtctagaccgcagcggaaggggagcaggcggcggccccgattgcggtaatggagctgtcgatgagtggcagctccctgcgaacgttcggccggtgcgtgaccttcctcgcgcgcgttgcctccgagctcgtgctccaggcgcaccccgccaagctggagatgcacacgcttaacagctcgcggtcggcgtacgcttcgatctccctagcgcgcgacttcttcgaccagtatcacctcgacgccgcggcttcggcaccgtcttccacgccgctgcagtgcagcgtcctcctcaagtccctgctcgccgtcctccgcacgccgcacgccgcgctcgaccgactcgccgtatccctcccagaacccgacgcacccaagctccagatcaccctccactgcctcaatggtgtgaggaagacgtactggatcgtgtgcagcgcagagcccgaggtgcagtcgctgtcgctagaccggggacggttcccgagccgcctagccattcggccgcgggagctggcgcggctgttgtccaacttccagtcctcgctgcaggagctcacaatcatcgctacagatcctgcttcagggttacctgatgctagcggtgacgtcgggggcaaggctgttgagctccggagctacaatgacccgacaaaagatgactgtgacactagactgcacacacaactgtggatcgaccctgccgaggagttcgtggagtttgttcatgctggtgatccggtggatgtcacctttggggtaaaagaactgaaggcttttttaacattttgtgaaggatgtgaggttgacatcctcctattctttgagaagactggcgaacctgttcttttggtcccgagattcggattggatgatggagcagcttctgattttgaagctactctagttctggctactatgactgtatcacaattatctgacagcgatgatgcccaacaaccagctacatcagcacaaaacgcgggagaaccaggggctgctgcaccaacactagttcctgaaaatgtctcgaaccatactaaaatatggtcggagctttcaggtagtactcccaaaagcattgaagctaacagagaaaatcatgcccagaagaagagaaacgcaagcactaatatgctgaacgacatgtcaatgctgcccaatgttacaaatgctccaagcaagccaccagttgcagataatgcaaacaatataatgcagcctttgcaaatggatcacatggaagaacgtcctggttaattatcaaacaaaatcatccattacattattgtcattagttactgatacgtctctacattgactaatgtttagctaacttgcttttttatgacgttgcagaaggtatcagtggtattcctcgatcacaacaccacccgagcaactgggtcggtgctgatgataacgacgatgacaatgaagacgacgaggagcttttagtccagacaacaccctactatatggactgaggataaatgctgattctaaaatatcggctgccgccagccaagcagccggtgttcctgcagcagcgtgactgaacaatgtggttctttcactttatctggccttggaagacggtgaaaagaaaccgagatctggcatggaaactgcttcctttaataatagaggttttgcgtcttccgagcaccctgcaccggcggtcatgctggttcaggcgtgcagctcgcctggctatcattggaatctgttgtcccgctgctagtccgatgtgaattactgtatgttagtctttcatttgcgttcatgaactcatctagccatgtcatgacttacaactgatcagggtgttttaaattttccgctgcttgccctggatgttctaaagcaaatgttttttcaagagcttttggagagctgtttcttctgtgtggc

SEQ ID NO: 210345 - DNA, 2177 bp, Zea Mays
caggtactgtacgcgtagcctaggcaactgttcgccacgtagcaccacattgaccgtctggcccgcaactccccaccctttcccggccgctcgccttttctcctcttctccgatctctctccccctcttgaccgcccttgggatttggggggccctgggcaaattgcggtggccggggcccgccgccgcgacagctccgtccgtcctcggttccgctcttccgtccgatccatacgtttccgttccctataaattctttaaattcccgcaagtcccgtaccgctcagccaacccaacacgacggcgagtcgacggcgagtgggagggaacaccgcagcagcgatgcgtcggggctcgctttcgctgctgctgcttgcggcggtggcggcggtagcggccaccgcggttcccgccgagccggcgtcgacgctgtccgggccgtcgcggccggtgacggtggcgatcggagacaggggccacgcggtggacctgccggacacggacccgcgggtgcagcgccgcgtcacgggctgggcgcccgagcagatcgccgtcgcgctctccgcctcgcccacctccgcctgggtctcctggatcacaggggactaccagatgggcggcgccgtggagccgctggaccccggcgcggtgggcagcgtcgtgcggtacggcctccagaactacacctccggcatcatccaccacgtccgcctccagggcctggagcctgggaccaggtacttgtaccggtgcggcgacccggccatcccggacgccatgagcgacgtgcacgcgttccgcacgatgccggccgtcgggccggggagctacccggggcggatcgccgtggtcggggacctcgggctcacctacaacaccacctcgacggtggaccacttggtgcgcaaccgccccgacctggtgctcctcctcggcgacgtctgctacgccaacctgtacctgaccaacggcaccggggcggactgctactcctgcgccttcgccaagtccacgcccatccacgagacgtaccagccgcgctgggattactggggaaggtacatggagcccgtgacgtcgagcatcccgatgatggtggtggagggcaaccatgagatcgagcagcagatccacaacaggacgttcgcggcctacagctcgcggttcgcgttcccgtcggaggagagcgggtcctcctcgccgttctactactcgttcgacgccggcggcatccacttcgtcatgcttgcgtcctacgccgactacagcagatcagtacaagtggctggaggcggacctggagaaggtggacaggtcggtgacgccatggctgatcgcgggctggcacgcgccctggtacaccacctacaaggctcactacagggaagccgagtgcatgagggtggagatggaggagctcctctacgcctacggtgtcgacgtcgtcttcaccggccacgtgcacgcgtacgagcggtcgaaccgggtgttcaactacacgctggacgcgtgcggccccgtgcacatctcggtgggcgacggcggcaaccgcgagaagatggcgacggcgcacgcggacgaggccggccactgcccggacccggcgtcgacgccggaccccttcatggggggccgcctctgcgccgccaacttcacgtcgggccccgccgcgggccgcttctgctgggaccgccagccggagtacagcgcgtacagggagagcagcttcgggcacggcgtcctggaggtcaggaacgacacgcacgcgctctggcggtggcaccgcaaccaggacctccatgccgccgccgccgccaacgtcgccgccgacgaggtctacatcgtcagggagcccgacaagtgcctcgccaagacggccagattgttggcctattgattgatccatcactcctagctactcctactctggtcgctgcctattgattgatccatcaatcctgttaattttcagaagagtttcagaagagtcttaatactcctagtcttaatagtcctagctatgcaaatatgcagtgttaatttgcggcagtaccagattaagcttccatccagattggcagcggtcaattcttgtccttggcacactactcgagatgaaataagctttaccttaaaaccaactgtttagatcggtgcaattataatttatagagaca

SEQ ID NO: 210346 - DNA, 2382 bp, Zea Mays
caacaatagtgggaacgtgcgatgggtgcagaggacatgagcagtggccggccaatctcatcggtcggcggcggcatctcccatggcgggcgatgggatattcctcccgatcctgcagcatcatcctctcttttctttctccgaccacaggaagaaaagctcaaagctactacaggtactgtacgcgtagcctaggcaactgttcgccacgtagcaccacattgaccgtctggcccgcaactccccaccctttcccggccgctcgccttttctcctcttctccgatctctctccccctcttgaccgcccttgggatttggggggccctgggcaaattgcggtggccggggcccgccgccgcgacagctccgtccgtcctcggttccgctcttccgtccgatccatacgtttccgttccctataaattctttaaattcccgcaagtcccgtaccgctcagccaacccaacacgacggcgagtcgacggcgagtgggagggaacaccgcagcagcgatgcgtcggggctcgctttcgctgctgctgcttgcggcggtggcggcggtagcggccaccgcggttcccgccgagccggcgtcgacgctgtccgggccgtcgcggccggtgacggtggcgatcggagacaggggccacgcggtggacctgccggacacggacccgcgggtgcagcgccgcgtcacgggctgggcgcccgagcagatcgccgtcgcgctctccgcctcgcccacctccgcctgggtctcctggatcacaggggactaccagatgggcggcgccgtggagccgctggaccccggcgcggtgggcagcgtcgtgcggtacggcctccagaactacacctccggcatcatccaccacgtccgcctccagggcctggagcctgggaccaggtacttgtaccggtgcggcgacccggccatcccggacgccatgagcgacgtgcacgcgttccgcacgatgccggccgtcgggccggggagctacccggggcggatcgccgtggtcggggacctcgggctcacctacaacaccacctcgacggtggaccacttggtgcgcaaccgccccgacctggtgctcctcctcggcgacgtctgctacgccaacctgtacctgaccaacggcaccggggcggactgctactcctgcgccttcgccaagtccacgcccatccacgagacgtaccagccgcgctgggattactggggaaggtacatggagcccgtgacgtcgagcatcccgatgatggtggtggagggcaaccatgagatcgagcagcagatccacaacaggacgttcgcggcctacagctcgcggttcgcgttcccgtcggaggagagcgggtcctcctcgccgttctactactcgttcgacgccggcggcatccacttcgtcatgcttgcgtcctacgccgactacagcagatcaggtgcgcagtacaagtggctggaggcggacctggagaaggtggacaggtcggtgacgccatggctgatcgcgggctggcacgcgccctggtacaccacctacaaggctcactacagggaagccgagtgcatgagggtggagatggaggagctcctctacgcctacggtgtcgacgtcgtcttcaccggccacgtaagccttcggagtcggctgcttagtgcacgcgtacgagcggtcgaaccgggtgttcaactacacgctggacgcgtgcggccccgtgcacatctcggtgggcgacggcggcaaccgcgagaagatggcgacggcgcacgcggacgaggccggccactgcccggacccggcgtcgacgccggaccccttcatggggggccgcctctgcgccgccaacttcacgtcgggccccgccgcgggccgcttctgctgggaccgccagccggagtacagcgcgtacagggagagcagcttcgggcacggcgtcctggaggtcaggaacgacacgcacgcgctctggcggtggcaccgcaaccaggacctccatgccgccgccgccgccaacgtcgccgccgacgaggtctacatcgtcagggagcccgacaagtgcctcgccaagacggccagattgttggcctattgattgatccatcactcctagctactcctactctggtcgctgcctattgattgatccatcaatcctgttaattttcagaagagtttcagaagagtcttaatactcctagtcttaatagtcctagctatgcaaatatgcagtgttaatttgcggcagtaccagattaagcttccatccagattggcagcggtcaattcttgtccttggcacactactcgagatgaaataagctttaccttaaaaccaactgtttagatcggtgcaattataatttatagagaca

SEQ ID NO: 210347 - DNA, 1475 bp, Zea Mays
caggtactgtacgcgtagcctaggcaactgttcgccacgtagcaccacattgaccgtctggcccgcaactccccaccctttcccggccgctcgccttttctcctcttctccgatctctctccccctcttgaccgcccttgggatttggggggccctgggcaaattgcggtggccggggcccgccgccgcgacagctccgtccgtcctcggttccgctcttccgtccgatccatacgtttccgttccctataaattctttaaattcccgcaagtcccgtaccgctcagccaacccaacacgacggcgagtcgacggcgagtgggagggaacaccgcagcagcgatgcgtcggggctcgctttcgctgctgctgcttgcggcggtggcggcggtagcggccaccgcggttcccgccgagccggcgtcgacgctgtccgggccgtcgcggccggtgacggtggcgatcggagacaggggccacgcggtggacctgccggacacggacccgcgggtgcagcgccgcgtcacgggctgggcgcccgagcagatcgccgtcgcgctctccgcctcgcccacctccgcctgggtctcctggatcacaggggactaccagatgggcggcgccgtggagccgctggaccccggcgcggtgggcagcgtcgtgcggtacggcctccagaactacacctccggcatcatccaccacgtccgcctccagggcctggagcctgggaccaggtacttgtaccggtgcggcgacccggccatcccggacgccatgagcgacgtgcacgcgttccgcacgatgccggccgtcgggccggggagctacccggggcggatcgccgtggtcggggacctcgggctcacctacaacaccacctcgacggtggaccacttggtgcgcaaccgccccgacctggtgctcctcctcggcgacgtctgctacgccaacctgtacctgaccaacggcaccggggcggactgctactcctgcgccttcgccaagtccacgcccatccacgagacgtaccagccgcgctgggattactggggaaggtacatggagcccgtgacgtcgagcatcccgatgatggtggtggagggcaaccatgagatcgagcagcagatccacaacaggacgttcgcggcctacagctcgcggttcgcgttcccgtcggaggagagcgggtcctcctcgccgttctactactcgttcgacgccggcggcatccacttcgtcatgcttgcgtcctacgccgactacagcagatcaggtgcgcagtacaagtggctggaggcggacctggagaaggtggacaggtcggtgacgccatggctgatcgcgggctggcacgcgccctggtacaccacctacaaggctcactacagggaagccgagtgcatgagggtggagatggaggagctcctctacgcctacgactgacggatgatggtctgagactctaagctgag

SEQ ID NO: 210348 - DNA, 1775 bp, Zea Mays
cctcgtccgggggcccggtacggtaggcaaggtcgcaacgaagaaggacacattttttttagaacgttagaattgtaattatggttttttttcagacggggagagagttagccacgtcgctgtttgcagcagcagaaataatgtacacacccagaagtcactgtagctaaaaaaaagagaggaagagagagaaaaaaaaagaaaagcccgtgattgcgagccttccctttctagcctactgcctacccctcgtgtacggcagaaagggaacagcgcaatccgtcccaccaatggcgtgcctccacctcggccagccgccgccacgtcagcgcgtgatcggggaaatgcgcctcgccaccctgctctttctcgcgggagatctctcgcttcccttccctccgaacagtcgctcggcttcagctcgcccacgacgagaacgagacaaccccccgcatttcaaagcgtccttgggccgtgagcgtgaggaggcgccatggccagcgccggcgggcggcggcggtccaaggcgaagccgcgggcgagggccgggggcaaggcgaagaagaggaccaagtaccttagcctcaccgagctgctggttaaggcgcacgcgcaggtgggagcgtcgccacggtccccgtgggaggacgaggaggcggtggcggcggaagtgaagccggaggacgacgcctgcggtgacgacgacgacgaccaccaccaccaccaccacgaggcgtccaccctgttcgaggccgtgccggcgccgtcgctctccgacatcctgggcccgtcgccgcccgagtcgccggccggctccggctccggggcgctgccgggcgccgaggaggaggacctcccgcgccgcgcgctgcggggcagggccagggagcgctgggtgtactgcaccggcgggccttcgccgccaccgccagcgacggcaaccggcaccgccaccgccaccgcgtcgccgtgctcgtccgccgcgagcacgggcgcgtcgccgcgctcgctgctgctcaagctggactacgacgagatcctcgcggcgtgggcgggctgcgggccgctctacatcggcgccgccgtcagcccgcgtccggtcctcgcggacgctgaggtggctgtaggaagggcggagagggtgaggcggtacagggagaagcggcggcggcggcggctcttcttcgcgaggcgggtccggtacgaggttcgccggctcaacgccgtcaagcggccgcggttcaagggccgtttcattaaggaagaggaaagggagctccggcctgcgcctgcatagcctcctgccctgccctccttctcctttgcttcttccacggctgaagcattcattgagctgtctgtctgtctgtctgtctgatggtgttggtattgctgcttcaaagccagatacggcgagttccaacagctccaaattgatactattcaaacaatagtttggaagaaaagatgaaagttcctgacgtgcgccgccgctgccctcccgcctccgctccgaacgcacgcatcacgcaggcaacagaaagggggaaaaaaatcaagctgtggtacctgacggccagcggctcaacagttaaagaaatggtcaaccatgctagaggagctgcattgatgtatttttaatgagctattggagttgggtatgttttttaaagctttcaaacttttgaaggagcctaacatagagatattggaaaaaaataaattttaggagctgttagagatgcttatccagcagcaccactatcacctcccac

SEQ ID NO: 210349 - DNA, 1119 bp, Zea Mays
ggttggtttctttctctcctctctcctctcctctcctctccccgtggccacaccacagccgccggaagctcctcctcctcctcctccttctccatgagagagatctagcaaagcatagcctccttcctgctggcgggatctccttttgattcataacgaaagaggaggaggcacagcaccttgtcaaatgatgaactctcagaagctgcagctgcccgttcaggatctgatgagtctgagagggagatcattcatcatcagcaaggttgctgcccatcccagttccagcaggaggcggcgtcctcgtggcctcgttgccgcggccggcagtgacgacgacgaatgcgcttcagctggtggtgagtccgagtcgtcgtcgtcgggcgggaaagacgatggcggcggcggcttgtcccgagaggatctggaacgcctggtcgggagtgacgaagatgccaagttcaatgggttggatcttgcaaacctcatcaggaagaagtacggtagatcgtacgatgtgacgctgataaagaaagagttcatggggaggaatctgctggccatgaatgtgatgtggaagtacagggagcaaagatcgttcccgctgagcgaggaggagtacctgctgcggctggacgatgtcgccaacacgctcaagtgctggggagccgtggcgcacgtgcgcaacacgctggagaagctcaaggagaggccgcgcatcggcaaggccgtcagcatcttcatcgacatggaccagaccggaggccgctccaacgaatggatttacaagtagcttcccactccatcgatcatgtatatgcatccatcgcccccatgaacaaacacattcatcaggtgtatggagaatgaatgtgggtaccaatttcatctccaacaatcaagcacatcgcaaagatcataccatcacatgatcttattgattcttagatcgcacctaagcatgtctcttgatattctcacatatgacaccatgcatgtatacaacgagctccttcatcaatactagttaagtattgcaatacgtccaagccgcatcaccaccatggctcatattgctcacactagtgtattatggactaatcatctctttatctgaac

SEQ ID NO: 210350 - DNA, 1125 bp, Zea Mays
ggttggtttctttctctcctctctcctctcctctcctctccccgtggccacaccacagccgccggaagctcctcctcctcctcctccttctccatgagagagatctagcaaagcatagcctccttcctgctggcgggatctccttttgattcgtaacttataacgaaagaggaggaggcacagcaccttgtcaaatgatgaactctcagaagctgcagctgcccgttcaggatctgatgagtctgagagggagatcattcatcatcagcaaggttgctgcccatcccagttccagcaggaggcggcgtcctcgtggcctcgttgccgcggccggcagtgacgacgacgaatgcgcttcagctggtggtgagtccgagtcgtcgtcgtcgggcgggaaagacgatggcggcggcggcttgtcccgagaggatctggaacgcctggtcgggagtgacgaagatgccaagttcaatgggttggatcttgcaaacctcatcaggaagaagtacggtagatcgtacgatgtgacgctgataaagaagagttcatggggaggaatctgctggccatgaatgtgatgtggaagtacagggagcaaagatcgttcccgctgagcgaggaggagtacctgctgcggctggacgatgtcgccaacacgctcaagtgctggggagccgtggcgcacgtgcgcaacacgctggagaagctcaaggagaggccgcgcatcggcaaggccgtcagcatcttcatcgacatggaccagaccggaggccgctccaacgaatggatttacaagtagcttcccactccatcgatcatgtatatgcatccatcgcccccatgaacaaacacattcatcaggtgtatggagaatgaatgtgggtaccaatttcatctccaacaatcaagcacatcgcaaagatcataccatcacatgatcttattgattcttagatcgcacctaagcatgtctcttgatattctcacatatgacaccatgcatgtatacaacgagctccttcatcaatactagttaagtattgcaatacgtccaagccgcatcaccaccatggctcatattgctcacactagtgtattatggactaatcatctctttatctgaac

SEQ ID NO: 210351 - DNA, 1126 bp, Zea Mays
ggttggtttctttctctcctctctcctctcctctcctctccccgtggccacaccacagccgccggaagctcctcctcctcctcctccttctccatgagagagatctagcaaagcatagcctccttcctgctggcgggatctccttttgattcgtaacttataacgaaagaggaggaggcacagcaccttgtcaaatgatgaactctcagaagctgcagctgcccgttcaggatctgatgagtctgagagggagatcattcatcatcagcaaggttgctgcccatcccagttccagcaggaggcggcgtcctcgtggcctcgttgccgcggccggcagtgacgacgacgaatgcgcttcagctggtggtgagtccgagtcgtcgtcgtcgggcgggaaagacgatggcggcggcggcttgtcccgagaggatctggaacgcctggtcgggagtgacgaagatgccaagttcaatgggttggatcttgcaaacctcatcaggaagaagtacggtagatcgtacgatgtgacgctgataaagaaagagttcatggggaggaatctgctggccatgaatgtgatgtggaagtacagggagcaaagatcgttcccgctgagcgaggaggagtacctgctgcggctggacgatgtcgccaacacgctcaagtgctggggagccgtggcgcacgtgcgcaacacgctggagaagctcaaggagaggccgcgcatcggcaaggccgtcagcatcttcatcgacatggaccagaccggaggccgctccaacgaatggatttacaagtagcttcccactccatcgatcatgtatatgcatccatcgcccccatgaacaaacacattcatcaggtgtatggagaatgaatgtgggtaccaatttcatctccaacaatcaagcacatcgcaaagatcataccatcacatgatcttattgattcttagatcgcacctaagcatgtctcttgatattctcacatatgacaccatgcatgtatacaacgagctccttcatcaatactagttaagtattgcaatacgtccaagccgcatcaccaccatggctcatattgctcacactagtgtattatggactaatcatctctttatctgaac

SEQ ID NO: 210352 - DNA, 1310 bp, Zea Mays
gcgctcccggtctcggactctaggctcgctccagtttccgcctggctccaccaacaaaaaccaacgctccccctgcccccctctttcctccccagacccgcgctcccctccgtggcgtgcaacgcgttcctcggctcctgcaggcggcgacctcggaaaggcgggggcgtctcgtcgcgaggcatttgaggccaggattttttggtgctctcattgttagctgactggtgagggtctggatctagcaatggcggaaaacacccacggtagtggtcgccacgtgcttggggacttgacaaatgttatttgcaagcgagcagccacatcagatctggagaagagtacaggtgggataaagatcagacggattgaaaagactgggactaggaaagagtacgatgcaaatgcaaaagctagcagtattgggaaaggaattgtatttggccatttgtttgatgatgttgccagagagaaatttcaaagccattctatctttcagaatagtagggttcaacacatagctgccgaagcagctggactcttatccaaggaagccaatgactcgaagaaccactatgcatcaatcggtccattagatctcagtgataaggagcaggattcttcacttgaatctgaagacgactatgatgatgaagataatgatgagacgaatggtgaattgctgcaccattttttcagctcagagctagctaataaaatgtcaacaaatgatggtgagtgcttgactcaggaggagatagttgggtcatctggaaatcagaaacctctgtcttcattggatgctacgacaggtggtgacttgccaatttctagtgctcagcatgcttctgtgagaactggtggtttggaagaagctgttgccccaaaatcttgtgcttgttctttctgtctcaaggctgcttttatgtggatggatctccattatcaggatgcaagaagccggctttctgtattgaagaaaagcatcaagtttgccaggtcattggaggaaaaatgtagaggaaatgaatatgcggccaatgtagctggatatgaatcaaagcgagctgtgggagtggagtttgaactatctcaacaacagagatcactctttctttatacagaaaatgcccttgtccttgccatcaatatgcacctgtgattatagcataaaacaatgtgcgtggcagtctgttgagcacacatctgctttcacatgttgatatggtttgattgctagaaggatcatggctctaagagaatgatctgtaataattggaattcatgtattctctgcttgtggtgttaaa

SEQ ID NO: 210353 - DNA, 1431 bp, Zea Mays
gtgctcgcgcccccctcccttcccctggcatttgaggccaggattttttggtgctctcattgttagctgactggtgagggtctggatctagcaatggcggaaaacacccacggtagtggtcgccacgtgcttggggacttgacaaatgttatttgcaagcgagcagccacatcagatctggagaagagtacaggtgggataaagatcagacggattgaaaagactgggactaggaaagagtacgatgcaaatgcaaaagctagcagtattgggaaaggaattgtatttggccatttgtttgatgatgttgccagagagaaatttcaaagccattctatctttcagaatagtagggttcaacacatagctgccgaagcagctggactcttatccaaggaagccaatgactcgaagaaccactatgcatcaatcggtccattagatctcagtgataaggagcaggattcttcacttgaatctgaagacgactatgatgatgaagataatgatgagacgaatggtgaattgctgcaccattttttcagctcagagctagctaataaaatgtcaacaaatgatggtgagtgcttgactcaggaggagatagttgggtcatctggaaatcagaaacctctgtcttcattggatgctacgacaggtggtgacttgccaatttctagtgctcagcatgcttctgtgagaactggtggtttggaagaagctgttgccccaaaatcttgtgcttgttctttctgtctcaaggctgcttttatgtggatggatctccattatcaggatgcaagaagccggctttctgtattgaagaaaagcatcaagtttgccaggtcattggaggaaaaatgtagaggaaatgaatatgcggccaatgtagctggatatgaatcaaagcgagctgtgggagtggagtttgaactatctcaacaacagagatcactctttctttatacagaaaatgcccttgtccgtgagtcaacgcagcttcattctgcttttgtgaaactgaaagaattgagagagaactgcaagacagatcttgagacgctcagcaattcttcaatgagaaaatgagtgctgcatgttgcgttgctgaactgttagtttcctgagacttagtatgatcagctggcttgtcttgaagcaagatgtgctgagattgaaccacaacttaggaattatggtgcttaccatcaatttgggacttcaatttggctgtagtgattattcctatcataaagcgttggtctagtatgcttgtagctgatgtaaaaataaccatggtaaggtaggaactgtatgtttgtctcgttgaggcatcgtcatcttcacttgtaccttgcagtgagcttccttcatatgaacattctttccacgttctccaaacaaaagggaaaaccatatcgtttcgtgctt

SEQ ID NO: 210354 - DNA, 1426 bp, Zea Mays
attttagcctttaggcataagggcatttgaggccaggattttttggtgctctcattgttagctgactggtgagggtctggatctagcaatggcggaaaacacccacggtagtggtcgccacgtgcttggggacttgacaaatgttatttgcaagcgagcagccacatcagatctggagaagagtacaggtgggataaagatcagacggattgaaaagactgggactaggaaagagtacgatgcaaatgcaaaagctagcagtattgggaaaggaattgtatttggccatttgtttgatgatgttgccagagagaaatttcaaagccattctatctttcagaatagtagggttcaacacatagctgccgaagcagctggactcttatccaaggaagccaatgactcgaagaaccactatgcatcaatcggtccattagatctcagtgataaggagcaggattcttcacttgaatctgaagacgactatgatgatgaagataatgatgagacgaatggtgaattgctgcaccattttttcagctcagagctagctaataaaatgtcaacaaatgatggtgagtgcttgactcaggaggagatagttgggtcatctggaaatcagaaacctctgtcttcattggatgctacgacaggtggtgacttgccaatttctagtgctcagcatgcttctgtgagaactggtggtttggaagaagctgttgccccaaaatcttgtgcttgttctttctgtctcaaggctgcttttatgtggatggatctccattatcaggatgcaagaagccggctttctgtattgaagaaaagcatcaagtttgccaggtcattggaggaaaaatgtagaggaaatgaatatgcggccaatgtagctggatatgaatcaaagcgagctgtgggagtggagtttgaactatctcaacaacagagatcactctttctttatacagaaaatgcccttgtccgtgagtcaacgcagcttcattctgcttttgtgaaactgaaagaattgagagagaactgcaagacagatcttgagacgctcagcaattcttcaatgagaaaatgagtgctgcatgttgcgttgctgaactgttagtttcctgagacttagtatgatcagctggcttgtcttgaagcaagatgtgctgagattgaaccacaacttaggaattatggtgcttaccatcaatttgggacttcaatttggctgtagtgattattcctatcataaagcgttggtctagtatgcttgtagctgatgtaaaaataaccatggtaaggtaggaactgtatgtttgtctcgttgaggcatcgtcatcttcacttgtaccttgcagtgagcttccttcatatgaacattctttccacgttctccaaacaaaagggaaaaccatatcgtttcgtgctt

SEQ ID NO: 210355 - DNA, 461 bp, Zea Mays
agagttgacacccaatagaaaacacaagttggcattctgcttttgtgaaactgaaagaattgagagagaactgcaagacagatcttgagacgctcagcaattcttcaatgagaaaatgagtgctgcatgttgcgttgctgaactgttagtttcctgagacttagtatgatcagctggcttgtcttgaagcaagatgtgctgagattgaaccacaacttaggaattatggtgcttaccatcaatttgggacttcaatttggctgtagtgattattcctatcataaagcgttggtctagtatgcttgtagctgatgtaaaaataaccatggtaaggtaggaactgtatgtttgtctcgttgaggcatcgtcatcttcacttgtaccttgcagtgagcttccttcatatgaacattctttccacgttctccaaacaaaagggaaaaccatatcgtttcgtgctt

SEQ ID NO: 210356 - DNA, 1565 bp, Zea Mays
ctaccggattctcgtcgccgcaatcgcctgcttcgcgctcactgcgctcttcttcgcgcctttcgtctggacacgcctcaacgcgccgtacctgtgccgcaaggaggggattcggctccactgccccagggtgaggcagcgggactctctgtgggagaatcctcatgctgcagcaacttggtggaagccgtgtgctgagcgtcagagtcatgaagtctcagacctcgtgtcagagaatgaaacttctgggtttatatttattcatgccgagggtggattaaaccagcaacgtatagctatatgtaatgctgttgcaattgctaagataatgaatgccacacttattctgccagtgctaaagcaggaccaaatatggaaagatcaaacgaaattcgaagacatctttgatgtagaccattttataaattatttgaaggaggatgtgcgcattgttcgagatattcctgactggtttacagaaaaggatgagcttttcactagtataaaatatgataatgttccaatggagattaaccgactgaggtgccgagttaattatcatgctttgaagtttctacctgacattgaagagatggctgacaagctagcaacaaggatgaggaatcgaacaggaagtttaaatccatacatggctcttcatttgcgatttgagaaaggaatggtgggcctttcattttgtgattttgctggaactagggaggagaaagctatgatggctacttacagacagcagcaatggccaaggcggtacaagaatggatctcacttatggtcactagcactagaaaagagaaaagaaggccgctgtccgcttgagccgggggaaataggaattattttgcgtgagatggggtatactaaggaaactcagatatatgttgcatcagggcaggtgtatggtggaaacaacagaatggcacccttgagaaatatgttccccaatctggttagcaaagaagatcttgctagcaaggaggagatggagcctttcaagaagcatgtaactagtcttgctgcactggacttcttggtgtgcctgaagtcggatgtgttcgtcatgacccacggtggcaatttcgccaagctgatcatcggctaccgccgctacatgggccgccacaggctcaagtcaatcaagccagacaagggtctcatgtccaagttcttcggggacccttacatgccttgggcgactttcgtggagaacgtgatgatcacccatgagacacgaaccgggctccccgaatccaccttcccacactatgacctatgggagaaccctctcaccccttgcatgtgtagagcttaaattatagactacgagtgatggtgcatagttattctttgttcatttgctgatatgcaaactgcaaattttgtgtagttttttaccactttttgatgtacgatttttttttaccaaagcaaagttcagttcatgcacaatcctcggcacggatacattgccatccactcattcggagcagcagaagcgccgcctgatcctgtcgtcgttaaggctatctccaaccctttgccctctc

SEQ ID NO: 210357 - DNA, 1812 bp, Zea Mays
gccgttcactctctgccgtgcgcttggaccgatcagcccgggcagccgctcgtcgtccactggtcccgctcagagcagctccaaacaaaaccaaacgcggacgggactgggcgggaccgcgggagggacaagacaacccatgcatggccggtccgatggagcgagagggacgagacgcagccgagaagcccctcttggtaagggtgggcggcagcggtggtagccagggcggcagcgcctcctcttcttcggttgccgtggtggtcggctgcaccgccatcgccgtcgccggctccttcgagttcggaatgtcgatcggctactcgtcaccgactcagctgggcatcatgcgcgatctccgcctctcgttagctgagtactctgtgtttggctcgatcctgaccatcggagcgatgctgggtgccattgtcagtggatctgtagccgatcgagcaggtcgaagaggtgcaatggcgatatcggatgttctctgcgctcttgggtatctcctgataggattttcccagagctattggtggcttgacatcggaagggtgctgatcggatgcggaatcgggattctgtcatatgtggttccggtctacatatcagagataacgccaaaggaccttagaggaggctttgcaactgtaaaccagttcatgatttgctgcggagggtcgcttgcatttgttcttgggacatttatcgcctggcgcaccttggcgatcgttggagtggtgccgtgtttagtgcagctggttggccttcttttgattcccgagtcccccagatggctggctaggtttggacacccaggtgcctttacaggagcactgcagacgctaaggggacatggaaccgatatctctgaagaggcctcagaaataaaagttttcacagaaaagcttcagcgccttccgaagtcgaagatgttagacctgtttcagaaggagtacatccgtgctgtcatagctggagttgggctcatggccctccagcagcttgggggtgtcaatggcgttctcttctacgccagtgaagtgttcgtctcggccggtttctcgtcgggaaacacgggaacagtggccatggcggtagtgcaggttccgatggtcggactaggggtgcttctgatggacaaggctggaaggaggccactgttgatgatctctgcagctgggacatgcgtgggttgcctgctagttggtctgtcattcttgtccaaggagcagcactgggaaagggacctgaacgtgttggctttggccggacttctggttttcatcggatccttttcactgggtatgggcgggataccatgggttataatgtcagagattttccctataaacatgaaagggtcggcagggagccttgtgaccttagtaagttggctcgggtcgtggattgtctcgtacgccttcaacttcctgctgatttggagttcttacggcaccttcttcatcttcgcggccatttgcggactcacggtcgtgtttgtgcatcggctagtgccggaaaccaaaggaagaaccctggaggagatccaagcctctatgaactcgtccttgacacccttccacaagtattagtttgcttgcatagttgattagtgtcacagatacggttcattgtatacaaagagagacatacaaatacatgtcatttctccataatactactatctcattattatacagtgttttaaatagcgggaaaatgaatttatcctcaatcttctaaaaagtgcaaatatcgggatatatcgcgatatagctggatatatcggaatatatcgggttaaacggc

SEQ ID NO: 210358 - DNA, 3782 bp, Zea Mays
attaaaaggtaatctaataatgaagtgaaaacaacgatttcagttcatggatccaaacaagtcatcagatttgtccaaaccaagaaactccaaacaagtactactacacatataataaaaaaaagttattaaagatttgacctcgggtaaacacagccctcgatggctagatgtttggatgcaaagacgtgcatgtgcggatgtaccatgtagtgaatcacgtacaaaacgcgtactcatagatgcatcatgcatgaacggatgccgcagtttttgggcgctccgatgtgggctggaatgggccgcccaaactggtctgtcacgtgactttggttgggctaccgttggatccgcaacgacgagccgtggtgactgcgcaacaacgtccgagggagcgagcgagagcggtccctggtgtgcggaacactctgtcagcatggccgccgccctctgcctgcagcgccagagcctcgccgccaacccctttctcttctccgcccatggcctccgctaccgcaagctcgaggtcatcctcactacgaacattgacgggttagacgggattgacaatcacgagcctattaagacaaaggataagaaattttacgagagatctgaacactagctttatcaaactcctcaacgaattaaaggctacctgaatctgagttaggaagcatcgagagatcacagttatagtcaaatactattcttttctcagatatcgctttcaagaagaagaaaaaaacaccgagcacacttcaaaattcgctttggcaaacatctcggatggtaactcgtgagaagacttaacaccggtcaagctccactagttttgagcatgcatggcggtggtctctccagtctccccgtgatataaattctccagtctccagtctccactcgttgtttccatgcatcgaagaaaaaacaggaggagaatacgtctgatttggcaagtcttgttggccgcagcgacgaccgtaacatcagatgctactgtcgtccttctccttccactagctagcagaatgctagctcgccccacgcaactgcaagtgagattttttttttgttttttgttttcttctggcgcgcgctagctgttacagtctctcagcatataaattaattaaactagtatatgtagacacacacagcacacaggaaagcacaccatcttctgtctccataaacaagctacctgcagcgatgtgctccactgcagtgctgctagttcgcacatgcgttgtgcttgtgtgtttggccgccatggcgcgagcgccggccaaggtccatgctgccgccggcaccggggatgggctccttgttatccctaccaccgcctccctgtcgcactgcccctctcgctgcggggatgtacaaatctcgtacccgttcgggatagggccgggctgcttccgtcaaggcttcgagctcacctgcgatcaaacagctccttctcccaggctcttcttcatgtcggggaacagctcgattcaggtgacttctctagatgtcggcaacaatatgggttgggcttcagctgttgggttcaacgtcaccatgagcgcaggcgtggacacctacaccaagtcttgggaggcccctactgccactggtgccagtttttatgcagataataataataatctgtacactgttggatgtggtgtctacgtctacgtgttgggtgataatatgacagatatcattggttattgcacgagtatttgcacagataacagagagatcatggagagcgcaaacactggttatggtgtctgtgaagggttaggctgctgcagcattccaatacgtggccgccaaggcttcactctcaaactaggtcgcctcaatagtaccattccacagttcggtgaagcgctatccagtgtcaagattatcgtttcgcaaaactataaattcgttactgatgatgtttacgcaagttgggtgaatacaagcaacgttaatgaaatgatattttacattacaatcatggaccaaccgaactgcgcgagtgcccagtcccaagagaacaaggatacctacgcatgcactagtgaaagcatctgctacgacgttctaccaccggcagtatctcaaggaggctacatttgcaagtgttcccatggcttacaaggaaacccataccttcaaaataactgtacagatattgatgagtgcactattccaaataaatgcaatggaatatgccacaattttaatggaggcttcaattgtacaagttgccctcatgggaaagagtatgatccaaaaaaacaaaaatgtgtcatgtcagctaagcagtgtattctaatttttgggattgtaattgggcttgtttgtggccttggatccataagttttgcacttggtgcaattgtactcaccggtaagtggaaaaaaggcatccaaaggagaattcgaagagagtacttcaagaaaaatcaaggtctactcttggagcaactaatatcgaatgaaaatgctacaaccaaaacaaagatattcactttggatgaactagaggaagcaaccaacaagtttgatgctactcgtgttctaggtcatggtgggcacggcactgtttacaaagggattttgtctgatcagcgtgtcgtggctataaaaaaatctaaaatagtggagcaaatagagatagatcagttcatcaatgaggttgctattttatctcaaatcattcaccgcaatgtggtgaagctttttggttgttgcctagaagatgaggtacccttgctagtgtatgagttcatatcgaatggcactttgtatgacattcttcatgaaaatattgcaacaaaatgcttgttgtcattggatgatcgaattaggattgcaacggaagcatcaggagcacttgcttatctacactcagctgctgcaataccaattttccatagagatgtgaagtcttctaatatactcttggacgacaacttcactgtaaaggtttcagattttggtgcttcaagatctctatcccttgatgaaacacatgtggtgacaattgtccaagggacattcggttatttagatccagagtattattatactggttctctaactgagaagagcgatgtgtatagttttggagtgatacttgtggaacttttgacaagaaagaaaccaatttttatcaatgaatcgggtgccaaacaaaacttatctcattacttcattgaaggactacaggaagggactctcatggaaataatagattctcaagttgtggaagaggcagaccaagaagagattaatgatatctcctcacttatagaagtgtgcttaagatccaaaggaggacatagaccaagcatgaaagaagtagatatgagattgcaatgtctaagaacaaagaggctacggaataaaacacatcttttgattgaaaagggtggagaaatggaacctttgttatgcgcagaagctcagcacccacatgaacgtatcaatccaatttataatgaggaacatttaataattccagtgatgtctgggtgctacagtttggagcaagaacttgcggcagcatctagtatggttcgctaacttggtatttgcttggatgttggacacatctatagtaaccatctattttcagagaggaactatggtatattttgttcccttcgcataagactatggtatatatggtgcgtatatgtatataatatatatgacattgctatgtttacatataatgtaatttccgtatttcaaactgtaatgcgttttagttttgttttgattacaaa

SEQ ID NO: 210359 - DNA, 3441 bp, Zea Mays
ggcgaaccgggcgattggtttccttctcggactcttcgtcgtcttctccgatctccccttcctccctcgctctctcccgcccccgtggtccaaaccctaacaaacagcaatcaagcggaacccctgcaatcgtaatcggttcgctgcctaatcccctccctttctcatctcatgaccatgccggcctcgtccccctccgttggcagcgcctgtgacccaccgccgccgccgcctccgccgccgccgcgggctatgaagcgcgagctcgccttcgcgctccagtccctgtccgagatctctgcctcccacggccgcacgcgctccggccgccccatctcttcccttccagacccatcggcatcagcatctctcaagaggcgcaagagatctgacccgcccgcccctgcccccgcccccgcccctgcccccgcagccgatctcgtctccccgcccacgccgcctatcgacgccgagccgcctaaccagcccctccgtgacatcatccaaccgctacatggatctaatcctcccaccgcctctgaccaccgattcgattccaatgccgatcaagaggtcttggcaatggaagtgattgcaaagccgaatctgcccgcagaagaggatattgcagcagatgactcggcaatggaagtgactgcaaagtcgaatgtggctgcagcggatggtgtatcaaagccgaatgtttccgcagaggatactgcatcaaagtcaaatgtggccgctactgtagcagtagcaccaactctgttggaaactgccattgcagctggaaatgaccagtgtgatacctcaaactcaaatggagaaaatctacagcagcaagccgtggaaaatgtattagtctccaccactatgttagctgaggacactgtcacacctgcagctgctgccgggctcaagcctgcaaggcgcttcactcgatcgttgctcaagaataataaaccagataaagaagagtctgcatcttgtgaaagtcaggcaacaccagatggtagcaaggatgcctcagttggttttactttgctcctggagaagcctcagagaaggttcacaaggtcgttgctcaagacaaaggttgagagcagtttggttggatctgatgatgtgctggacagtgcatctgattcccctccatcagtgaagaagatggagatgaagatgtcaaagaaagttgcatgtctcacgaagcaccctggaaacattagagagctgctcaacacaggcatgcttgaggggatgccagttatgtacatcattcctcatagcaagaaggctgtcctaaaaggagtgattactggttgcaatatacgttgcttttgcctgtcctgtaatggcgccaagatctcccttggaggctctggaagaaacgattcgttcctccattgatccagtagttaaaaggagccgcattaattgtctgaattgcaatgagcttgttcttccgtcatcacatgaaaatgtactgtgtcaagtttgcctcgagtcaaagcaacctcaagatcctcttactgcatcgtatacatgtaatggcagttcgagtctgagtcgaagttccaaggaggctttgctaaggaacatatcatcaggcaagaagggtgggagtgccggcaaagtaacaaacaaggataacagactacacaaattggtctttaatgttctgcttgatggcacagaagtagcttactatgttgatgggcagagaaaggttgatgggtatatcaaggatcatagaatctactgtaatcactgcaacagagtggttagcccatcagcatttgaagctcatgcaggtgagggatcaaggcgcaaaccgtatgataacatattcacatcaaacggagtatcattgcatgagctggcgatgaaaatatcaaaggatatggaactgtcagaacgcgagacagatgatctgtgcagagaatgtggtcaggggggagacattttcccgtgcaaaatctgtccaaggtcatttcatccagcttgcgttggactgtctaaagtccccgcagaatggtattgtgatagttgtcgcaatcttgtgcaaaaagaaaaggctttagcaaagaacaaaaatgctaaagctgctgggaggcaagctggagttgattccattgaacagataatgaagagagctatacgaattgtccccatctctgatgatcttggaggctgtgctctgtgcaaacagaaagatttcaacaatgctgtgtttgatgagcgcactgtgatactctgtgaccaatgtgagaaagagtatcatgtaggatgcttgcagagtcaatggcaagtagaactaaaggaattgcccgaggaggagtggttctgttgcagtagttgctctgagacacgatcatcattggacaagataatctccgatggagctcaactgttggcggacccagatcttgaaatcataaagaagaaacatgagacacgaggtttatgcatggacaccagtaaagatctcaaatggcaattactttctggtaaaagggctactgaagacggaagcatattgctctctgctgcagtgccaatttttcatcaatcttttgatccaatccgtgaagctctcactggtagagatctgattcctgagatggttaacgggaggggacctaaggagggaatgcccgggcaagattacagtggaatgtactgcgcactgttaactgtgggctctaccgtggtgtcagcagcacttttgcgtgtgatgggaggtgatgtggccgagctgccactagttgctacaagccaggatgttcaagggctgggctacttccaagccttgttctcgtgcatagagagggtgctagtctcactgaagatcaagcactttgtgcttccagctgcacatgaagctgaagggatctggatgaacaaatttggcttctctagaatctctcccgaagagctggaagcttatcttaatggggcgcacttgactatattccatggaacgtcatacatgtacaaggctgttccagtgtcataattgatgggatagaagagatatgggtgatttcgtctgtcttttggggggtgggggtccgctcgctattgtgatgtacagagagagttgataaggaagcaaagcatggcaaagacaatgtacaggagctggaagccaaggcgaagcatcggatgaatctaaatgaatgaattccccttggtttgtttactcttgaatcgaaggaagcctgtctttttttggtgtgatatactagactagatgcaatgcaattgaaggagtcgcaccgagtcctggtactagagccagattttttgcaatttaaattttgactctgaaactgctaccagagctgctgtgcattcttctctttctgcatacaatttaaaagttgcaaatgacaccgtcatgtgtgacgtatcattcattagaggcggaggcacgtgcgc

SEQ ID NO: 210360 - DNA, 3499 bp, Zea Mays
ggcgaaccgggcgattggtttccttctcggactcttcgtcgtcttctccgatctccccttcctccctcgctctctcccgcccccgtggtccaaaccctaacaaacagcaatcaagcggaacccctgcaatcgtaatcggttcgctgcctaatcccctccctttctcatctcatgaccatgccggcctcgtccccctccgttggcagcgcctgtgacccaccgccgccgccgcctccgccgccgccgcgggctatgaagcgcgagctcgccttcgcgctccagtccctgtccgagatctctgcctcccacggccgcacgcgctccggccgccccatctcttcccttccagacccatcggcatcagcatctctcaagaggcgcaagagatctgacccgcccgcccctgcccccgcccccgcccctgcccccgcagccgatctcgtctccccgcccacgccgcctatcgacgccgagccgcctaaccagcccctccgtgacatcatccaaccgctacatggatctaatcctcccaccgcctctgaccaccgattcgattccaatgccgatcaagaggtcttggcaatggaagtgattgcaaagccgaatctgcccgcagaagaggatattgcagcagatgactcggcaatggaagtgactgcaaagtcgaatgtggctgcagcggatggtgtatcaaagccgaatgtttccgcagaggatactgcatcaaagtcaaatgtggccgctactgtagcagtagcaccaactctgttggaaactgccattgcagctggaaatgaccagtgtgatacctcaaactcaaatggagaaaatctacagcagcaagccgtggaaaatgtattagtctccaccactatgttagctgaggacactgtcacacctgcagctgctgccgggctcaagcctgcaaggcgcttcactcgatcgttgctcaagaataataaaccagataaagaagagtctgcatcttgtgaaagtcaggcaacaccagatggtagcaaggatgcctcagttggttttactttgctcctggagaagcctcagagaaggttcacaaggtcgttgctcaagacaaaggttgagagcagtttggttggatctgatgatgtgctggacagtgcatctgattcccctccatcagtgaagaagatggagatgaagatgtcaaagaaagttgcatgtctcacgaagcaccctggaaacattagagagctgctcaacacaggcatgcttgaggggatgccagttatgtacatcattcctcatagcaagaaggctgtcctaaaaggagtgattactggttgcaatatacgttgcttttgcctgtcctgtaatggcgccaaggccatttcagcttattactttgaacaacatgctggaagcaccaaaaaacaccctgctgattacatttacttagggaatggcaatagtttgcgtgacgtgctacgtgcatctgacagatctcccttggaggctctggaagaaacgattcgttcctccattgatccagtagttaaaaggagccgcattaattgtctgaattgcaatgagcttgttcttccgtcatcacatgaaaatgtactgtgtcaagtttgcctcgagtcaaagcaacctcaagatcctcttactgcatcgtatacatgtaatggcagttcgagtctgagtcgaagttccaaggaggctttgctaaggaacatatcatcaggcaagaagggtgggagtgccggcaaagtaacaaacaaggataacagactacacaaattggtctttaatgttctgcttgatggcacagaagtagcttactatgttgatgggcagagaaaggttgatgggtatatcaaggatcatagaatctactgtaatcactgcaacagagtggttagcccatcagcatttgaagctcatgcaggtgagggatcaaggcgcaaaccgtatgataacatattcacatcaaacggagtatcattgcatgagctggcgatgaaaatatcaaaggatatggaactgtcagaacgcgagacagatgatctgtgcagagaatgtggtcaggggggagacattttcccgtgcaaaatctgtccaaggtcatttcatccagcttgcgttggactgtctaaagtccccgcagaatggtattgtgatagttgtcgcaatcttgtgcaaaaagaaaaggctttagcaaagaacaaaaatgctaaagctgctgggaggcaagctggagttgattccattgaacagataatgaagagagctatacgaattgtccccatctctgatgatcttggaggctgtgctctgtgcaatgtgagaaagagtatcatgtaggatgcttgcagagtcaatggcaagtagaactaaaggaattgcccgaggaggagtggttctgttgcagtagttgctctgagacacgatcatcattggacaagataatctccgatggagctcaactgttggcggacccagatcttgaaatcataaagaagaaacatgagacacgaggtttatgcatggacaccagtaaagatctcaaatggcaattactttctggtaaaagggctactgaagacggaagcatattgctctctgctgcagtgccaatttttcatcaatcttttgatccaatccgtgaagctctcactggtagagatctgattcctgagatggttaacgggaggggacctaaggagggaatgcccgggcaagattacagtggaatgtactgcgcactgttaactgtgggctctaccgtggtgtcagcagcacttttgcgtgtgatgggaggtgatgtggccgagctgccactagttgctacaagccaggatgttcaagggctgggctacttccaagccttgttctcgtgcatagagagggtgctagtctcactgaagatcaagcactttgtgcttccagctgcacatgaagctgaagggatctggatgaacaaatttggcttctctagaatctctcccgaagagctggaagcttatcttaatggggcgcacttgactatattccatggaacgtcatacatgtacaaggctgttccagtgtcataattgatgggatagaagagatatgggtgatttcgtctgtcttttggggggtgggggtccgctcgctattgtgatgtacagagagagttgataaggaagcaaagcatggcaaagacaatgtacaggagctggaagccaaggcgaagcatcggatgaatctaaatgaatgaattccccttggtttgtttactcttgaatcgaaggaagcctgtctttttttggtgtgatatactagactagatgcaatgcaattgaaggagtcgcaccgagtcctggtactagagccagattttttgcaatttaaattttgactctgaaactgctaccagagctgctgtgcattcttctctttctgcatacaatttaaaagttgcaaatgacaccgtcatgtgtgacgtatcattcattagaggcggaggcacgtgcgc

SEQ ID NO: 210361 - DNA, 3563 bp, Zea Mays
ggcgaaccgggcgattggtttccttctcggactcttcgtcgtcttctccgatctccccttcctccctcgctctctcccgcccccgtggtccaaaccctaacaaacagcaatcaagcggaacccctgcaatcgtaatcggttcgctgcctaatcccctccctttctcatctcatgaccatgccggcctcgtccccctccgttggcagcgcctgtgacccaccgccgccgccgcctccgccgccgccgcgggctatgaagcgcgagctcgccttcgcgctccagtccctgtccgagatctctgcctcccacggccgcacgcgctccggccgccccatctcttcccttccagacccatcggcatcagcatctctcaagaggcgcaagagatctgacccgcccgcccctgcccccgcccccgcccctgcccccgcagccgatctcgtctccccgcccacgccgcctatcgacgccgagccgcctaaccagcccctccgtgacatcatccaaccgctacatggatctaatcctcccaccgcctctgaccaccgattcgattccaatgccgatcaagaggtcttggcaatggaagtgattgcaaagccgaatctgcccgcagaagaggatattgcagcagatgactcggcaatggaagtgactgcaaagtcgaatgtggctgcagcggatggtgtatcaaagccgaatgtttccgcagaggatactgcatcaaagtcaaatgtggccgctactgtagcagtagcaccaactctgttggaaactgccattgcagctggaaatgaccagtgtgatacctcaaactcaaatggagaaaatctacagcagcaagccgtggaaaatgtattagtctccaccactatgttagctgaggacactgtcacacctgcagctgctgccgggctcaagcctgcaaggcgcttcactcgatcgttgctcaagaataataaaccagataaagaagagtctgcatcttgtgaaagtcaggcaacaccagatggtagcaaggatgcctcagttggttttactttgctcctggagaagcctcagagaaggttcacaaggtcgttgctcaagacaaaggttgagagcagtttggttggatctgatgatgtgctggacagtgcatctgattcccctccatcagtgaagaagatggagatgaagatgtcaaagaaagttgcatgtctcacgaagcaccctggaaacattagagagctgctcaacacaggcatgcttgaggggatgccagttatgtacatcattcctcatagcaagttgcagaaggctgtcctaaaaggagtgattactggttgcaatatacgttgcttttgcctgtcctgtaatggcgccaaggccatttcagcttattactttgaacaacatgctggaagcaccaaaaaacaccctgctgattacatttacttagggaatggcaatagtttgcgtgacgtgctacgtgcatctgacagatctcccttggaggctctggaagaaacgattcgttcctccattgatccagtagttaaaaggagccgcattaattgtctgaattgcaatgagcttgttcttccgtcatcacatgaaaatgtactgtgtcaagtttgcctcgagtcaaagcaacctcaagatcctcttactgcatcgtatacatgtaatggcagttcgagtctgagtcgaagttccaaggaggctttgctaaggaacatatcatcaggcaagaagggtgggagtgccggcaaagtaacaaacaaggataacagactacacaaattggtctttaatgttctgcttgatggcacagaagtagcttactatgttgatgggcagagaaaggttgatgggtatatcaaggatcatagaatctactgtaatcactgcaacagagtggttagcccatcagcatttgaagctcatgcaggtgagggatcaaggcgcaaaccgtatgataacatattcacatcaaacggagtatcattgcatgagctggcgatgaaaatatcaaaggatatggaactgtcagaacgcgagacagatgatctgtgcagagaatgtggtcaggggggagacattttcccgtgcaaaatctgtccaaggtcatttcatccagcttgcgttggactgtctaaagtccccgcagaatggtattgtgatagttgtcgcaatcttgtgcaaaaagaaaaggctttagcaaagaacaaaaatgctaaagctgctgggaggcaagctggagttgattccattgaacagataatgaagagagctatacgaattgtccccatctctgatgatcttggaggctgtgctctgtgcaaacagaaagatttcaacaatgctgtgtttgatgagcgcactgtgatactctgtgaccaatgtgagaaagagtatcatgtaggatgcttgcagagtcaatggcaagtagaactaaaggaattgcccgaggaggagtggttctgttgcagtagttgctctgagacacgatcatcattggacaagataatctccgatggagctcaactgttggcggacccagatcttgaaatcataaagaagaaacatgagacacgaggtttatgcatggacaccagtaaagatctcaaatggcaattactttctggtaaaagggctactgaagacggaagcatattgctctctgctgcagtgccaatttttcatcaatcttttgatccaatccgtgaagctctcactggtagagatctgattcctgagatggttaacgggaggggacctaaggagggaatgcccgggcaagattacagtggaatgtactgcgcactgttaactgtgggctctaccgtggtgtcagcagcacttttgcgtgtgatgggaggtgatgtggccgagctgccactagttgctacaagccaggatgttcaagggctgggctacttccaagccttgttctcgtgcatagagagggtgctagtctcactgaagatcaagcactttgtgcttccagctgcacatgaagctgaagggatctggatgaacaaatttggcttctctagaatctctcccgaagagctggaagcttatcttaatggggcgcacttgactatattccatggaacgtcatacatgtacaaggctgttccagtgtcataattgatgggatagaagagatatgggtgatttcgtctgtcttttggggggtgggggtccgctcgctattgtgatgtacagagagagttgataaggaagcaaagcatggcaaagacaatgtacaggagctggaagccaaggcgaagcatcggatgaatctaaatgaatgaattccccttggtttgtttactcttgaatcgaaggaagcctgtctttttttggtgtgatatactagactagatgcaatgcaattgaaggagtcgcaccgagtcctggtactagagccagattttttgcaatttaaattttgactctgaaactgctaccagagctgctgtgcattcttctctttctgcatacaatttaaaagttgcaaatgacaccgtcatgtgtgacgtatcattcattagaggcggaggcacgtgcgc

SEQ ID NO: 210362 - DNA, 3553 bp, Zea Mays
ggcgaaccgggcgattggtttccttctcggactcttcgtcgtcttctccgatctccccttcctccctcgctctctcccgcccccgtggtccaaaccctaacaaacagcaatcaagcggaacccctgcaatcgtaatcggttcgctgcctaatcccctccctttctcatctcatgaccatgccggcctcgtccccctccgttggcagcgcctgtgacccaccgccgccgccgcctccgccgccgccgcgggctatgaagcgcgagctcgccttcgcgctccagtccctgtccgagatctctgcctcccacggccgcacgcgctccggccgccccatctcttcccttccagacccatcggcatcagcatctctcaagaggcgcaagagatctgacccgcccgcccctgcccccgcccccgcccctgcccccgcagccgatctcgtctccccgcccacgccgcctatcgacgccgagccgcctaaccagcccctccgtgacatcatccaaccgctacatggatctaatcctcccaccgcctctgaccaccgattcgattccaatgccgatcaagaggtcttggcaatggaagtgattgcaaagccgaatctgcccgcagaagaggatattgcagcagatgactcggcaatggaagtgactgcaaagtcgaatgtggctgcagcggatggtgtatcaaagccgaatgtttccgcagaggatactgcatcaaagtcaaatgtggccgctactgtagcagtagcaccaactctgttggaaactgccattgcagctggaaatgaccagtgtgatacctcaaactcaaatggagaaaatctacagcagcaagccgtggaaaatgtattagtctccaccactatgttagctgaggacactgtcacacctgcagctgctgccgggctcaagcctgcaaggcgcttcactcgatcgttgctcaagaataataaaccagataaagaagagtctgcatcttgtgaaagtcaggcaacaccagatggtagcaaggatgcctcagttggttttactttgctcctggagaagcctcagagaaggttcacaaggtcgttgctcaagacaaaggttgagagcagtttggttggatctgatgatgtgctggacagtgcatctgattcccctccatcagtgaagaagatggagatgaagatgtcaaagaaagttgcatgtctcacgaagcaccctggaaacattagagagctgctcaacacaggcatgcttgaggggatgccagttatgtacatcattcctcatagcaagaaggctgtcctaaaaggagtgattactggttgcaatatacgttgcttttgcctgtcctgtaatggcgccaaggccatttcagcttattactttgaacaacatgctggaagcaccaaaaaacaccctgctgattacatttacttagggaatggcaatagtttgcgtgacgtgctacgtgcatctgacagatctcccttggaggctctggaagaaacgattcgttcctccattgatccagtagttaaaaggagccgcattaattgtctgaattgcaatgagcttgttcttccgtcatcacatgaaaatgtactgtgtcaagtttgcctcgagtcaaagcaacctcaagatcctcttactgcatcgtatacatgtaatggcagttcgagtctgagtcgaagttccaaggaggctttgctaaggaacatatcatcaggcaagaagggtgggagtgccggcaaagtaacaaacaaggataacagactacacaaattggtctttaatgttctgcttgatggcacagaagtagcttactatgttgatgggcagagaaaggttgatgggtatatcaaggatcatagaatctactgtaatcactgcaacagagtggttagcccatcagcatttgaagctcatgcaggtgagggatcaaggcgcaaaccgtatgataacatattcacatcaaacggagtatcattgcatgagctggcgatgaaaatatcaaaggatatggaactgtcagaacgcgagacagatgatctgtgcagagaatgtggtcaggggggagacattttcccgtgcaaaatctgtccaaggtcatttcatccagcttgcgttggactgtctaaagtccccgcagaatggtattgtgatagttgtcgcaatcttgtgcaaaaagaaaaggctttagcaaagaacaaaaatgctaaagctgctgggaggcaagctggagttgattccattgaacagataatgaagagagctatacgaattgtccccatctctgatgatcttggaggctgtgctctgtgcaaaaagatttcaacaatgctgtgtttgatgagcgcactgtgatactctgtgaccaatgtgagaaagagtatcatgtaggatgcttgcagagtcaatggcaagtagaactaaaggaattgcccgaggaggagtggttctgttgcagtagttgctctgagacacgatcatcattggacaagataatctccgatggagctcaactgttggcggacccagatcttgaaatcataaagaagaaacatgagacacgaggtttatgcatggacaccagtaaagatctcaaatggcaattactttctggtaaaagggctactgaagacggaagcatattgctctctgctgcagtgccaatttttcatcaatcttttgatccaatccgtgaagctctcactggtagagatctgattcctgagatggttaacgggaggggacctaaggagggaatgcccgggcaagattacagtggaatgtactgcgcactgttaactgtgggctctaccgtggtgtcagcagcacttttgcgtgtgatgggaggtgatgtggccgagctgccactagttgctacaagccaggatgttcaagggctgggctacttccaagccttgttctcgtgcatagagagggtgctagtctcactgaagatcaagcactttgtgcttccagctgcacatgaagctgaagggatctggatgaacaaatttggcttctctagaatctctcccgaagagctggaagcttatcttaatggggcgcacttgactatattccatggaacgtcatacatgtacaaggctgttccagtgtcataattgatgggatagaagagatatgggtgatttcgtctgtcttttggggggtgggggtccgctcgctattgtgatgtacagagagagttgataaggaagcaaagcatggcaaagacaatgtacaggagctggaagccaaggcgaagcatcggatgaatctaaatgaatgaattccccttggtttgtttactcttgaatcgaaggaagcctgtctttttttggtgtgatatactagactagatgcaatgcaattgaaggagtcgcaccgagtcctggtactagagccagattttttgcaatttaaattttgactctgaaactgctaccagagctgctgtgcattcttctctttctgcatacaatttaaaagttgcaaatgacaccgtcatgtgtgacgtatcattcattagaggcggaggcacgtgcgc

SEQ ID NO: 210363 - DNA, 761 bp, Zea Mays
gcagcagcggcatttcctgccgtccgcacacgaaagcgcggcggctataacaaacacgtactagctagctagctaggcgcgcgatcatccagttccattgtgtggtggccgggccctgcatgccatgaagcgttcggcggcgtccaccgtgcccctcgccctcgtcctcatcgccgtcgcgacgacggcggcggccgccgacatgaccggcgccagcaactacctcgttgaggcccaggcgaaggcggcgatgctgtacaactacaggaacgtcatgagcgggttctcggcgaggctcacgccgccggagttggaggccgtcaagaagcaacctcaggtgagccgggtgctgccgagcgcgaccttgtctctgatgagcagcaagttcgacggcgtcagctgatcccgcttcttccatccatgcaccagccagagcaagctcatccgtcgacaaacccctaaaataaatacatgttttagtttgttaattaatatatatatcattatggaataaagataccaggatgtggacccatgaagcagaagcagatcaaatactgctacatgacgggggcatgccctaatgcagcaacggggaatgaagagcagtctgacgagtgtcaataaaataggatatcatgtattttcaaacaaaaacaataatcaaaccgttttcaattctgatttttaattttattttcaacccgatttcagttttgttcgagccttcaccggctagctcagtctgattctgattaaat

SEQ ID NO: 210364 - DNA, 1289 bp, Zea Mays
agccaggaatcatggagagagctgattcacagaaagatggcgtagaggacactttaggcagtatcgtagaagcaatcgaccaaggagtcaaggatgaggaccaactggatttgcccaagtacgtgtgtttcaagggagataacggtctgtacctgagtgctcgaacggttgaaggccatccctacctgcagtttgcatcggaagacattggtgacccaagtgtgaggttcatcacctacaaccacaaggtgaacggcaaacgggtggtgcgcttcaagtcgaaccatctcggcaagttctggaggcggagccccaactggatctgggccgacaccgacgacaccagcaccaagaactccgacaccctgttcgaggtcatcaagatcgacgaggacggtgtgtacgcgctccggaacctcggcaacaaccacttctgccacaggctgacctacgacggcaaggagagctgcctgaatgccacaattccgaccatcaggaaggaggcgcacatcaagatcgaagaagccgtcctctcccggaagatctccaacatcgagtaccacctcaagggcgccaagatcttcgacaagaaggccaagaccctcatcactcgagaggcggtgaacggcaccagcacggacagcaagaccaccatcaccctcaagtatagcgtcatcaagggaaagctatgggattcgagcaagtccatgaaactgggggtcaccaccacaattgaagctggggttcctgtggtcttacccgcaaccattgaggtccagagcgagttcaactccacctacagctggggcgagtccatcatcgagaaagaagagtactccaacgcctacgaggtcgttgtgcctgcatactccgtcgtcacggtcagcgtactcgccacacagggcatctgccaagtccccttctcttatactcaggaggacgttttgactactggagagaggaaggttttcaagtttgatgacggcatcttccgtggtgtcaatagctttggtttcaagtccgaggtcacggaaaggaagctctccaaggacgacgactgagcgatatatcatccatagtctctcgataaacttcgatctgtgtgatttataaataagccatattaatgtaataatgctttaataagcagttcagtatatgtgtgtcgtcaaaatcacgtttttatactactactatgtgtgcatgcacactttatgtgtaatgctttacttgtaatttattgagaataaacagagagagtccttcaccacttgttatcaattacaata

SEQ ID NO: 210365 - DNA, 2960 bp, Zea Mays
cccatagaggtatggcattgtagccgacggacgaccgacgcgcaccccccgccatgctctccagccgaagatgcttcgcggcggcggccaaccgggtccggccgctcgccagggccttctgcgacgcgccggcctcgcgcgcggatgcgggggcctccgggacgcccagcccgcaggatcacgccgagaaggttgctgccctgaaggatccgcccgatgtgctagacgttgctatcgttggtggaggcatggtgggcttggctgtcgcttgtgcattgtcaaatatgccgttaacgaaacaccttagagtcgctattatcgatagcaatccagcgctgaagtcaaggagttacctggataaaaacagtatacccgattctagggtcagcaccgttacccctgcaaccatttctttcttcaaggtggcaacactgccaattttctttcaggtcaccagtttagactttcagctgtgtgtacatttattttgacagaggtaaacctggctttcataaaaagcttagaatgttacagataagcaactgctagggattctagcttagagataagcaacacaactaacaacagagaacagagttacagaaaagctaagaaaggggatacagcagaaagcctaaaccacaagctcctcaactgagtccacctcaaaacaaaactaaaaagcctaacgactggcgactccctccacctctagatcttcagttttcttccaaaatgcctgcaaccaactctttgttcttccaaaatgtctcagaagaattcgtcatttctgcaagaacactatgatctgtggtttcatttttttagttgtgtgtacatttcactactgtaactgtaacaatcacaaattaccatctgttgttaaattttctgcactttgtgcacattggaaatacaaaaataaatgtctattttcaccaagtataatttaaaaatgatacttttccatgttttaatgtgcatggcttgttttgctaccggagacaatagtgcattattggtaatgttcttcgtgagtgtgtgtgcattattgtggcagatattggcgcctgggagcatgttcaacagcaaagacatgctttctttggtaaaatgcaggtgtgggattacactggacttggatacacgaggtataatgctagagatgtgggcaaagaacaccttggatgtgtggtggagaacaaggtgctttgcaactcactgctcttacgtttacaggaagaattggatgatattgaaaatgtgatatatcctaccagattggtgtctcttactttcccgttgaagaccagacaagcaggaatgaaaccaacatcaagagaaccattatctgttggtcatactacagaagagttccatcgcagtcatttagttaaacttgatctcagtgatggacggagtttatattccaaattggtgataggagctgatggttcgaagtccaatgttagacagattgcaggcataaaaacaactagttggaattatccgcagagtgcaattatctgtacagtagagcatgttgtggaaaatgattgtgcgtggcagaggtttctcccttctggtccaattgcgctacttccgataggcaataacttcagcaacattgtatggacaatgagtccagaggagtcactgcgccataagtcaatgagcccagaagagtttgtgaattctgtgaaccacgcattggattttggttatggtccgcatccacactctaccgctcttgaccattacatggaacagttcttttctggcattgggagcagtgcagcatctacaaaggaatgcttcgaagtgccaccgaaagcaacccgtgtagtttctgagagaatggcgtttccattgtcgttgatgcattcccatgattatgtttccaaaaggttagcattagttggagatgctgctcatactgtccaccccttagccggccaaggtgtaaacttgggctttggtgatgctgctgctttagcaaaagttattgctgagggagtttcagtgggctcggatgttggggatctgactttgctacagcggtatgagaaggagaggaaggctgccaatgtggcgatggcagcagtgctagatggttttcagaagatgtactctgttgatttggggccccttaatgtagtgagagctgctgcgttccacggtgcccagtacatatcaccactaaaaaagaacatcatctcttatgcaacgggtgacacgaaatggtcactatttcagtgaacagcactgctttgaaactcttgtcctcacctcgttctttgtttcggcatgtactggaaacaaagaacgcaatcagtaatttcgttcgaaagacatcctcatttgggctgtttggttactgggacacgtcaagcgcccgtctcgcgctagcctggatccctgggaacgtagctcttctgcgtttctgctcgtacaggccagcgaccaaaaaaagctctatactgcatgcgcgggtgcaagcagtcgtcatgcactacagtcatccaaacacgagctcagcatggtcaacgtgacgccgtgggcctagacgccaccagccaatcaaccaatcatgcgaattgtgttgctttcgatcttagtgttaatttgagcgcccgaggcccgacctagtttgtgaggttagtctctttccgtgctcactttgtatttgtactagctagagatataatactcagcgcgttgctacgtgagttgagttgctgacgatttaaataaaagtagactatatacaattatcagtacgaaggagtaaactattccctgtgccctaaaatataatttgttttagactaaacacatatgtaatttgtatgtaagtctacaatcattattatgattcattcgcactataaattaatattaatggactctggcatgttgacgtggacagcaaaatgctttgttcttttttttttaatttc

SEQ ID NO: 210366 - DNA, 4771 bp, Zea Mays
atgtaagaacaggtgggggatggggagttgaaagagatggaaatgggtggcggcggcagacgcacgcagatcatgttgagggcgtccatgcggatgttggggacgatttcgacaatctcatcctcagccacgaactccacctgcagcacagacaggacaggtccaaacattccctttgacgaagatagtctagtccctgcctgtgattgtggaagggatggggttggttacctcggagggcgagaagatggagaggtgcgggtcggactgccccgccatgaatgccccccactggaacgccgggactcgtgagagagagcaatggaggcgctgctgcgggtcggaggcggcgaggcgagagcgaggtcgacggagagaggaggctacaggtcgctgggactctctaaactacagcccaatctgagtgcccgaaagcccatccaacaacagagcccaacagccgcttcacgcagcttcagttcgatttggtcgggtcgcggcagcgcacggcgggtgaggcagcggcgaggcggggcggcggggcgccgcggttgcctttctcgctgctcctgcagtcctgctcgctcagcgccgggacccgggagaggttattagggtttccttctcatcaactttagccccagcagcaacacagccagcagaagagggcgggcccgatgctggccgcccggaacccccctccgccgccccatgacatcgccgcgcgcctccaccacctgcgcgacctccgcagggtgccgctccccaaccgcgtcgcgcgcatcgccgacctccacaccgatgaggccagccccgtgcgcaagcttgttgccgagatcatcggtgagcttgggtcaaaacacatgaggtatctacctgatatgatcccttgtttgctgcaccttctgaatgatgagacgcctgcagtcgtcaggcaagctgttaagacaggaaccaacttgtttgccaaagtactccaaaagctagctatccagggtttattctccaatggagggattgatgatgcacttaaatcatcatgggaatggctgctcaagttcaaatcaggtgtctcgcacatggcatttcaggccaccggcaatgaaggtgtcaggttactggctattaagtttgttgaaaaaacagttcttatgtacacaccagatcctgatgtcccatctgatccgccaactgaaacaacagaagatatggcattcaatgtagcttggttacgaggaggtcaccctttgcttaatgttggggatctggccatggaagccagccagagtcttggattgttgctagagcagctcaagtctcctaaagtaaagtcactcagtacttccatgatcattgtcttcgttactagtctctcagctattgcccaaagaaggccttcattttatggacgcatattgccagttttactttccttggatccagcaagttctattattaaattgagagtcccgggcgcattccatgccttgaagagtgccttctctgcatgcctgaaatgcacacattcaagtgctgagccgtggcgagcacgcctattggaagctcaaaatattatcaaccaagggggttcaatagaagatgcagcaaatgctgctaagaatttcggggacacttcaaacagggaagaatcgtggcctctgatggagagaagcactgacggtagtaacaagcgtagtctggctgaagacatgaatcatgtgacagaggatgatgtccactccactaaaagagccaggcaatcaattgatgctaatgaacatagtgaagaggcaaacaagacaaattttgagtcgatgtctgttgatatctcatctagccagcccagctctataagaactgggaattcagaagctgtgtatcaattaattggtatgtttgctgcactagctgcacaaggtgacagagcagctggatcactgcaaatcctttcatacagtatcgctagtgacttactagcggaggtggtaatggttaacatgcaacatctcccaatctctcgtcctgaagttgaccaacagcagcttccttctacgagctctggagatggacttccactttcaagtttctcctctctgctggggattctgctgaagggagcgaaccaaattgatcaagatgaagtgtctccagctaaagaacctgcgctggtgtcgtcagttgcagatgacagaatgatacttcctgctaattcacctgttcctagctcagtaaatctacctatcgaagagaacagtaacagtccaacagttccattatgtatagaaacaacagaggccaaagtaaccagtgcaggtggcaatagttcgattgatattccagaatcatcagaagcttcccatgcctcaacagagccccagggaacccaagagcatgctagcacttttgccggtccatttcctgctgataatttctcagttggatttagtttggcacaatcgtcagaaactcgcagcccaagctcttctacattggaagcaaaccactcacagctttcatcccttagttcacaatatgttcttccaaagttggttgtcaataatattgatctcagtgatgaggccaaagatctccttcaaaaagaggcgtttgtgcggattcttgagagtgataagaaagaagcatctggtggttcaattgctcgccttccgttgcttgctcacctgggtgttgagtttcctctggaatttgatccttgggtgattcttcaaaagcacattctctctgattatgcgaataatgaggggcacgagttgactatatgcatcctgaaccggctatatcatgaggcagagcaggatcacgatttcctttcatctagaactgctacatcagtttacgaatcctttcttctaaacatagctgaaaatcttcgagacatgtttccagcttcagataagtcacttggcaaattgctttgtgagataccatacttaccagaaggtgtgctgaaactgcttgaaagtttatgttctcctggaagtaatgagaggcaggacaaggatattcagagtggtgatagggtaactcaaggtctcagtgctgtctggaaccttatcatgctaagaccttcaaatcgggacagatgtctggagattgctttgcagagttcaactcatcatctagaggaggtccgcatgaaggcaatacgtttggtggcaaataagttatttcctatgacaagcatttccaaaaagattgaagattttgcaaatgaaaaacttaattcagtgctggaaatgactccatctggtgattgtgtaactactgaaatggctacacctgaagcacacaaagatattggtttagaaaacttaacagcttcagtaacaggcatgcagactctgatgtctctatactttgcattgtgcaccaagaaacattcccttctcagacatgtatttgcaatatatggtaatctaccgcaagctgccaagcaggcagttcatcaacaagtaccaattctgatacgcactataggctcctcctctgatcttcttggaatcatctcagatccaccagctgactgccgggacctcctcatgcaggttttacaaaccctcactgatgctgcggttccatctaaagatctgatttcttccataaagatcttatattctaaaacaaaggatgttgagttcctttttgcaatcttggttcatctaccaaaagatgaggtcctgcctgtgttccccagtattgttaatcttccaatagacaagtttcaaagtgccatttcccgaatcttgcagggatcacctcggaatggcccttcacttgatccatcagaaattttaattgcaattcatgtaatagctcctgataaggaaggaataccactcaaaaaggttatggatgcatgctcttcttgctttgagcaaagaacaatatttacccagcaagttctggcaaaagcactaaatcaactggttgaacagattcctcttcctttgctattcatgaggactgtcatgcaagcaataggtgtttttcctgcattggtggattttgtgatggagatcatgtcacgccttgtgagcaagcagatttggaaatatcccaagttatgggtaggatttctgaagtgtgctatcttgacaaaacctcagtcatatggtgtgttgctgcagttaccagctcctcaacttgagaatgccttgagtaagaacccgacactgaagacgcccttggctgagcatgccgagcagccaaatattcggtcgacacttccaaggtctactttggtggttctgggtcttgctgaagatcaaccacagcaaccagcagtaacacaggtgcagagcagccaaaaccaggctgcggaaaccagtagctctgctgctgatacggctacagaagtaactcaggaatcttctggtgctagctaacatcttttatgccgaaatgggctaatgcttgcagaatcaaatacaggattggctggatggcagagtagatacttcagataatgaagccggtgaagttcttaaagaaaggtcaatgagtcgatgaaagtgggttcaatataggccaatttgatgaacacaggcattgaattatactagattaggctgctgaatagcgtaatacctacatccatttaggtgtgttttcttgttagcgtgctattgtaatgtctatattgtaatgggtctcgacccaccaaactttgttatattaatgcactcccaatcttgattaggattagggttttcaatatgttataaagctagattctctcttccccctttca

SEQ ID NO: 210367 - DNA, 1450 bp, Zea Mays
tcggcaacaagcttgcgcacggggctggcctcatcggtgtggaggtcggcgatgcgcgcgacgcggttggggagcggcaccctgcggaggtcgcgcaggtggtggaggcgcgcggcgatgtcatggggcggcggaggggggttccgggcggccagcatcgggcccgccctcttctgctggctgtgttgctgctggggctaaagttgatgagaaggaaaccctaataacctctcccgggtcccggcgctgagcgagcaggactgcaggagcagcgagaaaggcaaccgcggcgccccgccgccccgcctcgccgctgcctcacccgccgtgcgctgccgcgacccgaccaaatcgaactgaagctgcgtgaagcggctgttgggctctgttgttggatgggctttcgggcactcagattgggctgtagtttagagagtcccagcgacctgtagcctcctctctccgtcgacctcgctctcgcctcgccgcctccgacccgcagcagcgcctccattgctctctctcacgagtcccggcgttccagtggggggcattcatggcggggcagtccgacccgcacctctccatcttctcgccctccgaggtggagttcgtggctgaggatgagattgtcgaaatcgtccccaacatccgcatggacgccctcaacatgatctgcggggatttcgggcccttcttcccccagattcccaccaaggtgcctctctggctcgctgtcgcgctcaagaagcgtagcaagtgcaccatccgcaccccggactggatgactgttgaccgcttgacacaggtattggaagcggaaagagagtcgccacgagaattccagccattaccattccactatattgaaatttctaagcttctgtttgatcatgctcgtgatgacatctcagatgcatacctggtaagatctctaattgaggacatcagagatgtcagatttcacaaggttgagactggattagagacgatatctggacgcacccatgccgtaaagctcaaaaatctctctgcaatggaagtgaacattgtccgccctttcatggtgagaactttgcaggcattctataagcacgatagtgcacagatgattcagcaagcagataatatagggagcagagcaacactggttacagaccgtggcccgagaagagatctaaggcgcaggtagtccacttgtattctgccaaaaaaaatgtatatctgaggacagcagcaagtggttgctttcttgcaataataccagctaagtatgtgctaatgagtcctgagatgtatcagatagtaaagcaatggtggatcatagtttgtctacttttatagagggaactggcattgctcttccccgctttgaaattgtactgctttattcctactgatgttatatgcaagtgtgtgtgtgtggctcattgatctctccaaaaaaaag

SEQ ID NO: 210368 - DNA, 1768 bp, Zea Mays
aaagaagtgtgataaccatctcttctatttatttataaaattgatttgtgctgcacatatgtgcattataacaattgtattatcaattgttagagtggacgcactaaccaatcaaacacaaaagcttaagctgttaggaaaaagtaggcaatctacttatacacttcaatactctcactcacgtgcaaccagagagaaaggtgcaaacatgtaaataaaggggcagagacacaaataaagcctctaccaggatttgaactcaagacctctggctttgatactatgttagagtgagatgcactaaccagttcaacccaaagctcaccatatcaaagtggacacactaatcagtcaaacccaatagcttaagctgttagaagaaggtaggcaatccacttatatatttcaacaccaatctccactaaatttttgtatttttactttcttgaacagcggatggtaagctctttgtttggggcagaaactcaggtggccagcttggccttggtaaaggtaaagtagtttctaccccaacaaaggttgattgtttgactgacctcagagtaaaaacggttgctctgggatcagagcattcaattgctgttacagaggaaggtgaagtcttgagttggggagctgctggttctggtaggctcggacatggccgtcaatctagcatcctgggattttctctgacctcaactgaatatactccaagattgatcaaaaactttgatggtatcaagattaaaaagatagctgcaggaatgttgcactcagcttgcattgatgaaaaaggtactttgttcatatttgggcagaagactgagaagggatttggaagaccgaacgaagaattcagaccaaatattgttgaagagataccattttcagaagaagttgcttgtggaggttaccatacttgtgttgtaacagatagcggtgatctgtattcttggggttcaaatgaaaatggctgccttggtctgggaggtacggatatggtccgctctccggaaattttgaaaagttctctatttaaacttcctgtatctaaggtatcttgtggttggaagcacacagctgtagtttcaggtgatgacatctacacatggggttggggaggcgccaatgggacttttttcgaagagggccattcttccggtggacagctgggacatggaaacgacgtagactattttgagcctatgatggttccctttggcacgaatgcaagagccgtccatgtatcgtgtggcttcaatcatactggtgcaatttacgagtgctccgaggactttgactgacgtgccacctgcagacagcagatccgcatgtcttggagacttaggttagttatcaaattatactcgctagaagtgcatataaacagcataaataagctctgatgttggacctgcatttatgtgaagagaaatatagaacaagtgataacacccctgagagggggatgtaaattaaacagaataagggatgaactggatgcattttgtgatgcatcagagttacttgccagtgtatagcatttcttcatttattggctggttctgtattattttgccaggtactaagaaatccattgcctgatgtctcagcaggctgtttgtgtacattatgattgcttgactgcttggtgtcgatgcttgctgtgttttttgtgtgtaaataatacatgaatcagttaatcgtgcttgtacaattaaatatgtacatatatcagtgcatcacttattatatgtacatgatt

SEQ ID NO: 210369 - DNA, 1733 bp, Zea Mays
aaagaagtgtgataaccatctcttctatttatttataaaattgatttgtgctgcacatatgtgcattataacaattgtattatcaattgttagagtggacgcactaaccaatcaaacacaaaagcttaagctgttaggaaaaagtaggcaatctacttatacacttcaatactctcactcacgtgcaaccagagagaaaggtgcaaacatgtaaataaaggggcagagacacaaataaagcctctaccaggatttgaactcaagacctctggctttgatactatgttagagtgagatgcactaaccagttcaacccaaagctcaccatatcaaagtggacacactaatcagtcaaacccaatagcttaagctgttagaagaaggtaggcaatccacttatatatttcaacaccaatctccactaaatttttgtatttttactttcttgaacagcggatggtaagctctttgtttggggcagaaactcaggtggccagcttggccttggtaaaggtaaagtagtttctaccccaacaaaggttgattgtttgactgacctcagagtaaaaacggttgctctgggatcagagcattcaattgctgttacagaggaaggtgaagtcttgagttggggagctgctggttctggtaggctcggacatggccgtcaatctagcatcctgggattttctctgacctcaactgaatatactccaagattgatcaaaaactttgatggtatcaagattaaaaagatagctgcaggaatgttgcactcagcttgcattgatgaaaaagggatttggaagaccgaacgaagaattcagaccaaatattgttgaagagataccattttcagaagaagttgcttgtggaggttaccatacttgtgttgtaacagatagcggtgatctgtattcttggggttcaaatgaaaatggctgccttggtctgggaggtacggatatggtccgctctccggaaattttgaaaagttctctatttaaacttcctgtatctaaggtatcttgtggttggaagcacacagctgtagtttcaggtgatgacatctacacatggggttggggaggcgccaatgggacttttttcgaagagggccattcttccggtggacagctgggacatggaaacgacgtagactattttgagcctatgatggttccctttggcacgaatgcaagagccgtccatgtatcgtgtggcttcaatcatactggtgcaatttacgagtgctccgaggactttgactgacgtgccacctgcagacagcagatccgcatgtcttggagacttaggttagttatcaaattatactcgctagaagtgcatataaacagcataaataagctctgatgttggacctgcatttatgtgaagagaaatatagaacaagtgataacacccctgagagggggatgtaaattaaacagaataagggatgaactggatgcattttgtgatgcatcagagttacttgccagtgtatagcatttcttcatttattggctggttctgtattattttgccaggtactaagaaatccattgcctgatgtctcagcaggctgtttgtgtacattatgattgcttgactgcttggtgtcgatgcttgctgtgttttttgtgtgtaaataatacatgaatcagttaatcgtgcttgtacaattaaatatgtacatatatcagtgcatcacttattatatgtacatgatt

SEQ ID NO: 210370 - DNA, 1739 bp, Zea Mays
aaagaagtgtgataaccatctcttctatttatttataaaattgatttgtgctgcacatatgtgcattataacaattgtattatcaattgttagagtggacgcactaaccaatcaaacacaaaagcttaagctgttaggaaaaagtaggcaatctacttatacacttcaatactctcactcacgtgcaaccagagagaaaggtgcaaacatgtaaataaaggggcagagacacaaataaagcctctaccaggatttgaactcaagacctctggctttgatactatgttagagtgagatgcactaaccagttcaacccaaagctcaccatatcaaagtggacacactaatcagtcaaacccaatagcttaagctgttagaagaaggtaggcaatccacttatatatttcaacaccaatctccactaaatttttgtatttttactttcttgaacagcggatggtaagctctttgtttggggcagaaactcaggtggccagcttggccttggtaaaggggcaggtaaagtagtttctaccccaacaaaggttgattgtttgactgacctcagagtaaaaacggttgctctgggatcagagcattcaattgctgttacagaggaaggtgaagtcttgagttggggagctgctggttctggtaggctcggacatggccgtcaatctagcatcctgggattttctctgacctcaactgaatatactccaagattgatcaaaaactttgatggtatcaagattaaaaagatagctgcaggaatgttgcactcagcttgcattgatgaaaaagggatttggaagaccgaacgaagaattcagaccaaatattgttgaagagataccattttcagaagaagttgcttgtggaggttaccatacttgtgttgtaacagatagcggtgatctgtattcttggggttcaaatgaaaatggctgccttggtctgggaggtacggatatggtccgctctccggaaattttgaaaagttctctatttaaacttcctgtatctaaggtatcttgtggttggaagcacacagctgtagtttcaggtgatgacatctacacatggggttggggaggcgccaatgggacttttttcgaagagggccattcttccggtggacagctgggacatggaaacgacgtagactattttgagcctatgatggttccctttggcacgaatgcaagagccgtccatgtatcgtgtggcttcaatcatactggtgcaatttacgagtgctccgaggactttgactgacgtgccacctgcagacagcagatccgcatgtcttggagacttaggttagttatcaaattatactcgctagaagtgcatataaacagcataaataagctctgatgttggacctgcatttatgtgaagagaaatatagaacaagtgataacacccctgagagggggatgtaaattaaacagaataagggatgaactggatgcattttgtgatgcatcagagttacttgccagtgtatagcatttcttcatttattggctggttctgtattattttgccaggtactaagaaatccattgcctgatgtctcagcaggctgtttgtgtacattatgattgcttgactgcttggtgtcgatgcttgctgtgttttttgtgtgtaaataatacatgaatcagttaatcgtgcttgtacaattaaatatgtacatatatcagtgcatcacttattatatgtacatgatt

SEQ ID NO: 210371 - DNA, 1763 bp, Zea Mays
aaagaagtgtgataaccatctcttctatttatttataaaattgatttgtgctgcacatatgtgcattataacaattgtattatcaattgttagagtggacgcactaaccaatcaaacacaaaagcttaagctgttaggaaaaagtaggcaatctacttatacacttcaatactctcactcacgtgcaaccagagagaaaggtgcaaacatgtaaataaaggggcagagacacaaataaagcctctaccaggatttgaactcaagacctctggctttgatactatgttagagtgagatgcactaaccagttcaacccaaagctcaccatatcaaagtggacacactaatcagtcaaacccaatagcttaagctgttagaagaaggtaggcaatccacttatatatttcaacaccaatctccactaaatttttgtatttttactttcttgaacagcggatggtaagctctttgtttggggcagaaactcaggtggccagcttggccttggtaaaggggcaggtaaagtagtttctaccccaacaaaggttgattgtttgactgacctcagagtaaaaacggttgctctgggatcagagcattcaattgctgttacagaggaaggtgaagtcttgagttggggagctgctggttctggtaggctcggacatggccgtcaatctagcatcctgggattttctctgacctcaactgaatatactccaagattgatcaaaaactttgatggtatcaagattaaaaagatagctgcaggaatgttgcactcagcttgcattgatgaaaaaggtactttgttcatatttgggcagaagactgagaagaccgaacgaagaattcagaccaaatattgttgaagagataccattttcagaagaagttgcttgtggaggttaccatacttgtgttgtaacagatagcggtgatctgtattcttggggttcaaatgaaaatggctgccttggtctgggaggtacggatatggtccgctctccggaaattttgaaaagttctctatttaaacttcctgtatctaaggtatcttgtggttggaagcacacagctgtagtttcaggtgatgacatctacacatggggttggggaggcgccaatgggacttttttcgaagagggccattcttccggtggacagctgggacatggaaacgacgtagactattttgagcctatgatggttccctttggcacgaatgcaagagccgtccatgtatcgtgtggcttcaatcatactggtgcaatttacgagtgctccgaggactttgactgacgtgccacctgcagacagcagatccgcatgtcttggagacttaggttagttatcaaattatactcgctagaagtgcatataaacagcataaataagctctgatgttggacctgcatttatgtgaagagaaatatagaacaagtgataacacccctgagagggggatgtaaattaaacagaataagggatgaactggatgcattttgtgatgcatcagagttacttgccagtgtatagcatttcttcatttattggctggttctgtattattttgccaggtactaagaaatccattgcctgatgtctcagcaggctgtttgtgtacattatgattgcttgactgcttggtgtcgatgcttgctgtgttttttgtgtgtaaataatacatgaatcagttaatcgtgcttgtacaattaaatatgtacatatatcagtgcatcacttattatatgtacatgatt

SEQ ID NO: 210372 - DNA, 1774 bp, Zea Mays
aaagaagtgtgataaccatctcttctatttatttataaaattgatttgtgctgcacatatgtgcattataacaattgtattatcaattgttagagtggacgcactaaccaatcaaacacaaaagcttaagctgttaggaaaaagtaggcaatctacttatacacttcaatactctcactcacgtgcaaccagagagaaaggtgcaaacatgtaaataaaggggcagagacacaaataaagcctctaccaggatttgaactcaagacctctggctttgatactatgttagagtgagatgcactaaccagttcaacccaaagctcaccatatcaaagtggacacactaatcagtcaaacccaatagcttaagctgttagaagaaggtaggcaatccacttatatatttcaacaccaatctccactaaatttttgtatttttactttcttgaacagcggatggtaagctctttgtttggggcagaaactcaggtggccagcttggccttggtaaaggggcaggtaaagtagtttctaccccaacaaaggttgattgtttgactgacctcagagtaaaaacggttgctctgggatcagagcattcaattgctgttacagaggaaggtgaagtcttgagttggggagctgctggttctggtaggctcggacatggccgtcaatctagcatcctgggattttctctgacctcaactgaatatactccaagattgatcaaaaactttgatggtatcaagattaaaaagatagctgcaggaatgttgcactcagcttgcattgatgaaaaaggtactttgttcatatttgggcagaagactgagaagggatttggaagaccgaacgaagaattcagaccaaatattgttgaagagataccattttcagaagaagttgcttgtggaggttaccatacttgtgttgtaacagatagcggtgatctgtattcttggggttcaaatgaaaatggctgccttggtctgggaggtacggatatggtccgctctccggaaattttgaaaagttctctatttaaacttcctgtatctaaggtatcttgtggttggaagcacacagctgtagtttcaggtgatgacatctacacatggggttggggaggcgccaatgggacttttttcgaagagggccattcttccggtggacagctgggacatggaaacgacgtagactattttgagcctatgatggttccctttggcacgaatgcaagagccgtccatgtatcgtgtggcttcaatcatactggtgcaatttacgagtgctccgaggactttgactgacgtgccacctgcagacagcagatccgcatgtcttggagacttaggttagttatcaaattatactcgctagaagtgcatataaacagcataaataagctctgatgttggacctgcatttatgtgaagagaaatatagaacaagtgataacacccctgagagggggatgtaaattaaacagaataagggatgaactggatgcattttgtgatgcatcagagttacttgccagtgtatagcatttcttcatttattggctggttctgtattattttgccaggtactaagaaatccattgcctgatgtctcagcaggctgtttgtgtacattatgattgcttgactgcttggtgtcgatgcttgctgtgttttttgtgtgtaaataatacatgaatcagttaatcgtgcttgtacaattaaatatgtacatatatcagtgcatcacttattatatgtacatgatt

SEQ ID NO: 210373 - DNA, 1309 bp, Zea Mays
ccgacccattgctatcctacctgccagcgaacctgtctcgtctccttgttgcccacgtggcctcgccgtcgccgcgagctccaccttcctcagctctgccccgagcgcgatgtggcgagcgacgaggcggtctccgccgttcctgcgatggctatcgtcggacgcagcctcctctaaggcgccgcggcagcgcgtagcggcgctgtgggggaacggtgactacgggcggctggggctgggctcgctggagtcgcggtggagccccacggtttgccccttcttcctcgcccgcgccgccgacccgcccgcctccctcgcctgcggcggcgcacataccctctttctcacccagaatgggcgagtgttcgctacagggctgaacgactttgggcagctggggataggaacctctgttacacatatgctggagcctgttgaaatttctggatttcacgaaagagttgtagaagtttcagctggcaaccatcattcttgtgcagtcaccgcggatggtaagctctttgtttggggcagaaactcaggtggccagcttggccttggtaaaggggcaggtaaagtagtttctaccccaacaaaggttgattgtttgactgacctcagagtaaaaacggttgctctgggatcagagcattcaattgctgttacagaggaaggtgaagtcttgagttggggagctgctggttctggtaggctcggacatggccgtcaatctagcatcctgggattttctctgacctcaactgaatatactccaagattgatcaaaaactttgatggtatcaagattaaaaagatagctgcaggaatgttgcactcagcttgcattgatgaaaaaggtactttgttcatatttgggcagaagactgagaagggatttggaagaccgaacgaagaattcagaccaaatattgttgaagagataccattttcagaagaagttgcttgtggaggttaccatacttgtgttgtaacagatagcggtgatctgtattcttggggttcaaatgaaaatggctgccttggtctggggtattttatctgtgactttttcaataatttccctacatcatcttgtatcctacttatatcagtgtgcaactgtgcatccaatgtcgaagttgtattctgatatgattatctctaaccagaggtacggatatggtccgctctccggaaattttgaaaagttctctatttaaacttcctgtatctaaggtatcttgtggttggaagcacacagctgtagtttcagctatacgctatcgctgtgctctgagcacctcaaaac

SEQ ID NO: 210374 - DNA, 2918 bp, Zea Mays
gttatttctaactattaagtgttaattatctaatgtatttaatgaagtaacacagttagacttgcctaaagaggccagtgaagcttcactggctgcatagagaagtacttttttattatcatgtaaatgcatggttctttggaaccatttggcctatctgattaattattactataaccgggaatgggggcccgaggctataacccggactcctcgccctcgtacctcgttgctggcgaagagcgtcatcaatggcgagtggaggttcactacacagccgccggatcttggagcatcattcgcggtcttggcgcgtctacgcaactgtatcctaagggcgtcgaagaggagagacggtacgccggtggcgacaaggtacgatagatttgaactggagtgtggaggtatcgtcggccagtgccatcagcgatgggtggaggtttccgtcgagtcgaggaaggagcgcttcgtgtaaaggtagcactgcttgctcacgttaatcatccctatgcctacatctatgttttggttttgctgacctgcatgaatacaaccacttgttttggtccttggtatgttttctatgttttggtttttctaatctgcattggaaggcatgttgttggtaagcattgtcgatgctctggtagaatatatcttgagttacaaatgcgagcttcagttttcacgcaacttcatgaaagcttagctttatagcgcagttcagtgttaattatttaattttgtaggcaataaaaatgcatttcttatcctttatggtagacatttctgtcctttgctactatctaactgaatagctgaaatacaatgttttcattggtcgattaatattctatccacttgaatcacaatcactcccataaagaaaatttcttttccgtaattgaagttaatgaacaatacaaccagggaattgttttgcatccattgcatgtcatttttaggtaccaaagtaaacaagctctggacagattcagtttcagtttcagtgatcctgtttgcaacatccaagcatcctgtaatcacctgtatagcagttacacctgttcatgtacatgcttttaacaataaatcaacaacttacatgatagctttattgtagatgttgtttgtttattgttattatcttatcggaagtgccgtcaaggaagatgacgatggtggtagggatcgacgatagcgagcacaacttctacacgctgaagtgggcgcactgcagcacttcttcccgccgaccaagctgcaacactactgccttgttgtcgtcaccgccaagccctctgtcgcctccattgttcgccctgccaacctaggcaccgcgaatgtgttgtcgtatgtggggagcagacagtcaacttgcatctaggtctaaataaaatagtagtgattaaatctttgaatctgtagatcaaaccatctcaagtaattttagttttgttatgaaaatttttagctcagatgaaataattgcattttgattattaagatttaacatacatctggttctatgaggaaggaaatcataagtggagattgaagttgatcaacttgacactcgaataaaagaatcaacaaatattgcaagtgctgaaagttgtgactgctcaagtccaattgctttatcacacaagttctggtggagatacttattctagaatcttcaaaagcatcaacgttagtgttcaagggactgattctggactttcaacttaatgcttctctacctgttgtcatactgaagctactgctcctggaagagcatcaccaacatatccctgatggccctctctgcttcatgctccaagcacttggatgttcaccttgaaatataattattaatagggactgtccaaatacttcagctaagcaaaatagcgacctccataaaaaagcaacctgtaactatctctgaaaattttgaaaaaaactgatggtaactgataagctgctgctagcaactaccgtcgcctatttgttttgtttcagaaagttaaggtgcatgaacctctgatatagcatttgacacactgtactttacacatcacccaggaggaactcttgtgtgggtgtgggtgtgggcagggctagaaggaagaaccatgcatgctactacattcatataatctttttcagaggtttaagatatcaacactaatctgactttgattgtctgaaagaatttatcatgctgctgcttactgttttcggtagggggtcaatgcttactttagctgtgcaataattcctcaatattaaaccgagtttgatcaagtaccttgaagctacaagtagcagtgatttgacaggtttactactgcctgaaacatgattgtaagtgttcttagtatatagctcttctccatttcctctccaactgtcacatgtgctcatacgcttttgccttagtttattacatgtccagaacaccaacataaagaaaacctgccctcgattagcattattcagtagagagagttgtggagaaataaagttaatttgtttgttggcgcaactaattagaccacgttttcattaacaataatactaacatgtttttgttgtagggagggcacattgtggcggctacgagagaccgattttcctgtgtggtggtgacaacgacaccgtggagccaagtcaatgtcggcaagctgatttttcagattggaacctatggttctttttaaagatcgaatatgttctagcatctttaaaagatttgtcagaatgtaaacatttgttttgaggtcatttaagcctcaaacaaaatttcttggacttatttcgttggagggaacgagacatctcgagatctaaatgtgtatagaacatatattttttatgggtatcaaatataattgtgtgtaaagcacgtacatagtactataataatgaaa

SEQ ID NO: 210375 - DNA, 1374 bp, Zea Mays
gttatttctaactattaagtgttaattatctaatgtatttaatgaagtaacacagttagacttgcctaaagaggccagtgaagcttcactggctgcatagagaagtacttttttattatcatgtaaatgcatggttctttggaaccatttggcctatctgattaattattactataaccgggaatgggggcccgaggctataacccggactcctcgccctcgtacctcgttgctggcgaagagcgtcatcaatggcgagtggaggttcactacacagccgccggatcttggagcatcattcgcggtcttggcgcgtctacgcaactgtatcctaagggcgtcgaagaggagagacggtacgccggtggcgacaaggtacgatagatttgaactggagtgtggaggtatcgtcggccagtgccatcagcgatgggtggaggtttccgtcgagtcgaggaaggagcgcttcgtgtaaagatgttgtttgtttattgttattatcttatcggaagtgccgtcaaggaagatgacgatggtggtagggatcgacgatagcgagcacaacttctacacgctgaagtgggcgcactgcagcacttcttcccgccgaccaagctgcaacactactgccttgttgtcgtcaccgccaagccctctgtcgcctccattgttcgccctgccaacctagggggtcaatgcttactttagctgtgcaataattcctcaatattaaaccgagtttgatcaagtaccttgaagctacaagtagcagtgatttgacaggtttactactgcctgaaacatgattgtaagtgttcttagtatatagctcttctccatttcctctccaactgtcacatgtgctcatacgcttttgccttagtttattacatgtccagaacaccaacataaagaaaacctgccctcgattagcattattcagtagagagagttgtggagaaataaagttaatttgtttgttggcgcaactaattagaccacgttttcattaacaataatactaacatgtttttgttgtagggagggcacattgtggcggctacgagagaccgattttcctgtgtggtggtgacaacgacaccgtggagccaagtcaatgtcggcaagctgatttttcagattggaacctatggttctttttaaagatcgaatatgttctagcatctttaaaagatttgtcagaatgtaaacatttgttttgaggtcatttaagcctcaaacaaaatttcttggacttatttcgttggagggaacgagacatctcgagatctaaatgtgtatagaacatatattttttatgggtatcaaatataattgtgtgtaaagcacgtacatagtactataataatgaaa

SEQ ID NO: 210376 - DNA, 2071 bp, Zea Mays
gttatttctaactattaagtgttaattatctaatgtatttaatgaagtaacacagttagacttgcctaaagaggccagtgaagcttcactggctgcatagagaagtacttttttattatcatgtaaatgcatggttctttggaaccatttggcctatctgattaattattactataaccgggaatgggggcccgaggctataacccggactcctcgccctcgtacctcgttgctggcgaagagcgtcatcaatggcgagtggaggttcactacacagccgccggatcttggagcatcattcgcggtcttggcgcgtctacgcaactgtatcctaagggcgtcgaagaggagagacggtacgccggtggcgacaaggtacgatagatttgaactggagtgtggaggtatcgtcggccagtgccatcagcgatgggtggaggtttccgtcgagtcgaggaaggagcgcttcgtgtaaagggatcgacgatagcgagcacaacttctacacgctgaagtgggcgcactgcagcacttcttcccgccgaccaagctgcaacactactgccttgttgtcgtcaccgccaagccctctgtcgcctccattgttcgccctgccaacctaggtatgcgaatctccaatccatgtgaggattcagagctagactagatgtagcttctgacctatatgattagttatatatgtattgtaattgatcagtgcaggcaccgcgaatgtgttgtcgtatgtggggagcagacagtcaacttgcatctaggtctaaataaaatagtagtgattaaatctttgaatctgtagatcaaaccatctcaagtaattttagttttgttatgaaaatttttagctcagatgaaataattgcattttgattattaagatttaacatacatctggttctatgaggaaggaaatcataagtggagattgaagttgatcaacttgacactcgaataaaagaatcaacaaatattgcaagtgctgaaagttgtgactgctcaagtccaattgctttatcacacaagttctggtggagatacttattctagaatcttcaaaagcatcaacgttagtgttcaaggttagtataacaagtattgcaagtgttcaaggttagtataacataatcattttaaaacgaagcaacaggtcagtgcctttgaaattaaacaaccaaaatcactgtaaattaaagtccctttgagagctcctcaaaaacaatctgaccatattttatgcttttctccaccttattttttgactttttcctccagggactgattctggactttcaacttaatgcttctctacctgttgtcatactgaagctactgctcctggaagagcatcaccaacatatccctgatggccctctctgcttcatgctccaagcacttggatgttcaccttgaaatataattattaatagggactgtccaaatacttcagctaagcaaaatagcgacctccataaaaaagcaacctgtaactatctctgaaaattttgaaaaaaactgatggtaactgataagctgctgctagcaactaccgtcgcctatttgttttgtttcagaaagttaaggtgcatgaacctctgatatagcatttgacacactgtactttacacatcacccaggaggaactcttgtgtgggtgtgggtgtgggcagggctagaaggaagaaccatgcatgctactacattcatataatctttttcagagggagggcacattgtggcggctacgagagaccgattttcctgtgtggtggtgacaacgacaccgtggagccaagtcaatgtcggcaagctgatttttcagattggaacctatggttctttttaaagatcgaatatgttctagcatctttaaaagatttgtcagaatgtaaacatttgttttgaggtcatttaagcctcaaacaaaatttcttggacttatttcgttggagggaacgagacatctcgagatctaaatgtgtatagaacatatattttttatgggtatcaaatataattgtgtgtaaagcacgtacatagtactataataatgaaa

SEQ ID NO: 210377 - DNA, 2237 bp, Zea Mays
gttatttctaactattaagtgttaattatctaatgtatttaatgaagtaacacagttagacttgcctaaagaggccagtgaagcttcactggctgcatagagaagtacttttttattatcatgtaaatgcatggttctttggaaccatttggcctatctgattaattattactataaccgggaatgggggcccgaggctataacccggactcctcgccctcgtacctcgttgctggcgaagagcgtcatcaatggcgagtggaggttcactacacagccgccggatcttggagcatcattcgcggtcttggcgcgtctacgcaactgtatcctaagggcgtcgaagaggagagacggtacgccggtggcgacaaggtacgatagatttgaactggagtgtggaggtatcgtcggccagtgccatcagcgatgggtggaggtttccgtcgagtcgaggaaggagcgcttcgtgtaaagtgccgtcaaggaagatgacgatggtggtagggatcgacgatagcgagcacaacttctacacgctgaagtgggcgcactgcagcacttcttcccgccgaccaagctgcaacactactgccttgttgtcgtcaccgccaagccctctgtcgcctccattgttcgccctgccaacctaggcaccgcgaatgtgttgtcgtatgtggggagcagacagtcaacttgcatctaggtctaaataaaatagtagtgattaaatctttgaatctgtagatcaaaccatctcaagtaattttagttttgttatgaaaatttttagctcagatgaaataattgcattttgattattaagatttaacatacatctggttctatgaggaaggaaatcataagtggagattgaagttgatcaacttgacactcgaataaaagaatcaacaaatattgcaagtgctgaaagttgtgactgctcaagtccaattgctttatcacacaagttctggtggagatacttattctagaatcttcaaaagcatcaacgttagtgttcaagggactgattctggactttcaacttaatgcttctctacctgttgtcatactgaagctactgctcctggaagagcatcaccaacatatccctgatggccctctctgcttcatgctccaagcacttggatgttcaccttgaaatataattattaatagggactgtccaaatacttcagctaagcaaaatagcgacctccataaaaaagcaacctgtaactatctctgaaaattttgaaaaaaactgatggtaactgataagctgctgctagcaactaccgtcgcctatttgttttgtttcagaaagttaaggtgcatgaacctctgatatagcatttgacacactgtactttacacatcacccaggaggaactcttgtgtgggtgtgggtgtgggcagggctagaaggaagaaccatgcatgctactacattcatataatctttttcagaggtttaagatatcaacactaatctgactttgattgtctgaaagaatttatcatgctgctgcttactgttttcggtagggggtcaatgcttactttagctgtgcaataattcctcaatattaaaccgagtttgatcaagtaccttgaagctacaagtagcagtgatttgacaggtttactactgcctgaaacatgattgtaagtgttcttagtatatagctcttctccatttcctctccaactgtcacatgtgctcatacgcttttgccttagtttattacatgtccagaacaccaacataaagaaaacctgccctcgattagcattattcagtagagagagttgtggagaaataaagttaatttgtttgttggcgcaactaattagaccacgttttcattaacaataatactaacatgtttttgttgtagggagggcacattgtggcggctacgagagaccgattttcctgtgtggtggtgacaacgacaccgtggagccaagtcaatgtcggcaagctgatttttcagattggaacctatggttctttttaaagatcgaatatgttctagcatctttaaaagatttgtcagaatgtaaacatttgttttgaggtcatttaagcctcaaacaaaatttcttggacttatttcgttggagggaacgagacatctcgagatctaaatgtgtatagaacatatattttttatgggtatcaaatataattgtgtgtaaagcacgtacatagtactataataatgaaa

SEQ ID NO: 210378 - DNA, 2332 bp, Zea Mays
gttatttctaactattaagtgttaattatctaatgtatttaatgaagtaacacagttagacttgcctaaagaggccagtgaagcttcactggctgcatagagaagtacttttttattatcatgtaaatgcatggttctttggaaccatttggcctatctgattaattattactataaccgggaatgggggcccgaggctataacccggactcctcgccctcgtacctcgttgctggcgaagagcgtcatcaatggcgagtggaggttcactacacagccgccggatcttggagcatcattcgcggtcttggcgcgtctacgcaactgtatcctaagggcgtcgaagaggagagacggtacgccggtggcgacaaggtacgatagatttgaactggagtgtggaggtatcgtcggccagtgccatcagcgatgggtggaggtttccgtcgagtcgaggaaggagcgcttcgtgtaaagatgttgtttgtttattgttattatcttatcggaagtgccgtcaaggaagatgacgatggtggtagggatcgacgatagcgagcacaacttctacacgctgaagtgggcgcactgcagcacttcttcccgccgaccaagctgcaacactactgccttgttgtcgtcaccgccaagccctctgtcgcctccattgttcgccctgccaacctaggtatgcgaatctccaatccatgtgaggattcagagctagactagatgtagcttctgacctatatgattagttatatatgtattgtaattgatcagtgcaggcaccgcgaatgtgttgtcgtatgtggggagcagacagtcaacttgcatctaggtctaaataaaatagtagtgattaaatctttgaatctgtagatcaaaccatctcaagtaattttagttttgttatgaaaatttttagctcagatgaaataattgcattttgattattaagatttaacatacatctggttctatgaggaaggaaatcataagtggagattgaagttgatcaacttgacactcgaataaaagaatcaacaaatattgcaagtgctgaaagttgtgactgctcaagtccaattgctttatcacacaagttctggtggagatacttattctagaatcttcaaaagcatcaacgttagtgttcaaggttagtataacaagtattgcaagtgttcaaggttagtataacataatcattttaaaacgaagcaacaggtcagtgcctttgaaattaaacaaccaaaatcactgtaaattaaagtccctttgagagctcctcaaaaacaatctgaccatattttatgcttttctccaccttattttttgactttttcctccagggactgattctggactttcaacttaatgcttctctacctgttgtcatactgaagctactgctcctggaagagcatcaccaacatatccctgatggccctctctgcttcatgctccaagcacttggatgttcaccttgaaatataattattaatagggactgtccaaatacttcagctaagcaaaatagcgacctccataaaaaagcaacctgtaactatctctgaaaattttgaaaaaaactgatggtaactgataagctgctgctagcaactaccgtcgcctatttgttttgtttcagaaagttaaggtgcatgaacctctgatatagcatttgacacactgtactttacacatcacccaggaggaactcttgtgtgggtgtgggtgtgggcagggctagaaggaagaaccatgcatgctactacattcatataatctttttcagaggtttaagatatcaacactaatctgactttgattgtctgaaagaatttatcatgctgctgcttactgttttcggtagggggtcaatgcttactttagctgtgcaataattcctcaatattaaaccgagtttgatcaagtaccttgaagctacaagtagcagtgatttgacaggtttactactgcctgaaacatgattggagggcacattgtggcggctacgagagaccgattttcctgtgtggtggtgacaacgacaccgtggagccaagtcaatgtcggcaagctgatttttcagattggaacctatggttctttttaaagatcgaatatgttctagcatctttaaaagatttgtcagaatgtaaacatttgttttgaggtcatttaagcctcaaacaaaatttcttggacttatttcgttggagggaacgagacatctcgagatctaaatgtgtatagaacatatattttttatgggtatcaaatataattgtgtgtaaagcacgtacatagtactataataatgaaa

SEQ ID NO: 210379 - DNA, 2183 bp, Zea Mays
ttttttttcgataccatctaatccagaaataagagaacaaggtgtaataaaaagaaatttggatggtgtcatcaatgagagaggaaatactatgtttgcttgactagtctcgcagcgcagggttagacgtgtgcggagcaggtagcacacaagggagagggagacagagggaggagggagagaggaatcttcctgtttccttgcctgggactgggactccgtctccgtctccgtctccatccccatcccctgccgttgcgcccatctcatccccgcgtcttttcctctcgactctcctctctctctctctctctctctctctctctctctgcgctgctctcggtttaggtcgaggagttgctagctagctagggggtttggatccctgctggtgctggctgctccgctgctgcgtgctagtcctactccagccccccagccccagcgaagcaggcaagcatagatagaggctggggtgggcagggaggtgcgcggacggagatccatcagatcagaatcagatcacatcatcggccctcggatgcgatgcagcaccggcgcaagcccgcttccgccgcggcgccgccggccgccaagcagccggccgcgcgcaggcccacggcgcggctgtcgctcgcgggcctcgtcgtctccatcttcctcgtcgccaccttcctgtacaacgaggacgtggtgaaggcggcctccggctcctccagctcagcaacaacagccgacgccgctgaggtaggcgtctccgggcgggcgaggtcacccgacctaagggtgctgcaggaggcggcgcaccagggggtggaagctgaggagcgggaggttggagatcgtacggaagcggagcagaagcagaagcccctgaccctccccatccccatccccgtggtggcgctggcggaggaggaactcgtggagaatactaagggaaggcagaagcagcagcagcaggaggaggagcaaacccagaagccaccgccaccgccgccgcctcctccccaggttgccgggtgcgacctgtaccggggtcggtggacgttcgacgcggccggcgagcaggcgccgctgtaccgcgagtcggagtgcgagttcctgacggagcaggtgacgtgcatgcgcaacggccgccgcgacgactcgtaccagaagtggcggtggcagcccgatggatgcgacctgcccaggtacgatgctcggttgctgcttgagcggctgcgcaacaagcggctcatgttcgtgggtgactcgctgaaccgcaaccagtgggagtccatggtgtgcctggtgcagtctgtggtgccctggggccacaagacgctgcacaagttcgtcaacaacggatcgctcaacgtgttcacggcgcatgattacaacgccaccgtggagttctactgggcgcccttcctggtggagtccaactcggatgacccgcaggcgcacagcgtcatgaaccgtgtcatcgcctggcgcgccatcgccaagcacgccaagaactggaagggcgtggactacctcgtcttcaactcatacatctggtggctcaacacattcgagatgaaagtcattcgccgtcatcagcatcagcttgaaaaggaggaggagggggtgaggtggagcaagtacgcccttgtggaccggccggtggcgtaccgggaggtgctcaagacgtgggccaggtgggtggaccgccacatcgaccccaaccgaacaagagtcttcttcatgggcatgtcgcccaaccacgtcacgccgtgggcgtggggtaacgacggcggcatcaagtgcgccatggagacgcagcccatcagcaacaaccggacggggcgactggactccccgacacctggaaccacttcctctacgcgcacatcctctcgctctcctcgtccgcccaggatcactaaccatttttgcccagcctcacaatgtcaagcgcttcctttcaactcctctccctagaccacccacccaccctggatacctattactactgctgctgctgtagatcttcgtttcattttgacaaatgcatgcaggtcttctcttgtaatttctataaaaaacatccctgatttaattttgactagcagtaccaattactttttcatttttagtgttgagagagagagagataaccatgatgattaccaatcaagaaactgtggtccggc

SEQ ID NO: 210380 - DNA, 2331 bp, Zea Mays
ttttttttcgataccatctaatccagaaataagagaacaaggtgtaataaaaagaaatttggatggtgtcatcaatgagagaggaaatactatgtttgcttgactagtctcgcagcgcagggttagacgtgtgcggagcaggtagcacacaagggagagggagacagagggaggagggagagaggaatcttcctgtttccttgcctgggactgggactccgtctccgtctccgtctccatccccatcccctgccgttgcgcccatctcatccccgcgtcttttcctctcgactctcctctctctctctctctctctctctctctctctctgcgctgctctcggtttaggtcgaggagttgctagctagctagggggtttggatccctgctggtgctggctgctccgctgctgcgtgctagtcctactccagccccccagccccagcgaagcaggcaagcatagatagaggctggggtgggcagggaggtgcgcggacggagatccatcagatcagaatcagatcacatcatcggccctcggatgcgatgcagcaccggcgcaagcccgcttccgccgcggcgccgccggccgccaagcagccggccgcgcgcaggcccacggcgcggctgtcgctcgcgggcctcgtcgtctccatcttcctcgtcgccaccttcctgtacaacgaggacgtggtgaaggcggcctccggctcctccagctcagcaacaacagccgacgccgctgaggtaggcgtctccgggcgggcgaggtcacccgacctaagggtgctgcaggaggcggcgcaccagggggtggaagctgaggagcgggaggttggagatcgtacggaagcggagcagaagcagaagcccctgaccctccccatccccatccccgtggtggcgctggcggaggaggaactcgtggagaatactaagggaaggcagaagcagcagcagcaggaggaggagcaaacccagaagccaccgccaccgccgccgcctcctccccaggttgccgggtgcgacctgtaccggggtcggtggacgttcgacgcggccggcgagcaggcgccgctgtaccgcgagtcggagtgcgagttcctgacggagcaggtgacgtgcatgcgcaacggccgccgcgacgactcgtaccagaagtggcggtggcagcccgatggatgcgacctgcccaggtacgatgctcggttgctgcttgagcggctgcgcaacaagcggctcatgttcgtgggtgactcgctgaaccgcaaccagtgggagtccatggtgtgcctggtgcagtctgtggtgccctggggccacaagacgctgcacaagttcgtcaacaacggatcgctcaacgtgttcacggcgcatgattacaacgccaccgtggagttctactgggcgcccttcctggtggagtccaactcggatgacccgcaggcgcacagcgtcatgaaccgtgtcatcgcctggcgcgccatcgccaagcacgccaagaactggaagggcgtggactacctcgtcttcaactcatacatctggtggctcaacacattcgagatgaaagtcattcgccgtcatcagcatcagcttgaaaaggaggaggagggggtgaggtggagcaagtacgcccttgtggaccggccggtggcgtaccgggaggtgctcaagacgtgggccaggccgtgggcgtggggtaacgacggcggcatcaagtgcgccatggagacgcagcccatcagcaacaaccggacggggcgactggacatcggcacggattggcgcctgcacggcgtggcgcgcggggtgctggcgcgctacctccgccgcgtgccggtgcacttcgtcgacatcacggggctgtcggagctgcgcaaggacgcgcacacctccgtgcacacgctgcggcaggggaagctgctcacaccggagcagcaggccgaccccaagacctacgccgactgcatccactggtgcctcccgggactccccgacacctggaaccacttcctctacgcgcacatcctctcgctctcctcgtccgcccaggatcactaaccatttttgcccagcctcacaatgtcaagcgcttcctttcaactcctctccctagaccacccacccaccctggatacctattactactgctgctgctgtagatcttcgtttcattttgacaaatgcatgcaggtcttctcttgtaatttctataaaaaacatccctgatttaattttgactagcagtaccaattactttttcatttttagtgttgagagagagagagataaccatgatgattaccaatcaagaaactgtggtccggc

SEQ ID NO: 210381 - DNA, 1209 bp, Zea Mays
tgccaccgctttccttatcttgggcgttggacggacggggcgagcgagcgactcgagcgtaccgccgccgccatggtggcgctcgcctcactctcatctctctgtccctgcggcatcgcccgccgccgcgctgcgtcagccacttcatccaccgccttttccatctcgtgctgcgccgtcgcgaccccgtccttctcagggaaaggaccccaggaatctagaacaccccgaagaaggctgaggaaaactgagggtgctaccaagagcctggaagattcggtcaagcgaaagatggagcagttctatgaaggggccgatggtccacctctgcgagtgctccctattggcggtcttggggaaatcggcatgaattgcatgcttgtggggaattatgatcgatatatcttgattgatgctggggttatgttcccagattatgatgagtttggtgtgcaaaagattataccagacaccacgttcatcaagaaatggagccacaaaattgaagctgttatcatcacgcatggccatgaagatcacatcggtcattccagcactcgattcaacaacaccgatttttgcatcatctttcaccatggagctaataaagaagcgtttgaaggagtttgggatcttcctctcatccaggcttaaggttttaagaattaaaaagagatttcaggctggaccttttgaagttgaacccatccgtgtaactcattcaattcctgactgttgtggcttagtgcttcgctgtggtgatgggataattttccatactggtgactggaaaattgatgaatcaccagtggatggaaaaaaatttgaccgacaagcattggaggagctctccaaagaaggtgttactcttatgatgagtgactcaacaaatgttctttcccctggaagatcaatcagcgaatctgttgttgctggttcattgctgcgacatatttcggaagcaaaaggaagagtaattacgacacaatttgcttcaaacatacatcgaattgggagcatcaaagctgctgcagatttaactggtcgaaaaatggtgtttgttggaatgtcactcaggacataccttgaagctgctttcaaggatggaaaggcaccactggatccatcaaccttggtgaccaagatgaccaaagtattgaaaccttttctcagatctttgtcgagagatgcagcagcctgactccacca

SEQ ID NO: 210382 - DNA, 1758 bp, Zea Mays
tagggtttttttcaccaaaccagcgaggcagctaccgttttgtcgccatagcactcccgccgaccccctcgccgccgccgggaatggagaccagcaccaagaagcttagcagccttcgtatcacctccctggacgacgatgacgacgagaccgagatcccgcaccagccccctcaagcaggcctctccaccgctgaagcggattatgaggacgacgacgatgaggaggaagaagccgaagtgactcttggtgtccttagcaaaccgaagcacccaggcctcctcctccgccacttgttccccagcaaggccggtggcatcccggcgtggctagacccggtgaacttgccgtcgggaaagtccagctactgtggtttctgtggcgagcctctgcagttcgtcctccagatttatgcaccaattgaagataatgtagcagccttccaccgaacgctgttcatgttcatgtgcccatccatggcatgcttgcttcgagatcaacatgaacaatggaagcacaagtacgggaatccatgtagaagcgtgaagattttccggtgccaattgccacggaataatgccttctactcagctcaacctccaaagcatgatggctctgacaaaccactctgtccaggagctcctgtatgccactggtgtggtacctggaaaggtgataaaatatgtagtagctgcaagaaaagcaaggtactgttctgagaaacatcaggcactgcattggcgaactggtcataaaaatgattgcctccagataataagttctgctgcttcaaattcagttctgccagctgtaggaatagttcctgctagcatttcttggccagaatttgagataaaaatagactacgaaggtacttttgattctgatagtggtgatgaaaacaactcgaagtcattggtgatgcaaagacatgggaaacttgatgctatgatgcagtcgtggatggaccatttcgaggctgatgctgacaacaaatgctgggcgtcttttcaagaacgggtctcaagagcaccaaatcaagtgttgaggtattgtcgagaaccaaatgctaaacctctatgggccttatctttcgggtgcccgtcagatgctgatatcccatcatgtagctactgtagaggtccattatgctatgaatttcaggtaatgccacaattgctttatttctttggtgttggaaatcaaccagactcgcttgattgggcaacaattgttgtctacacatgtcaagggtcatgtgaccaaactgttagctacaaagaggaatttgcttgggttcagttgtaccctacaacaaccacgaggcgggaattgacaggaatcataggcaagtgcatacctcctttgggtactggaattttgagataggatgtggcttcaatgtttccaggtctattggtcgtgcagggagttttaagcatcttccgaccgtggcccaatgcttggtgctcgttacagtgcctttgatccatttaggcactatccttgggcccacgaatacgtgatggcaaatagttgcatacttccatttttgtggtgggccaccattttcggtttaattgtcatcatcacatcattaaaaagctttgttgttttttgttatctaaaaggatcattggtctcagaaggtgctcgcattcatgtaaacatttccttcatcggctaaagttttgatgttggttttgattttaaatggaacattattatgttaatattccagtggtgttttcaccccca

SEQ ID NO: 210383 - DNA, 2547 bp, Zea Mays
tagggtttttttcaccaaaccagcgaggcagctaccgttttgtcgccatagcactcccgccgaccccctcgccgccgccgggaatggagaccagcaccaagaagcttagcagccttcgtatcacctccctggacgacgatgacgacgagaccgagatcccgcaccagccccctcaagcaggcctctccaccgctgaagcggattatgaggacgacgacgatgaggaggaagaagccgaagtgactcttggtgtccttagcaaaccgaagcacccaggcctcctcctccgccacttgttccccagcaaggccggtggcatcccggcgtggctagacccggtgaacttgccgtcgggaaagtccagctactgtggtttctgtggcgagcctctgcagttcgtcctccagatttatgcaccaattgaagataatgtagcagccttccaccgaacgctgttcatgttcatgtgcccatccatggcatgcttgcttcgagatcaacatgaacaatggaagcacaagtacgggaatccatgtagaagcgtgaagattttccggtgccaattgccacggaataatgccttctactcagctcaacctccaaagcatgatggctctgacaaaccactctgtccaggagctcctgtatgccactggtgtggtacctggaaaggtgataaaatatgtagtagctgcaagaaaagcaaggtactgttctgagaaacatcaggcactgcattggcgaactggtcataaaaatgattgcctccagataataagttctgctgcttcaaattcagttctgccagctgtaggaatagttcctgctagcatttcttggccagaatttgagataaaaatagactacgaaggtacttttgattctgatagtggtgatgaaaacaactcgaagtcattggtgatgcaaagacatgggaaacttgatgctatgatgcagtcgtggatggaccatttcgaggctgatgctgacaacaaatgctgggcgtcttttcaagaacgggtctcaagagcaccaaatcaagtgttgaggtattgtcgagaaccaaatgctaaacctctatgggccttatctttcgggtgcccgtcagatgctgatatcccatcatgtagctactgtagaggtccattatgctatgaatttcaggtaatgccacaattgctttatttctttggtgttggaaatcaaccagactcgcttgattgggcaacaattgttgtctacacatgtcaagggtcatgtgaccaaactgttagctacaaagaggaatttgcttgggttcagttgtaccctacaacaaccacgaggcggtaataatgtttacctattcctcggagtaactactgtccaattctgcagaaggaaattcctgcttgagccaattacagaaggccctgatatttgtcaaattgatggttgtagtgttaaattggaatacaagaggaggcaagtcaaatatggtttgtgtgacagcacgttactaacttactctactatatctgcatgagaaaggatgaaccctgtttgcatgtatactaattaatctacggattcattaatgtgtgaataagattttatttaattatgacagcaaacgtgacatgccattacaatttcgtttatgcaaaaaagtaagttgcttatagtttagcctttggtttcaatttgcactttatagaattatactggcagagctcctgacggagcacctgacggagctcgccacaggtaccaaacggcgcagcagcagttgatgtgcaacccgagtgtactgccgctcgaggaggccagtaagtgccaacaacatgaatagccaaagcagggaaatagggctggcgggggcacatgggtaacttggtcctggagcattggagaaggagcataccacaaggaaaccaacacgcttcttactctagcagagttccttgcttcctgaaggcctcatagctcagattactgggttaacgaacaactcatactttgatggagcacatgaggttcgacattatgtcaggaagcattcgaatcttggtcgtattgtgcttgaagttgctaaggactcgcaaatcccccgccaagcaaactgctagaaatcttttcagaggtggagatgatgaagatgatagtgctgatgccgacacaaatgatcctgttgtaccttggtcattaggtagagtaggagttgggcatatggtgtacatctccggtttgacttgtgccttgagttcaacaaatatgaaagtgctgagagaggtggcatctagaggacgtcatgtcgaacgtgtgaagaatttttttagaaatatgtatatttgtgcgaaactttttagaaacttgactccattttattttctatgttactctcggctttgtttcctatcctttccaatgacttgctatgcatttgcactgtatttggcatgtttaaaactgctacacaaaacttgctatatattttgtccaaaaatactatatccttgttatgattgattgatctttattttgtctgctcttctattcttgcgtggg

SEQ ID NO: 210384 - DNA, 1457 bp, Zea Mays
gccgtggcaccaccatccatgccgaggcgaggggttgttggtggcattgattatggattcaccggtgaagttaaaaaaatagatgtttcacggataagagaaaggcttgatagagacagcatagttgttgtgagcaacatggggtactccagcgcaggagaggtcttgaattgcaatacctatgaagttgctacagcatgtgctttatccatagaggcggacaagcttatttgcattgttgatggccaaatatttgatgagcatggttgttgatgaggaggacatcaatcatgtccgctgcctcccaatgaaacatggtacagaacatggtatgaatggaagggaccatattaatgggtatactgcatcttttcggaatggtgtgggtttcaatgatggaaatggtctgtctggtgagcaagggtttgctattggcggggaggagcgcttgagcaggtcaaatggttacctatcagagttagcagcggcagcatacgtatgccatggtggtgtccaaagagtgcatatcatagatggtactgttggtggagcattgttgctagaactattcactagagatggtgttggaacgatgatagctagggatatgtatgaaggaacaagaatggccagagaggaagatctttctggtattagaaagatcattcgtcctctagaagaatctggtgtcctggtgcgccgaacagatcaagagcttcttgaagcattgacatcatttattgtcgtggaaagagatggctcaatcatagcgtgtgctgccctcttcccttttcttgaggataaatctggggaagttgctgctattgctgtatctgaagaatgtcgaggccaaggtcaaggagacaaattacttgattacgttgagaagaaggctttgtcccttggacttgagaaactattcttgcttaccacaaggacagcggattggtttgttcgtcgcggctttaaggagtgctcgttcgattccctgcctttggtgaggagaaaacgtatcgacctctcgcgcgggtcaaaatattacatgaagtggctccaggcagcagaggttgggcatatggctgccgacggttttgccatgagatgatgagtgctgcaaacaagcatctctacgaatctagtcgatggacgtgaggtttctttatgagctgtgcagtcgcttatacatcgtagaaatgtatatttattgtgcaagaaaataatcagtcaataatcgaagatgtggttgtgtttcttgagttgatttcttcttgagcatagcaatgctcaaaagagttgttgatctgcacactgctgacaaagcctgcacgactgcgctttttaaactgataaatacttagctgcaaattcagcaatgttcttgttgagctccctccatcgcctcctctagaaaaaatgcgtatgttacgcactgtcatatctatcatgttcaactaaga

SEQ ID NO: 210385 - DNA, 1897 bp, Zea Mays
cttcttcccaatgggtttcatttcattctctatccagtgtgagagatgttctgagtaatctatatgattaggcaggatatatcccttcttcatggtctcgggatcaaatttgttcttgttcctggaacacatgtccagattgataagctcttggctgagagagggaagaaggctaagtatgctggtcgctaccgcattactgattcagattcattagatgctgcaatggaggcagctggccgaatacggctaactatagaagcgaagctgtctcctggaccaccaatgttaaatctccgtaggcatggtgttaatggccgttggcatgaaatctctgataatgttgcaagtggaaatttccttggtgctaagaggcgaggggttgttggtggcattgattatggattcaccggtgaagttaaaaaaatagatgtttcacggataagagaaaggcttgatagagacagcatagttgttgtgagcaacatggggtactccagcgcaggagaggtcttgaattgcaatacctatgaagttgctacagcatgtgctttatccatagaggcggacaagcttatttgcattgttgatggccaaatatttgatgagcatggtagagtcaatcgttttatgtctattgaagaagcagatatgttgatcagaacacgtgctaagcagagtgaaattgctgcaaattatgtgaaggttgttgatgaggaggacatcaatcatgtccgctgcctcccaatgaaacatggtacagaacatggtatgaatggaagggaccatattaatgggtatactgcatcttttcggaatggtgtgggtttcaatgatggaaatggtctgtctggtgagcaagggtttgctattggcggggaggagcgcttgagcaggtcaaatggttacctatcagagttagcagcggcagcatacgtatgccatggtggtgtccaaagagtgcatatcatagatggtactgttggtggagcattgttgctagaactattcactagagatggtgttggaacgatgatagctagggatatgtatgaaggaacaagaatggccagagaggaagatctttctggtattagaaagatcattcgtcctctagaagaatctggtgtcctggtgcgccgaacagatcaagagcttcttgaagcattgacatcatttattgtcgtggaaagagatggctcaatcatagcgtgtgctgccctcttcccttttcttgaggataaatctggggaagttgctgctattgctgtatctgaagaatgtcgaggccaaggtcaaggagacaaattacttgattacgttgagaagaaggctttgtcccttggacttgagaaactattcttgcttaccacaaggacagcggattggtttgttcgtcgcggctttaaggagtgctcgttcgattccctgcctttggtgaggagaaaacgtatcgacctctcgcgcgggtcaaaatattacatgaagtggctccaggcagcagaggttgggcatatggctgccgacggttttgccatgagatgatgagtgctgcaaacaagcatctctacgaatctagtcgatggacgtgaggtttctttatgagctgtgcagtcgcttatacatcgtagaaatgtatatttattgtgcaagaaaataatcagtcaataatcgaagatgtggttgtgtttcttgagttgatttcttcttgagcatagcaatgctcaaaagagttgttgatctgcacactgctgacaaagcctgcacgactgcgctttttaaactgataaatacttagctgcaaattcagcaatgttcttgttgagctccctccatcgcctcctctagaaaaaatgcgtatgttacgcactgtcatatctatcatgttcaactaaga

SEQ ID NO: 210386 - DNA, 2212 bp, Zea Mays
caaccccaaccacggacccggactggctgtccgcctatcacccgccactattgctcttgcagcctgcttctctccccccttctcgccgcgtacgcacgggtcgcacgcacgcacaccccgttcgtgccacactgccacctaacccccctcccccacgatcccgaggctactagcactaggcgtcgtcctcggcagcaacggcggctgggctcccgccgatggcggcgtccctcgccgccgccgcctctcgcctcgccgccaccggcggcgagttgtcgtggtcggcgcggccctgccccgggagtctcgtggcgagcttccccagcgccgggcggctccggcgccccgcttcgggcgtgcggtgcggaggtggggttttgcccgcggccgcggggacgggggcggaagcggaggaagggggccgcttcgttggctggttccgggaggcgtggccttacatccggggccaccggggcagcaccttcgtcgtcgtcatctccggggaggtcatcgccggcccgcacctcgacggcattctgcaggatatatcccttcttcatggtctcgggatcaaatttgttcttgttcctggaacacatgtccagattgataagctcttggctgagagagggaagaaggctaagtatgctggtcgctaccgcattactgattcagattcattagatgctgcaatggaggcagctggccgaatacggctaactatagaagcgaagctgtctcctggaccaccaatgttaaatctccgtaggcatggtgttaatggccgttggcatgaaatctctgataatgttgcaagtggaaatttccttggtgctaagtacctatgaagttgctacagcatgtgctttatccatagaggcggacaagcttatttgcattgttgatggccaaatatttgatgagcatggtagagtcaatcgttttatgtctattgaagaagcagatatgttgatcagaacacgtgctaagcagagtgaaattgctgcaaattatgtgaaggttgttgatgaggaggacatcaatcatgtccgctgcctcccaatgaaacatggtacagaacatggtatgaatggaagggaccatattaatgggtatactgcatcttttcggaatggtgtgggtttcaatgatggaaatggtctgtctggtgagcaagggtttgctattggcggggaggagcgcttgagcaggtcaaatggttacctatcagagttagcagcggcagcatacgtatgccatggtggtgtccaaagagtgcatatcatagatggtactgttggtggagcattgttgctagaactattcactagagatggtgttggaacgatgatagctagggatatgtatgaaggaacaagaatggccagagaggaagatctttctggtattagaaagatcattcgtcctctagaagaatctggtgtcctggtgcgccgaacagatcaagagcttcttgaagcattgacatcatttattgtcgtggaaagagatggctcaatcatagcgtgtgctgccctcttcccttttcttgaggataaatctggggaagttgctgctattgctgtatctgaagaatgtcgaggccaaggtcaaggagacaaattacttgattacgttgagaagaaggctttgtcccttggacttgagaaactattcttgcttaccacaaggacagcggattggtttgttcgtcgcggctttaaggagtgctcgttcgattccctgcctttggtgaggagaaaacgtatcgacctctcgcgcgggtcaaaatattacatgaagtggctccaggcagcagaggttgggcatatggctgccgacggttttgccatgagatgatgagtgctgcaaacaagcatctctacgaatctagtcgatggacgtgaggtttctttatgagctgtgcagtcgcttatacatcgtagaaatgtatatttattgtgcaagaaaataatcagtcaataatcgaagatgtggttgtgtttcttgagttgatttcttcttgagcatagcaatgctcaaaagagttgttgatctgcacactgctgacaaagcctgcacgactgcgctttttaaactgataaatacttagctgcaaattcagcaatgttcttgttgagctccctccatcgcctcctctagaaaaaatgcgtatgttacgcactgtcatatctatcatgttcaactaaga

SEQ ID NO: 210387 - DNA, 2363 bp, Zea Mays
ccaaccccaaccacggacccggactggctgtccgcctatcacccgccactattgctcttgcagcctgcttctctccccccttctcgccgcgtacgcacgggtcgcacgcacgcacaccccgttcgtgccacactgccacctaacccccctcccccacgatcccgaggctactagcactaggcgtcgtcctcggcagcaacggcggctgggctcccgccgatggcggcgtccctcgccgccgccgcctctcgcctcgccgccaccggcggcgagttgtcgtggtcggcgcggccctgccccgggagtctcgtggcgagcttccccagcgccgggcggctccggcgccccgcttcgggcgtgcggtgcggaggtggggttttgcccgcggccgcggggacgggggcggaagcggaggaagggggccgcttcgttggctggttccgggaggcgtggccttacatccggggccaccggggcagcaccttcgtcgtcgtcatctccggggaggtcatcgccggcccgcacctcgacggcattctgcaggatatatcccttcttcatggtctcgggatcaaatttgttcttgttcctggaacacatgtccagattgataagctcttggctgagagggaagaaggctaagtatgctggtcgctaccgcattactgattcagattcattagatgctgcaatggaggcagctggccgaatacggctaactatagaagcgaagctgtctcctggaccaccaatgttaaatctccgtaggcatggtgttaatggccgttggcatgaaatctctgataatgttgcaagtggaaatttccttggtgctaagaggcgaggggttgttggtggcattgattatggattcaccggtgaagttaaaaaaatagatgtttcacggataagagaaaggcttgatagagacagcatagttgttgtgagcaacatggggtactccagcgcaggagaggtcttgaattgcaatacctatgaagttgctacagcatgtgctttatccatagaggcggacaagcttatttgcattgttgatggccaaatatttgatgagcatggtagagtcaatcgttttatgtctattgaagaagcagatatgttgatcagaacacgtgctaagcagagtgaaattgctgcaaattatgtgaaggttgttgatgaggaggacatcaatcatgtccgctgcctcccaatgaaacatggtacagaacatggtatgaatggaagggaccatattaatgggtatactgcatcttttcggaatggtgtgggtttcaatgatggaaatggtctgtctggtgagcaagggtttgctattggcggggaggagcgcttgagcaggtcaaatggttacctatcagagttagcagcggcagcatacgtatgccatggtggtgtccaaagagtgcatatcatagatggtactgttggtggagcattgttgctagaactattcactagagatggtgttggaacgatgatagctagggatatgtatgaaggaacaagaatggccagagaggaagatctttctggtattagaaagatcattcgtcctctagaagaatctggtgtcctggtgcgccgaacagatcaagagcttcttgaagcattgacatcatttattgtcgtggaaagagatggctcaatcatagcgtgtgctgccctcttcccttttcttgaggataaatctggggaagttgctgctattgctgtatctgaagaatgtcgaggccaaggtcaaggagacaaattacttgattacgttgagaagaaggctttgtcccttggacttgagaaactattcttgcttaccacaaggacagcggattggtttgttcgtcgcggctttaaggagtgctcgttcgattccctgcctttggtgaggagaaaacgtatcgacctctcgcgcgggtcaaaatattacatgaagtggctccaggcagcagaggttgggcatatggctgccgacggttttgccatgagatgatgagtgctgcaaacaagcatctctacgaatctagtcgatggacgtgaggtttctttatgagctgtgcagtcgcttatacatcgtagaaatgtatatttattgtgcaagaaaataatcagtcaataatcgaagatgtggttgtgtttcttgagttgatttcttcttgagcatagcaatgctcaaaagagttgttgatctgcacactgctgacaaagcctgcacgactgcgctttttaaactgataaatacttagctgcaaattcagcaatgttcttgttgagctccctccatcgcctcctctagaaaaaatgcgtatgttacgcactgtcatatctatcatgttcaactaaga

SEQ ID NO: 210388 - DNA, 2348 bp, Zea Mays
taaaatgcccctcctctgctcctccccagtctccacttcccccaaaccccggccgaccaaccccaaccacggacccggactggctgtccgcctatcacccgccactattgctcttgcagcctgcttctctccccccttctcgccgcgtacgcacgggtcgcacgcacgcacaccccgttcgtgccacactgccacctaacccccctcccccacgatcccgaggctactagcactaggcgtcgtcctcggcagcaacggcggctgggctcccgccgatggcggcgtccctcgccgccgccgcctctcgcctcgccgccaccggcggcgagttgtcgtggtcggcgcggccctgccccgggagtctcgtggcgagcttccccagcgccgggcggctccggcgccccgcttcgggcgtgcggtgcggaggtggggttttgcccgcggccgcggggacgggggcggaagcggaggaagggggccgcttcgttggctggttccgggaggcgtggccttacatccggggccaccggggcagcaccttcgtcgtcgtcatctccggggaggtcatcgccggcccgcacctcgacggcattctgcaggatatatcccttcttcatggtctcgggatcaaatttgttcttgttcctggaacacatgtccagattgataagctcttggctgagagagggaagaaggctaagtatgctggtcgctaccgcattactgattcagattcattagatgctgcaatggaggcagctggccgaatacggctaactatagaagcgaagctgtctcctggaccaccaatgttaaatctccgtaggcatggtgttaatggccgttggcatgaaatctctgataatgttgcaagtggaaatttccttggtgctaagaggcgaggggttgttggtggcattgattatggattcaccggtgaagttaaaaaaatagatgtttcacggataagagaaaggcttgatagagacagcatagttgttgtgagcaacatggggtactccagcgcaggagaggtcttgaattgcaatacctatgaagttgctacagcatgtgctttatccatagaggcggacaagcttatttgcattgttgatggccaaatatttgatgagcatggtagagtcaatcgttttatgtctattgaagaagcagatatgttgatcagaacacgtgctaagcagagtgaaattgctgcaaattatgtgaaggttgttgatgaggaggacatcaatcatgtccgctgcctcccaatgaaacatggtacagaacatggtatgaatggaagggaccatattaatgggtatactgcatcttttcggaatggtgtgggtttcaatgatggaaatggtctgtctggtgagcaagggtttgctattggcggggaggagcgcttgagcaggtcaaatggttacctatcagagttagcagcggcagcatacgtatgccatggtggtgtccaaagagtgcatatcatagatggtactgttggtggagcattgttgctagaactattcactagagatggtgttggaacgatgatagctagggatatgtatgaaggaacaagaatggccagagaggaagatctttctggtattagaaagatcattcgtcctctagaagaatctggtgtcctggtgcgccgaacagatcaagagcttcttgaagcattgacatcatttattgtcgtggaaagagatggctcaatcatagcgtgtgctgccctcttcccttttcttgaggataaatctggggaagttgctgctattgctgtatctgaagaatgtcgaggccaaggtcaaggagacaaattacttggtttgttcgtcgcggctttaaggagtgctcgttcgattccctgcctttggtgaggagaaaacgtatcgacctctcgcgcgggtcaaaatattacatgaagtggctccaggcagcagaggttgggcatatggctgccgacggttttgccatgagatgatgagtgctgcaaacaagcatctctacgaatctagtcgatggacgtgaggtttctttatgagctgtgcagtcgcttatacatcgtagaaatgtatatttattgtgcaagaaaataatcagtcaataatcgaagatgtggttgtgtttcttgagttgatttcttcttgagcatagcaatgctcaaaagagttgttgatctgcacactgctgacaaagcctgcacgactgcgctttttaaactgataaatacttagctgcaaattcagcaatgttcttgttgagctccctccatcgcctcctctagaaaaaatgcgtatgttacgcactgtcatatctatcatgttcaactaaga

SEQ ID NO: 210389 - DNA, 1632 bp, Zea Mays
taattaattacggtgtcaactactattttagttcaatttatcccccttaaactaattacgtcgtaacgccgttttagtctgatattgcatttgtagaggatatatcccgtgcaatcacttattttggtgcaagcgtgcaatcaaattatccagagcatccaatctagatccaacggtttcatatggaaggggttaaaagtaaaataggtactatgttttaggtggaatgggttaaatataaaataacagtcatcattagatctagatcggatgcaccagatcgcttgattgcacgcttgcaccaggataagtgattgcacatgatatgtcctcgcatttgtaggtccaaacgattggttaccttgacggagatggtaggctgggcgtggtggtgatcatagaggacggagtagtcgccgatgacaacaacgttggattggatctcctccgacacacacttagtccctgacggcgcaatctccagccataccgccccggcccccgccgccatccaccacacggccgccgccgccaccgcggcccacgcgccacctcgcgccatcgtctcttcctgccgcaccaccacaacgaacagccccaagcgccactacgtccatctcaacgcgattcgataggcccataaacatgcgtggcgcaacaggctcaaagaaaataccaagttgggctttattggacggagattgtttggcccagtgactctacccacctccagtttccacttagaaaagaataatttctcccgaaaaagggtgaagagcagaacgacgaggagattgcttggtgggaggagttggtgaggagaggtcgcgaccatggagaaccttgctctgctttggggcatcatcggcccgggcgtgtccggcgccatcttcggggccggatggtggttctgggtggacgcggtcgtttgcagcgcggtccaggtctccttcctccactaccttccagagtgaagctctggctttttgtggcatatgtcgtttcttttgtctgtttagctggatccgtgggtttattggtgcaagatgcactgacgaacaagggcccttctgtctggactggtgttgctggcgttctgcaatgtgttcttgtgttgataagcggcctggtgtattggacatgccactcagaagattaagggcgtaatgtcatgagcagacttgcaaggttggtcacagttgtgtgaaggaaattatttctggcaacatatgattttgtgtgatggaaatgacggacactgttcactgctgaatgggatgactagatgtttcatctgtgcatatctgacttttggaaaatgatgtttcttaacaccggtgcatgtgttagccccagcttcttgtgagttgccaatctgtgatgcggtcgtgatcatgcaaatcttttggctaaagctgaaaccggctgcagcaacaagctagtgctactatttacaccatgcctcctagtcaattacagttgacttcatttaagtcgagacgctgtctcggcctgtttcatcgttactccaccgtcccacatatatgaccgtaaccactttttgttttagttccataatataagaagtgttcttcctagacatgcatacatggatacatgagtggttacgcc

SEQ ID NO: 210390 - DNA, 908 bp, Zea Mays
gtcagattttacagagtcacttgtacttgtttccttgttaggaggcgaacatcttacaggtaaaatctgatgtgccacaaatgaggacaaggtaggacttcttcacttttgaaccatcagaagaaaggcatgctcacaagcatagacatcgaatctataggattgttcaaactccattgttacatggtaactgaatatgaggccagtcaaccaatccaccagcaaaaccagcacgcatggcaaagagtgaagctctggctttttgtggcatatgtcgtttcttttgtctgtttagctggatccgtgggtttattggtgcaagatgcactgacgaacaagggcccttctgtctggactggtgttgctggcgttctgcaatgtgttcttgtgttgataagcggcctggtgtattggacatgccactcagaagattaagggcgtaatgtcatgagcagacttgcaaggttggtcacagttgtgtgaaggaaattatttctggcaacatatgattttgtgtgatggaaatgacggacactgttcactgctgaatgggatgactagatgtttcatctgtgcatatctgacttttggaaaatgatgtttcttaacaccggtgcatgtgttagccccagcttcttgtgagttgccaatctgtgatgcggtcgtgatcatgcaaatcttttggctaaagctgaaaccggctgcagcaacaagctagtgctactatttacaccatgcctcctagtcaattacagttgacttcatttaagtcgagacgctgtctcggcctgtttcatcgttactccaccgtcccacatatatgaccgtaaccactttttgttttagttccataatataagaagtgttcttcctagacatgcatacatggatacatgagtggttacgcc

SEQ ID NO: 210391 - DNA, 684 bp, Zea Mays
taggaggcgaacatcttacagagtgaagctctggctttttgtggcatatgtcgtttcttttgtctgtttagctggatccgtgggtttattggtgcaagatgcactgacgaacaagggcccttctgtctggactggtgttgctggcgttctgcaatgtgttcttgtgttgataagcggcctggtgtattggacatgccactcagaagattaagggcgtaatgtcatgagcagacttgcaaggttggtcacagttgtgtgaaggaaattatttctggcaacatatgattttgtgtgatggaaatgacggacactgttcactgctgaatgggatgactagatgtttcatctgtgcatatctgacttttggaaaatgatgtttcttaacaccggtgcatgtgttagccccagcttcttgtgagttgccaatctgtgatgcggtcgtgatcatgcaaatcttttggctaaagctgaaaccggctgcagcaacaagctagtgctactatttacaccatgcctcctagtcaattacagttgacttcatttaagtcgagacgctgtctcggcctgtttcatcgttactccaccgtcccacatatatgaccgtaaccactttttgttttagttccataatataagaagtgttcttcctagacatgcatacatggatacatgagtggttacgcc

SEQ ID NO: 210392 - DNA, 961 bp, Zea Mays
cccaacaaggcctgccactaactccgcgcacgcaacggcgaggtcgacgccgccggtcggcgatcgcgcactctgtctctgccggagtgccgccgtgctggatcttccgcccggcgctcctcagtcgaccttccgctcccgcccatggcacgaccctaagcccgccgctgtcggtggcggcggctggctctcagagtgggggtgggaccttatgctcggatcgatcgccgcgttctacgccgtcatggcgccctacaccaaggtggaggagagcttcaacgtgcaggccatgcatgatattctttatcacacttatcacatcgagatgtatgtcatttagaatttcctggagttgttcttcgaacattcatagctagactaacattgagttgtgttactttgacgagtttgagacttctcagagctcagatactctaaggaggagcaaattcccgttgaagaatttgagagaaggaatttcacctatctactgaagtgaaagaacccaaggtgtttgcacctgggaacttgagagaccctgacattctttcactgaattggcctggttgtccttgaggacaggacagcgagacacccaggttcctgtcgcaagcaggaccacaaaccgccaacggtgaagatgtgcagtcgtctgtgtgatacggagtagtatgggtcttgccatgaagctacctgcaaatctaggatgggggttcggttctcccccagatctcaacgcagaaaccaaaccacagcttttaagagattgccatttttagttgaaaatttatgtaccgttttagacccggaagaaagtacacgcggcctcatcttgaaatggttttcttttttgggtgggtggggggcataacagtcttatataaccagcttgctcaatttaatttttttcctgtttgagacatctttcggattttatatataacaggagctgtcagacttt

SEQ ID NO: 210393 - DNA, 1096 bp, Zea Mays
gtttgcttacattgggccaggcctaacaaacagtagcccaacaaggcctgccactaactccgcgcacgcaacggcgaggtcgacgccgccggtcggcgatcgcgcactctgtctctgccggagtgccgccgtgctggatcttccgcccggcgctcctcagtcgaccttccgctcccgcccatggcacgaccctaagcccgccgctgtcggtggcggcggctggctctcagagtgggggtgggaccttatgctcggatcgatcgccgcgttctacgccgtcatggcgccctacaccaaggtggaggagagcttcaacgtgcaggccatgcatgatattctttatcacacttatcacatcgagatgtatgtcatttagaatttcctggagttgttcttcgaacattcatagaccttgtagtcttgatgtgaaattatggcagtaacatgatgtaccgactactgtctgcatttttcaggagcatttgttatctctattctctcatcaccgctagactaacattgagttgtgttactttgacgagtttgagacttctcagagctcagatactctaaggaggagcaaattcccgttgaagaatttgagagaaggaatttcacctatctactgaagtgaaagaacccaaggtgtttgcacctgggaacttgagagaccctgacattctttcactgaattggcctggttgtccttgaggacaggacagcgagacacccaggttcctgtcgcaagcaggaccacaaaccgccaacggtgaagatgtgcagtcgtctgtgtgatacggagtagtatgggtcttgccatgaagctacctgcaaatctaggatgggggttcggttctcccccagatctcaacgcagaaaccaaaccacagcttttaagagattgccatttttagttgaaaatttatgtaccgttttagacccggaagaaagtacacgcggcctcatcttgaaatggttttcttttttgggtgggtggggggcataacagtcttatataaccagcttgctcaatttaatttttttcctgtttgagacatctttcggattttatatataacaggagctgtcagacttt

SEQ ID NO: 210394 - DNA, 1673 bp, Zea Mays
gtctcattcccgcccacgcgcttctatctctcaccagcagaccgcgccgccgccgcgccaccgctctccggatcatcggccgtccacctcctcctcctcctcgcccgctcaccggccgtccctgctgcggtgccgtccacttcctctccctgccgccgtagctcgcacaacccccatctcgccctcttccttcttgccacaccgtcgctaccaccgccccgcgctgagagggaccgacgccatggacctcctcgagaagatgatggcgcttgactctgcacaggatcagctttggtcaaatctatctcagcaagccaatgatgactgaagccgatggagagacagctactttatttccaaaatcagcaaggctcaggaacttgacatactctgcaccactgtatgttgatgtgtcatacagagtaatgaagaaaggacatgactgtgaggaagttacagagactgcagagtatccaaaagtgtttattgggaaggttccaatcatgttgcgctctagttactgcacactgtatcaataatctgagaaggatctcactgaacttggggagtgtccttatgaccaaggtggttatttcattatcaatggaagcgaaaaggttcttattgcccaggagaagatgagcactaaccatgtctatgtttttaagaagaggcatcctaataaatttgcatatgtggctgaagtccgttccatggctgagaaccagaacagaccagccagcggcatgtttgtacggatgctttcacgagcaggagcaaaaggggagattggtttccaatgtgacaataaccagggcgagtgtcgggctaaattttcttgccatcttgactgttttgcttgggtgaagcgagacagttaccttccacaaggaagccaaggtctaaagcacacttgcaggctgttacaaaagccaagctacgttacgatcctctggaggttaatccagaagatatggttcgctttgcaatggagcagccacagacaatggcttcgtattctgtatcagacgatgttgcaacatactatctatacatgacttatgtccatcctttcatcttttctcttgcaaccataatacctatgttacctgatgaggtactgtggaaaggaagtgggacactttgtgaaattctgctaatggttcaggcattcaaggctggaggcacataactatgaatagtgcatcttctaaaatctctcactaaatcagccagctcttctcactaaatcagccagctcttctgcttgtcccattgtcatccagatacttatttgggatgttgaagtacaaccaaatagacatgctgtcctaggagcaagcgagtctcgccctgatctggaatgggtttacaagccccatataataaatcataacagtgcgggagcattttttggatgtccttcacacagatgcaggcaatgaaagaaacagaaaatagacaatgttagcgcggagtgagacagataggaattgggatagaatcatccttgttctcagatcagctgtacattctttattatggtagtatatcatacctgtacgagtagactgacggttgcttccaaatactccatgtgtttgaaatatgtattgtatgtgatattctgtgttgcatgtgattttatgtttgtctaattttttatttctgta

SEQ ID NO: 210395 - DNA, 1685 bp, Zea Mays
atgcatatgcctgcttcttacttgtacaattcagggggtgtagtaccacagtgaggcaaactgactttataaaatgttaaatctgtgatatgttccttatactgcagggatcatctggtcaatatatccgtgctactctaccttatattcgtcgaacttaccgtaagaacctaggggacaaactgcacttattaatgttagtgacaaaacctgaagcatctccaaaaatccacagaatttatggcttcaaacatccttgctctatttttaggcgtaccgtctagcattggcagcactaatcacctgagaacttcttcatgacattctttctttgtctcacttctagcggagtaacattctgctatgtttcttatgtaaaaaagccccctttttataacaggaatgattttttgtgttttagaaaatggtaaagaacaattggcttgtctgtcgtgtactggatacgtacttcgagatcagaattcacaaaaaacaacagtcaaatctgttacacatagttgtactcatcatggagatgtgaaggaaatcccttatatggtaggaaagatgcagactgtttaagaagattataggaatatatatagcaaaatcattatcttgattacccacttttattgattggctgattgctttttcaagatgcagatatttctcaattaagtttatatacaatgtagtatttttattttattttttgtagtgcgttggagaagacattgatgatttgcagtacacacctaaacccgaatttgaggggtattttagagttaagaatgttcaaactgaggagattggtttccaatgtgacaataaccagggcgagtgtcgggctaaattttcttgccatcttgactgttttgcttgggtgaagcgagacagttaccttccacaaggaagccaaggtctaaaggctgttacaaaagccaagctacgttacgatcctctggaggttaatccagaagatatggttcgctttgcaatggagcagccacagacaatggcttcgtattctgtatcagacgatgttgcaacatactatctatacatgacttatgtccatcctttcatcttttctcttgcaaccataatacctatgttacctgatgaggtactgtggaaaggaagtgggacactttgtgaaattctgctaatggttcaggcattcaaggctggaggcacataactatgaatagtgcatcttctaaaatctctcactaaatcagccagctcttctcactaaatcagccagctcttctgcttgtcccattgtcatccagatacttatttgggatgttgaagtacaaccaaatagacatgctgtcctaggagcaagcgagtctcgccctgatctggaatgggtttacaagccccatataataaatcataacagtgcgggagcattttttggatgtccttcacacagatgcaggcaatgaaagaaacagaaaatagacaatgttagcgcggagtgagacagataggaattgggatagaatcatccttgttctcagatcagctgtacattctttattatggtagtatatcatacctgtacgagtagactgacggttgcttccaaatactccatgtgtttgaaatatgtattgtatgtgatattctgtgttgcatgtgattttatgtttgtctaattttttatttctgta

SEQ ID NO: 210396 - DNA, 1709 bp, Zea Mays
ctaatgtgaactattcaatcagtttcttcgctagaacatccaacggctgagatcgcgtgcgcgcaaccctaggcaccagatcacagatctgagatcgagcgaagctaagctttttcatcgagatggtgcttgtactgcatgctaacagtggtaacaaaaatgcattcaaaacactaattgccgcagaatacagcggtgtcaaggttgagttggtgaaggactttcaaatgggtgtctccaacaaaactccagagttcctcaagatgaaccctattgggaagattcctgtcctggagactcctgatggtcctgtttttgagagcaatgcaattgcaagatatgttactcgcttgaaggctgataacccactttatggatcttcactgattgattatgcccatattgagcaatggattgactttgctgcaacagagattgatgcaaacattggaaagtggttgtacccacggatggggttttatccccatgctggtgtggtagaagaatcaactattgctgccttgaagagagcattgggttctctgagcacccatcttgcatcaaacacattccttgttgggcattcagtgactctcgcggatatcgtgatgacatgcaatctctgtatgggatttagccgtatcttgactaagagttttacctcagagttccctcatgttgagaggtatttctggaccatggttaaccaaccaaacttcaaaaaggtcattggtgacgttaagcaggcagaagctgtgccacttgttccacagaaggctgctccagccaaagtgcagaagcctaaggaaaccaaaaaggaggctccgaagcccaaggtaactgagaaatcagcagaagaagaggaggcaccaaagcctaagccaaagaaccctcttgatttgcttcctcctagcaagatgattcttgatgattggaagaggctgtactctaacacgaaaaccaacttccgtgaggttgctattaaaggtttctgggatatgtacgacccagagggctactccctgtggttctgtgactacaagtacaatgatgagaacacagtgtcgtttgtgaccatgaacaaggttggtggcttcctgcagcggatggacctgtgccgcaaatacgcctttggcaagatgcttgtggtaggctctgagccccctttcaaggtcaaggggctctggctcttcaggggctcagaaattcccaagtttgtcatggacgaagtctatgacatggagctttatgagtggaccaaggttgacctctctgatgaggcacagaaggagcgggtcaatgccatgattgaggaccaggagccattcgagggcgaggccttgctggatgcaaaatgcttcaagtgaggaaagagtttttgggtccaattctaaaacagccatggatgatagcttttgatatggcgtgctggttatgattatgctgtggagttttggccatgttaacgggaggtcgtgctcgcgaaaccttctgcattatcgcatcggaatcgtttgtcatgtgcatcctagtgaatagatatattatgaaaatatatctcctgaaatttaatgatatttattttattttataacgatttatactttttatttaatatatattagtcaaacttgacatgctttaattcaattcgatattgtgctagaatcgtaattttttcaggtagcacttggttataattcgagtac

SEQ ID NO: 210397 - DNA, 399 bp, Zea Mays
agagcttccctgtccgctctcacgaagcctcctcctccccgtctccctcgcaaagccaccgcctcctcgtctccctctcgaagccgtcgccgcccactgcctcgcactctcttggactggatctgtcgtcgtccggtgattttgctgaacacgagcacttcctgcttcctggcaccgcgcgctcgatctccctcctcttcgctggagcctgggcccgaggatcctgcaagccggcagctggagaaaggcgagcgacatggcgacctccacaatgcggctggtgaaggacgagaaagaacaccagtatgcccgggactctgttctgctaatgcgtttgtgccatgtggagtatttgcttactctattctagcttttgtaataaagtatattggatgatgt

SEQ ID NO: 210398 - DNA, 2262 bp, Zea Mays
ggcaaaccgtattgttggcttcgcctagggtctcccttctactgtcgccgcaacctgaccaacctcccttctactgcccgcctagggtctcccttctactgccgccgcaacggcgcaacctcccttctactgccgccgcaacctcccttcttcgagtcccatccgacctagccctgcaacccgccggacgacgagcagtgaggcccgcggccgagatggaccggtacctgacggtggagcggccacggaacgagtcaaccatcgaagagaacgggatccgcatcaccgcgcagggcctcatctgcaactatgtctcctacgctacctccctcctccaggtgcctgggcttgtcctcaccatcgccgtcgtatcgtattgtacttaggatgcgctgttctgttcgagtcccgtccctgtcgattcgaagagatccccagcaacgtgagggaggtgttcctgaccggccccacctccaagttcggcagggccatcgcgctctacctctgcaggaagaagatcagagtcctgatgttcacggtgtcgtcggagaggttcctgaagatccagagggaggcaccgccggagtaccagcagtacctcgtgcaggtgaccaagtaccaggccgcacagaactgcaaggctgccaggtcatggtgatttcacgtccgttaggctcgagaggtggactcaaacatccaagttttgcaagttttgatgttggatgttaaatttctatgctcacccctcgtttggttattgatgtactatttccatctcatgtcacaaatttggcataaggaatgggtattgatggctactgactgtgtttgtttccacgtattatacatgtacaatggaacagttgatcatagttttgcatgaactattggcgttggctatctaaaaggacagaaaggcagacatgagcaacagatcccgctccatgggctgaaactgggattcgtgatggcgcccctcttagtcgtgtgtagggcgagctgctgccatggtggctttttcttgcgggtgtgagctccgctcgccgccggtcttggacgccgtggctaggctcctaccacccctccctccacccgggactccacgctgccaccgccacacgacagtacgcatacactcttcttcctcccctcgctctggatggctggcgtccgctccctcagcgcctccgcccatgcccggctcccgcacttgccggctccccgatggagatgaatgaagaaaggaagatctgcaagaataaagtcgaggcggaggcttggtttactggtcttagtgccttgatatgtcgaagacagcatggatcccaggtccaacatatagatggaatccggattgctggacttcctattgattttccaagatcggagatgcaatttcatactgtgcaaaagcaatttcgctatgcaagtcacgcatacagaacctgaaaagttccaaggatgctttgttggatggtatagatggtggtgatgcatctgctgctgaagctgaaggaggctcagaaaaatctaccattgaaaaagagctagagcagcttactagcatattgcctgatcttgagaagaagcttgaggacctgtctgaagcaaacccaagcgctgacatggatgagatggtgaaggcaattgtgtccagggtaactgaagtgatgccaaaagctgcatcttttacttcttcccaaatagcaacctcaagcaatggattcgactcctcggttatgtctacgacagcgacaactggaagctctggaagcactgtgaactgaccttggggttgtaggcagaggcgtcaaacgagctagcatcaagccgatctctgccaaacctgttgctaagaaacctgcacttgattcaccatctctccaaggtgacaacagcatcaactctgaggttgtccctgcgacgcagactgatgaatccagctaaagctctacatttgaaacgaacgctttctgacgggggcacggcgataacacgccttctattctagtatgcttagatagattcaatgttagcgcaaacgactgatgataagtttttcagttagtattttaatttggatttagagtacacttatgtatgatttatttgacaatgcttatttatgagacattgaattgtacttatctatattacattaaatatgatgttattaaatatgtgtgtatgtatatttatcttttaaattattataatgtgacatctcaaaaatgattataaattgaagaatgtctagttatg

SEQ ID NO: 210399 - DNA, 577 bp, Zea Mays
aaactgatcagttagttcttgagggaatggttgagagaggatgaagctgaccttgttcagaggtttgatccgtcatcatcagtggataccattggtttcttcatcgcgaaatttgatgttggagagaaagatgaataaacaaacgtgactgaaattccaatgtttggcattcacaacttacgctagggatatcagcattgaattttctgcaatcagatggctcacgtatacccatggagtggaatgcagcgtgccccctgaaattttgtttgccagtgtttgatattttcttttgttcgaagaacattgttcattatggtgaaatgatggggcaaattagattcaagctcctgtagtcccgtttccaagaaaaaagttaccgggtacccgtatccgtccgggtgtaccgggtattttctgggtattggtcctcccattccgtcctgtatctagggagcatttaaccgggtagcaccagcaaaattgtcctgatttaatattcgatatttggtttggctatccggcccgttttcatccctaggtgaatagataatctggaaaaatcatagcttaaaac

SEQ ID NO: 210400 - DNA, 927 bp, Zea Mays
tgactactctttgcgatgtttgatctggaatggcagatggaacaacagtgaatatcatgatctaaatgatgcatgtaagctcgaggtcacatatgatcaggctccagtcaactcggctgaaccgtgcttgtcttcatttgctccactgtcggaaatctgccccagcatgagcaatggtagcagtaaggaagataaccaccaggctaatcctggcattggcatgccaatgcaaggtctacccaaaaggagtggatttgatgttgtcccatgccctgaccgtgactcggtcatttcgcgctataaagcgaagaggaagacaagaagatttgacaggcaggtccggtatgagtcgcgcaaagttcgtgctgatggcaggctcaggatcaaggggcgttttgcaaaggcaaaccagacatgaacctaaatctgcagttctgcactatcctaagcatctttcctcaagaaatatgctaagtatcttccaacacgaagaagaaaactggtcaggggcgatgataatgcaaaaatgtgccagaattttgtttgccttcagttcaatagctgataaccatagctccatatacagttgaattgaatgacgtgtgtatatattgctgtcatgtgactagtagctacattgctttgagagatcaaaacctgtatatgcacctacacatgtgattttgccatgacggacataataatagaaccactgcgtttgattgatgtagttattaacttattttgcaatttgatttccaatgcaaaagcttctttcactgatgagcaataaacaccgttgtgatgcaagaactgagaaatgatgtttgctagatattttataggatgaggaattgtaatcagatagatgttttgattctgaaaatatactagaatctactttaaatatgtattgtatttatttag

SEQ ID NO: 210401 - DNA, 4424 bp, Zea Mays
atttggttgtgatgctggtctggagggtgaactggcaaacttacatgttccatttggaggtggtgtgcataaagataacttcttcccaatgttccaaagtggatctggtaaggcagtcttgctcaacaaggactcaattcagaaggcaagagctgttctagaagaaaatgttgagaatgcagctggtgccaaacagccaatgttccataccagtacgggtagatctgtcctagtcagcaagagctcaatcgataaggcgagagctgttttagggggtcggatgattgcacatgaaggaaatgtggaaggtccaggtagaccggccaatcagtctctgatatttcaaactagttccggaagaccagttttgatcagcaaaagatacgtcgagagatctagggctctgctgatggatgaagatgttaaaaatattcgacaatgggatactggctgccagctcccaattttccaaacaggacttggaaggcctgttgctgtgaaacatagttcaattaaaaaggcaagcacaattttgggggatggagatgttaaaagaagtggtaatggacataccggtgtttgtaccacacctttccaatttgaaacaccaaaatccgttttgatgagtagcagtttgattattaatggcatgacagttacaccagaagaaaatacttcagtgcgagcagaaaaatgtttcaacgatgatggccaattgccgttatttcagactgggtcagggaggtcagtcacagcaagtaagggttcctttaaaagggcaagttctgttctggagccaagaaatattgcaaaggaattggaagatgaatctcatctcaatgatggttatgccacctcaatatttaaaactggacttggaaagtctatcttaccaactgagaactcaagagaaagggcacaatttgtattagaggctaaagaggctgtaaaacaagcagtaattagtgacattggagctggctttggtgaaaatccaatgttccattctggaaaacaacagttttcacctgaaaatgatacttcaagacctagggccagtacccccatggagcaaggcaaatttgcaacaaaaggatatgaagactgtggaagtccattgccaatgtttcaaactggatctggaaaatctgtattggtctgtgaaagctcgatgcaaaaggcaagagccgttcttgaggaagaagagcactacaagttggttaagatggacaaaaaaattgcagcctcagcttcaccgctcaagacaagccatgcaagaacagtaaacatatcttcaactggtgtttctagagctgctaccttattgggcttggaggagaataccctttcaacacaattttttggacatgttcagcactgcaggtggccgatcaatggctatctctgtcgatgcactacaacgtgcgaaaagccttttgggtgattcagatttagtggtttctccaaatggttcaattggtcgctctttggcatcagctatagagaatctaccaaaaccaactatttctccgaaaggagatgtatctaacctatcatatggaactagagcaataggatatgctgtacctgacacccctgtgactaaaacaagtgctaatcagtttcatatgggaagggaatatcgtccagtcaatgaaattccaaaggtccccaagcctccctccagatgtttatctgaaggcgacaatgcgagtaactctaaagacaagacccagtggcaccatatgccagctggttctggaaatacggactgcttagcaaatggaaagagaattattggggggagaaactccgtatctccattcaaacggccccgttcttccagatgggtcagtaaccactataaatggattgtgtggaagcttgcttcacttgagaggtgctacccaactagagttgctggtaaattcttgacggttgacaatgttcttgaggagcttaagtaccggtattcacttgatgcatcattggatgtggcacttctggaacaactagagaaaagaaagcttttcgtagggcagaagcttcgggtgtctggtgttgtcaaattagttgtccacataaatggcacctatcgtgcaagatggaatgatgccttaggattctgcaaacatgttggactcccactggcattcaggtgcataaaagtttctggtggtagagttcctaggacactggttggaatcacaaggatatatcctattctctaccgggaaaggttgcctgatggtcgttttgttgtgagatctgaaaggatggaaagaaaggcgctggaactataccaccagagagtatctaagatcacagaagatattctgtttgaacaacaagaaaactgtgacagtactgatgataacgaggaaggggctacaatttgtaaaatgctagagcatgccgctgagcctgagtttatacttgcgggcatgactccagagcagttgaagtgtttctcatcttatatagaaaagcaaaagattgttaagcaaaatgaagtatctgagaaggttgagaaggcccttgttgttgctggccttagttcaagggatgttacaccatttttgaaagtgagagtgattggccttgtcaataaacattcagcttccacatccagtaacaaggaagggctaataacaatttggaatccgactgagatgcagaaagataatcttgtggagggacaagcttattctgttatgggattggtaccttcgaactattgcaccgaaatcatgtacttgcatgctagaggatcatctacaacatggaagcccttagcatcagctcagactacagattttaaaccattctttacccctcgtagagcaattgaactcttgaaatttggtgaggtgccgatttcaagtgaatttgatattgcaggtcttattttatatgttggcaatacttatttatgtaacaacaagaaaaagcagtggctttttttaacagatggatctaaatttgtctctgggcaagggtgtgaagagcaagattgtcttctagctgttagcttttcgtccgcaaccactgatgaagactctacattatttagttacactctctctggaaatacagttggttttagtaatctggtcaaacgacagaaagacgagacgaggcaagtatgggtagctgaggcaacagagagctcaagctacactctttccaacgagattcctagaaaatctcacctaaaagaagctgcagttttggctgagagatgggcttctagatcttatcataaaattcaagagctaaaagaaagggttttatgtatagttggcaacgctggtgtctgaattataataaacggtaccacctgctgtttttggaaatggtgcaagattttgcttgggggttgtcttagctacaccattatttctcactgatgttggttggttctggttggagcctttttaacgcaatatgaatggcccttgcaaaaaacttcaagagcagcaagatccttgcacaaacttcaaaaatcaacttgaagatgtacacatttgaagacacgaggcttcagggctgttttctaagtctgtgtataaagcctttttcagagggtcgattaactttgagccgtggaaaaggttatggagatcttgggcgccgcctaaatgcaaaacttttctctggctagccattaggaacaaatgttgaactgcagacagataggagaagagggctttctcacctagaggcctgccccctctgcgatcaagagcaggaaacagctcaacacatcctaacgagttgtgtttttgcaaggcttttttggcacaacattatggctcccttcggtatgggtacctcaccccgagtcagaatgaacttatcctttgcagatttgtggcgaaaagtgagcaacaatgtgcataaagagaagagaacaggaataaacaatgctattatcttggaggcctggtgcatttggcggcaaagaaatcgtacggtttttgaaggagatttgccagctgttagcaaggtgcagcaaagttttctagaagagctaacatgtttggtcttgactggggctcatcaccttagcattttagggataattgatactcttagagcggtcggattgggctctcttgatcatatgtaatttttgtttcagtttcgatgtggtgtgggtgatgatcttgctcagcaagatcctcatcttgtaggattttcttttctctctaatataaaatatgggacgcgttcgagaaaaaaaaacttcaagagctaaaagaaaggcttctatgtatagttggcgaccctggtgtctgaattataataaatggtgctgcccgccattttttttggagatgatgcaagattttgcatgggggttcttgccataactacatgtctacatcaatatttctcagtggtacaattagaagatcaac

SEQ ID NO: 210402 - DNA, 5115 bp, Zea Mays
cgggagcagctgattgaaggcgatgcgatggatggattggctcagagtgtcaatacggctggactgttctccaccgggtctgggaggccactggctgtcagccagagagccgtaaggagggccagtgcgttggttggcgaggaagtggacgaggctactgataacaataacaagaagagaaagaaaccatttggttgtgatgctggtctggagggtgaactggcaaacttacatgttccatttggaggtggtgtgcataaagataacttcttcccaatgttccaaagtggatctggtaaggcagtcttgctcaacaaggactcaattcagaaggcaagagctgttctagaagaaaatgttgagaatgcagctggtgccaaacagccaatgttccataccagtacgggtagatctgtcctagtcagcaagagctcaatcgataaggcgagagctgttttagggggtcggatgattgcacatgaaggagatgtaggaggtgtggatggtatggaacagtttcctgtgtctcaagctggttcaggaaatgtggaaggtccaggtagaccggccaatcagtctctgatatttcaaactagttccggaagaccagttttgatcagcaaaagatacgtcgagagatctagggctctgctgatggatgaagatgttaaaaatattcgacaatgggatactggctgccagctcccaattttccaaacaggacttggaaggcctgttgctgtgaaacatagttcaattaaaaaggcaagcacaattttgggggatggagatgttaaaagaagtggtaatggacataccggtgtttgtaccacacctttccaatttgaaacaccaaaatccgttttgatgagtagcagtttgattattaatggcatgacagttacaccagaagaaaatacttcagtgcgagcagaaaaatgtttcaacgatgatggccaattgccgttatttcagactgggtcagggaggtcagtcacagcaagtaagggttcctttaaaagggcaagttctgttctggagccaagaaatattgcaaaggaattggaagatgaatctcatctcaatgatggttatgccacctcaatatttaaaactggacttggaaagtctatcttaccaactgagaactcaagagaaagggcacaatttgtattagaggctaaagaggctgtaaaacaagcagtaattagtgacattggagctggctttggtgaaaatccaatgttccattctggaaaacaacagttttcacctgaaaatgatacttcaagacctagggccagtacccccatggagcaaggcaaatttgcaacaaaaggatatgaagactgtggaagtccattgccaatgtttcaaactggatctggaaaatctgtattggtctgtgaaagctcgatgcaaaaggcaagagccgttcttgaggaagaagagcactacaagttggttaagatggacaaaaaaattgcagcctcagcttcaccgctcaagacaagccatgcaagaacagtaaacatatcttcaactggtgtttctagagctgctaccttattgggcttggaggagaataccctttcaacacaattttttggacatgtgagtgataagttaggtacggagataactgttaagcggggaaatccagaacacatgcttgatgttgcatctgcacatgcaatttctagtggcactcataagggttttatttatccaacagaaaaccccacacatatggataaacatcagcagtttggattttctaaaagttctacctcttacgttggtgagcattctatcaggttcagcactgcaggtggccgatcaatggctatctctgtcgatgcactacaacgtgcgaaaagccttttgggtgattcagatttagtggtttctccaaatggttcaattggtcgctctttggcatcagctatagagaatctaccaaaaccaactatttctccgaaaggagatgtatctaacctatcatatggaactagagcaataggatatgctgtacctgacacccctgtgactaaaacaagtgctaatcagtttcatatgggaagggaatatcgtccagtcaatgaaattccaaaggtccccaagcctccctccagatgtttatctgaaggcgacaatgcgagtaactctaaagacaagacccagtggcaccatatgccagctggaccattggttgacatcactaattacatggctacatgttctggaaatacggactgcttagcaaatggaaagagaattattggggggagaaactccgtatctccattcaaacggccccgttcttccaggttcatcactccaataaaaaacaacaaactatcttctgctggagaatccatagtgccaccaatgcagatcagtccctgtaggacaatgctatctgtacgttatcctttccaacatcaaaggaaaaattataaagaatattttggtggtcctccttgcttcaaatatttgactgaacatgtgactgatgatgtgaagctcatggatgcaagaagagctgagaagtttagatttcagcatatggatactggtgcagaagagtttcagaaaatgctgctcacatgtggtgcttcattgtcatgtgcaacaaaagaatgggtcagtaaccactataaatggattgtgtggaagcttgcttcacttgagaggtgctacccaactagagttgctggtaaattcttgacggttgacaatgttcttgaggagcttaagtaccggtattcacttgatgcatcattggatgtggcacttctggaacaactagagaaaagaaagcttttcgtagggcagaagcttcgggtgtctggtgttgtcaaattagttgtccacataaatggcacctatcgtgcaagatggaatgatgccttaggattctgcaaacatgttggactcccactggcattcaggtgcataaaagtttctggtggtagagttcctaggacactggttggaatcacaaggatatatcctattctctaccgggaaaggttgcctgatggtcgttttgttgtgagatctgaaaggatggaaagaaaggcgctggaactataccaccagagagtatctaagatcacagaagatattctgtttgaacaacaagaaaactgtgacagtactgatgataacgaggaaggggctacaatttgtaaaatgctagagcatgccgctgagcctgagtttatacttgcgggcatgactccagagcagttgaagtgtttctcatcttatatagaaaagcaaaagattgttaagcaaaatgaagtatctgagaaggttgagaaggcccttgttgttgctggccttagttcaagggatgttacaccatttttgaaagtgagagtgattggccttgtcaataaacattcagcttccacatccagtaacaaggaagggctaataacaatttggaatccgactgagatgcagaaagataatcttgtggagggacaagcttattctgttatgggattggtaccttcgaactattgcaccgaaatcatgtacttgcatgctagaggatcatctacaacatggaagcccttagcatcagctcagactacagattttaaaccattctttacccctcgtagagcaattgaactcttgaaatttgatggatctaaatttgtctctgggcaagggtgtgaagagcaagattgtcttctagctgttagcttttcgtccgcaaccactgatgaagactctacattatttagttacactctctctggaaatacagttggttttagtaatctggtcaaacgacagaaagacgagacgaggcaagtatgggtagctgaggcaacagagagctcaagctacactctttccaacgagattcctagaaaatctcacctaaaagaagctgcagttttggctgagagatgggcttctagatcttatcataaaattcaagagctaaaagaaagggttttatgtatagttggcaacgctggtgtctgaattataataaacggtaccacctgctgtttttggaaatggtgcaagattttgcttgggggttgtcttagctacaccattatttctcactgatgttggttggttctggttggagcctttttaacgcaatatgaatggcccttgcaaaaaacttcaagagcagcaagatccttgcacaaacttcaaaaatcaacttgaagatgtacacatttgaagacacgaggcttcagggctgttttctaagtctgtgtataaagcctttttcagagggtcgattaactttgagccgtggaaaaggttatggagatcttgggcgccgcctaaatgcaaaacttttctctggctagccattaggaacaaatgttgaactgcagacagataggagaagagggctttctcacctagaggcctgccccctctgcgatcaagagcaggaaacagctcaacacatcctaacgagttgtgtttttgcaaggcttttttggcacaacattatggctcccttcggtatgggtacctcaccccgagtcagaatgaacttatcctttgcagatttgtggcgaaaagtgagcaacaatgtgcataaagagaagagaacaggaataaacaatgctattatcttggaggcctggtgcatttggcggcaaagaaatcgtacggtttttgaaggagatttgccagctgttagcaaggtgcagcaaagttttctagaagagctaacatgtttggtcttgactggggctcatcaccttagcattttagggataattgatactcttagagcggtcggattgggctctcttgatcatatgtaatttttgtttcagtttcgatgtggtgtgggtgatgatcttgctcagcaagatcctcatcttgtaggattttcttttctctctaatataaaatatgggacgcgttcgagaaaaaaaaacttcaagagctaaaagaaaggcttctatgtatagttggcgaccctggtgtctgaattataataaatggtgctgcccgccattttttttggagatgatgcaagattttgcatgggggttcttgccataactacatgtctacatcaatatttctcagtggtacaattagaagatcaac

SEQ ID NO: 210403 - DNA, 4797 bp, Zea Mays
cgggagcagctgattgaaggcgatgcgatggatggattggctcagagtgtcaatacggctggactgttctccaccgggtctgggaggccactggctgtcagccagagagccgtaaggagggccagtgcgttggttggcgaggaagtggacgaggctactgataacaataacaagaagagaagtggtgtgcataaagataacttcttcccaatgttccaaagtggatctggtaaggcagtcttgctcaacaaggactcaattcagaaggcaagagctgttctagaagaaaatgttgagaatgcagctggtgccaaacagccaatgttccataccagtacgggtagatctgtcctagtcagcaagagctcaatcgataaggcgagagctgttttagggggtcggatgattgcacatgaaggaaatgtggaaggtccaggtagaccggccaatcagtctctgatatttcaaactagttccggaagaccagttttgatcagcaaaagatacgtcgagagatctagggctctgctgatggatgaagatgttaaaaatattcgacaatgggatactggctgccagctcccaattttccaaacaggacttggaaggcctgttgctgtgaaacatagttcaattaaaaaggcaagcacaattttgggggatggagatgttaaaagaagtggtaatggacataccggtgtttgtaccacacctttccaatttgaaacaccaaaatccgttttgatgagtagcagtttgattattaatggcatgacagttacaccagaagaaaatacttcagtgcgagaaaaatgtttcaacgatgatggccaattgccgttatttcagactgggtcagggaggtcagtcacagcaagtaagggttcctttaaaagggcaagttctgttctggagccaagaaatattgcaaaggaattggaagatgaatctcatctcaatgatggttatgccacctcaatatttaaaactggacttggaaagtctatcttaccaactgagaactcaagagaaagggcacaatttgtattagaggctaaagaggctgtaaaacaagcagtaattagtgacattggagctggctttggtgaaaatccaatgttccattctggaaaacaacagttttcacctgaaaatgatacttcaagacctagggccagtacccccatggagcaaggcaaatttgcaacaaaaggatatgaagactgtggaagtccattgccaatgtttcaaactggatctggaaaatctgtattggtctgtgaaagctcgatgcaaaaggcaagagccgttcttgaggaagaagagcactacaagttggttaagatggacaaaaaaattgcagcctcagcttcaccgctcaagacaagccatgcaagaacagtaaacatatcttcaactggtgtttctagagctgctaccttattgggcttggaggagaataccctttcaacacaattttttggacatgtgagtgataagttaggtacggagataactgttaagcggggaaatccagaacacatgcttgatgttgcatctgcacatgcaatttctagtggcactcataagggttttatttatccaacagaaaaccccacacatatggataaacatcagcagtttggattttctaaaagttctacctcttacgttggtgagcattctatcaggttcagcactgcaggtggccgatcaatggctatctctgtcgatgcactacaacgtgcgaaaagccttttgggtgattcagatttagtggtttctccaaatggttcaattggtcgctctttggcatcagctatagagaatctaccaaaaccaactatttctccgaaaggagatgtatctaacctatcatatggaactagagcaataggatatgctgtacctgacacccctgtgactaaaacaagtgctaatcagtttcatatgggaagggaatatcgtccagtcaatgaaattccaaaggtccccaagcctccctccagatgtttatctgaaggcgacaatgcgagtaactctaaagacaagacccagtggcaccatatgccagctggttctggaaatacggactgcttagcaaatggaaagagaattattggggggagaaactccgtatctccattcaaacggccccgttcttccagatgggtcagtaaccactataaatggattgtgtggaagcttgcttcacttgagaggtgctacccaactagagttgctggtaaattcttgacggttgacaatgttcttgaggagcttaagtaccggtattcacttgatgcatcattggatgtggcacttctggaacaactagagaaaagaaagcttttcgtagggcagaagcttcggatatggggagcttctttatgtggttggtctgggcctgtgtcatttcatgaggtgtctggtgttgtcaaattagttgtccacataaatggcacctatcgtgcaagatggaatgatgccttaggattctgcaaacatgttggactcccactggcattcaggtgcataaaagtttctggtggtagagttcctaggacactggttggaatcacaaggatatatcctattctctaccgggaaaggttgcctgatggtcgttttgttgtgagatctgaaaggatggaaagaaaggcgctggaactataccaccagagagtatctaagatcacagaagatattctgtttgaacaacaagaaaactgtgacagtactgatgataacgaggaaggggctacaatttgtaaaatgctagagcatgccgctgagcctgagtttatacttgcgggcatgactccagagcagttgaagtgtttctcatcttatatagaaaagcaaaagattgttaagcaaaatgaagtatctgagaaggttgagaaggcccttgttgttgctggccttagttcaagggatgttacaccatttttgaaagtgagagtgattggccttgtcaataaacattcagcttccacatccagtaacaaggaagggctaataacaatttggaatccgactgagatgcagaaagataatcttgtggagggacaagcttattctgttatgggattggtaccttcgaactattgcaccgaaatcatgtacttgcatgctagaggatcatctacaacatggaagcccttagcatcagctcagactacagattttaaaccattctttacccctcgtagagcaattgaactcttgaaatttggtgaggtgccgatttcaagtgaatttgatattgcaggtcttattttatatgttggcaatacttatttatgtaacaacaagaaaaagcagtggctttttttaacagatggatctaaatttgtctctgggcaagggtgtgaagagcaagattgtcttctagctgttagcttttcgtccgcaaccactgatgaagactctacattatttagttacactctctctggaaatacagttggttttagtaatctggtcaaacgacagaaagacgagacgaggcaagtatgggtagctgaggcaacagagagctcaagctacactctttccaacgagattcctagaaaatctcacctaaaagaagctgcagttttggctgagagatgggcttctagatcttatcataaaattcaagagctaaaagaaagggttttatgtatagttggcaacgctggtgtctgaattataataaacggtaccacctgctgtttttggaaatggtgcaagattttgcttgggggttgtcttagctacaccattatttctcactgatgttggttggttctggttggagcctttttaacgcaatatgaatggcccttgcaaaaaacttcaagagcagcaagatccttgcacaaacttcaaaaatcaacttgaagatgtacacatttgaagacacgaggcttcagggctgttttctaagtctgtgtataaagcctttttcagagggtcgattaactttgagccgtggaaaaggttatggagatcttgggcgccgcctaaatgcaaaacttttctctggctagccattaggaacaaatgttgaactgcagacagataggagaagagggctttctcacctagaggcctgccccctctgcgatcaagagcaggaaacagctcaacacatcctaacgagttgtgtttttgcaaggcttttttggcacaacattatggctcccttcggtatgggtacctcaccccgagtcagaatgaacttatcctttgcagatttgtggcgaaaagtgagcaacaatgtgcataaagagaagagaacaggaataaacaatgctattatcttggaggcctggtgcatttggcggcaaagaaatcgtacggtttttgaaggagatttgccagctgttagcaaggtgcagcaaagttttctagaagagctaacatgtttggtcttgactggggctcatcaccttagcattttagggataattgatactcttagagcggtcggattgggctctcttgatcatatgtaatttttgtttcagtttcgatgtggtgtgggtgatgatcttgctcagcaagatcctcatcttgtaggattttcttttctctctaatataaaatatgggacgcgttcgagaaaaaaaaacttcaagagctaaaagaaaggcttctatgtatagttggcgaccctggtgtctgaattataataaatggtgctgcccgccattttttttggagatgatgcaagattttgcatgggggttcttgccataactacatgtctacatcaatatttctcagtggtacaattagaagatcaac

SEQ ID NO: 210404 - DNA, 5469 bp, Zea Mays
cgggagcagctgattgaaggcgatgcgatggatggattggctcagagtgtcaatacggctggactgttctccaccgggtctgggaggccactggctgtcagccagagagccgtaaggagggccagtgcgttggttggcgaggaagtggacgaggctactgataacaataacaagaagagaaagaaaccatttggttgtgatgctggtctggagggtgaactggcaaacttacatgttccatttggaggtggtgtgcataaagataacttcttcccaatgttccaaagtggatctggtaaggcagtcttgctcaacaaggactcaattcagaaggcaagagctgttctagaagaaaatgttgagaatgcagctggtgccaaacagccaatgttccataccagtacgggtagatctgtcctagtcagcaagagctcaatcgataaggcgagagctgttttagggggtcggatgattgcacatgaaggaaatgtggaaggtccaggtagaccggccaatcagtctctgatatttcaaactagttccggaagaccagttttgatcagcaaaagatacgtcgagagatctagggctctgctgatggatgaagatgttaaaaatattctgtttacctctttgtgtgaaggacaatgggatactggctgccagctcccaattttccaaacaggacttggaaggcctgttgctgtgaaacatagttcaattaaaaaggcaagcacaattttgggggatggagatgttaaaagaagtggtaatggacataccggtgtttgtaccacacctttccaatttgaaacaccaaaatccgttttgatgagtagcagtttgattattaatggcatgacagttacaccagaagaaaatacttcagtgcgagcagaaaaatgtttcaacgatgatggccaattgccgttatttcagactgggtcagggaggtcagtcacagcaagtaagggttcctttaaaagggcaagttctgttctggagccaagaaatattgcaaaggaattggaagatgaatctcatctcaatgatggttatgccacctcaatatttaaaactggacttggaaagtctatcttaccaactgagaactcaagagaaagggcacaatttgtattagaggctaaagaggctgtaaaacaagtaattagtgacattggagctggctttggtgaaaatccaatgttccattctggaaaacaacagttttcacctgaaaatgatacttcaagacctagggccagtacccccatggagcaaggcaaatttgcaacaaaaggatatgaagactgtggaagtccattgccaatgtttcaaactggatctggaaaatctgtattggtctgtgaaagctcgatgcaaaaggcaagagccgttcttgaggaagaagagcactacaagttggttaagatggacaaaaaaattgcagcctcagcttcaccgctcaagacaagccatgcaagaacagtaaacatatcttcaactggtgtttctagagctgctaccttattgggcttggaggagaataccctttcaacacaattttttggacatgtgagtgataagttaggtacggagataactgttaagcggggaaatccagaacacatgcttgatgttgcatctgcacatgcaatttctagtggcactcataagggttttatttatccaacagaaaaccccacacatatggataaacatcagcagtttggattttctaaaagttctacctcttacgttggtgagcattctatcaggttcagcactgcaggtggccgatcaatggctatctctgtcgatgcactacaacgtgcgaaaagccttttgggtgattcagatttagtggtttctccaaatggttcaattggtcgctctttggcatcagctatagagaatctaccaaaaccaactatttctccgaaaggagatgtatctaacctatcatatggaactagagcaataggatatgctgtacctgacacccctgtgactaaaacaagtgctaatcagtttcatatgggaagggaatatcgtccagtcaatgaaattccaaaggtccccaagcctccctccagatgtttatctgaaggcgacaatgcgagtaactctaaagacaagacccagtggcaccatatgccagctggaccattggttgacatcactaattacatggctacatgttctggaaatacggactgcttagcaaatggaaagagaattattggggggagaaactccgtatctccattcaaacggccccgttcttccaggttcatcactccaataaaaaacaacaaactatcttctgctggagaatccatagtgccaccaatgcagatcagtccctgtaggacaatgctatctgtacgttatcctttccaacatcaaaggaaaaattataaagaatattttggtggtcctccttgcttcaaatatttgactgaacatgtgactgatgatgtgaagctcatggatgcaagaagagctgagaagtttagatttcagcatatggatactggtgcagaagagtttcagaaaatgctgctcacatgtggtgcttcattgtcatgtgcaacaaaagaatgggtcagtaaccactataaatggattgtgtggaagcttgcttcacttgagaggtgctacccaactagagttgctggtaaattcttgacggttgacaatgttcttgaggagcttaagtaccggtatgacagagaagtgaatcatggtcatcgatcagcaataaagaaaattttagaagggaattcttcaccatctttaatgatggtcttgtgcatttcagctatttactcttgtccttaccaaaataacaataagttggaggttaacaaggtagatactaatgaagacaacagtggcaaccaaagcttctctgccactaatagaaacatgtctgcaaatattgaattaactgatggatggtattcacttgatgcatcattggatgtggcacttctggaacaactagagaaaagaaagcttttcgtagggcagaagcttcggatatggggagcttctttatgtggttggtctgggcctgtgtcatttcatgaggtgtctggtgttgtcaaattagttgtccacataaatggcacctatcgtgcaagatggaatgatgccttaggattctgcaaacatgttggactcccactggcattcaggtgcataaaagtttctggtggtagagttcctaggacactggttggaatcacaaggatatatcctattctctaccgggaaaggttgcctgatggtcgttttgttgtgagatctgaaaggatggaaagaaaggcgctggaactataccaccagagagtatctaagatcacagaagatattctgtttgaacaacaagaaaactgtgacagtactgatgataacgaggaaggggctacaatttgtaaaatgctagagcatgccgctgagcctgagtttatacttgcgggcatgactccagagcagttgaagtgtttctcatcttatatagaaaagcaaaagattgttaagcaaaatgaagtatctgagaaggttgagaaggcccttgttgttgctggccttagttcaagggatgttacaccatttttgaaagtgagagtgattggccttgtcaataaacattcagcttccacatccagtaacaaggaagggctaataacaatttggaatccgactgagatgcagaaagataatcttgtggagggacaagcttattctgttatgggattggtaccttcgaactattgcaccgaaatcatgtacttgcatgctagaggatcatctacaacatggaagcccttagcatcagctcagactacagattttaaaccattctttacccctcgtagagcaattgaactcttgaaatttggtgaggtgccgatttcaagtgaatttgatattgcaggtcttattttatatgttggcaatacttatttatgtaacaacaagaaaaagcagtggctttttttaacagatggatctaaatttgtctctgggcaagggtgtgaagagcaagattgtcttctagctgttagcttttcgtccgcaaccactgatgaagactctacattatttagttacactctctctggaaatacagttggttttagtaatctggtcaaacgacagaaagacgagacgaggcaagtatgggtagctgaggcaacagagagctcaagctacactctttccaacgagattcctagaaaatctcacctaaaagaagctgcagttttggctgagagatgggcttctagatcttatcataaaattcaagagctaaaagaaagggttttatgtatagttggcaacgctggtgtctgaattataataaacggtaccacctgctgtttttggaaatggtgcaagattttgcttgggggttgtcttagctacaccattatttctcactgatgttggttggttctggttggagcctttttaacgcaatatgaatggcccttgcaaaaaacttcaagagcagcaagatccttgcacaaacttcaaaaatcaacttgaagatgtacacatttgaagacacgaggcttcagggctgttttctaagtctgtgtataaagcctttttcagagggtcgattaactttgagccgtggaaaaggttatggagatcttgggcgccgcctaaatgcaaaacttttctctggctagccattaggaacaaatgttgaactgcagacagataggagaagagggctttctcacctagaggcctgccccctctgcgatcaagagcaggaaacagctcaacacatcctaacgagttgtgtttttgcaaggcttttttggcacaacattatggctcccttcggtatgggtacctcaccccgagtcagaatgaacttatcctttgcagatttgtggcgaaaagtgagcaacaatgtgcataaagagaagagaacaggaataaacaatgctattatcttggaggcctggtgcatttggcggcaaagaaatcgtacggtttttgaaggagatttgccagctgttagcaaggtgcagcaaagttttctagaagagctaacatgtttggtcttgactggggctcatcaccttagcattttagggataattgatactcttagagcggtcggattgggctctcttgatcatatgtaatttttgtttcagtttcgatgtggtgtgggtgatgatcttgctcagcaagatcctcatcttgtaggattttcttttctctctaatataaaatatgggacgcgttcgagaaaaaaaaacttcaagagctaaaagaaaggcttctatgtatagttggcgaccctggtgtctgaattataataaatggtgctgcccgccattttttttggagatgatgcaagattttgcatgggggttcttgccataactacatgtctacatcaatatttctcagtggtacaattagaagatcaac

SEQ ID NO: 210405 - DNA, 5616 bp, Zea Mays
aaacgcctttgtgtcgtgatttcgctccccgcctccgcagcgcggtcactcaatttccaagtaaatccagttctccctcgtctccgtcgctggctcgtcccggccccgcctgtgcgccgcggcccaggaatcatgccgagcaagtggcaggtctggggccagcccgacggcagcatcgtctggctccccgtctccgacgcgcccccaaacccgcctcggccgggtccgcttcgtcccgctcctcgtcatccgccgctgcccgacgaagcgccaatcgaagaaaccctatgcccggacaccgccggcggatgccgtatctcttctatggccgacctactccttcaagcgcgggagcagctgattgaaggcgatgcgatggatggattggctcagagtgtcaatacggctggactgttctccaccgggtctgggaggccactggctgtcagccagagagccgtaaggagggccagtgcgttggttggcgaggaagtggacgaggctactgataacaataacaagaagagaaagaaaccatttggttgtgatgctggtctggagggtgaactggcaaacttacatgttccatttggaggtggtgtgcataaagataacttcttcccaatgttccaaagtggatctggtaaggcagtcttgctcaacaaggactcaattcagaaggcaagagctgttctagaagaaaatgttgagaatgcagctggtgccaaacagccaatgttccataccagtacgggtagatctgtcctagtcagcaagagctcaatcgataaggcgagagctgttttagggggtcggatgattgcacatgaaggagatgtaggaggtgtggatggtatggaacagtttcctgtgtctcaagctggttcaggaaatgtggaaggtccaggtagaccggccaatcagtctctgatatttcaaactagttccggaagaccagttttgatcagcaaaagatacgtcgagagatctagggctctgctgatggatgaagatgttaaaaatattcgacaatgggatactggctgccagctcccaattttccaaacaggacttggaaggcctgttgctgtgaaacatagttcaattaaaaaggcaagcacaattttgggggatggagatgttaaaagaagtggtaatggacataccggtgtttgtaccacacctttccaatttgaaacaccaaaatccgttttgatgagtagcagtttgattattaatggcatgacagttacaccagaagaaaatacttcagtgcgagcagaaaaatgtttcaacgatgatggccaattgccgttatttcagactgggtcagggaggtcagtcacagcaagtaagggttcctttaaaagggcaagttctgttctggagccaagaaatattgcaaaggaattggaagatgaatctcatctcaatgatggttatgccacctcaatatttaaaactggacttggaaagtctatcttaccaactgagaactcaagagaaagggcacaatttgtattagaggctaaagaggctgtaaaacaagcagtaattagtgacattggagctggctttggtgaaaatccaatgttccattctggaaaacaacagttttcacctgaaaatgatacttcaagacctagggccagtacccccatggagcaaggcaaatttgcaacaaaaggatatgaagactgtggaagtccattgccaatgtttcaaactggatctggaaaatctgtattggtctgtgaaagctcgatgcaaaaggcaagagccgttcttgaggaagaagagcactacaagttggttaagatggacaaaaaaattgcagcctcagcttcaccgctcaagacaagccatgcaagaacagtaaacatatcttcaactggtgtttctagagctgctaccttattgggcttggaggagaataccctttcaacacaattttttggacatgtgagtgataagttaggtacggagataactgttaagcggggaaatccagaacacatgcttgatgttgcatctgcacatgcaatttctagtggcactcataagggttttatttatccaacagaaaaccccacacatatggataaacatcagcagtttggattttctaaaagttctacctcttacgttggtgagcattctatcaggttcagcactgcaggtggccgatcaatggctatctctgtcgatgcactacaacgtgcgaaaagccttttgggtgattcagatttagtggtttctccaaatggttcaattggtcgctctttggcatcagctatagagaatctaccaaaaccaactatttctccgaaaggagatgtatctaacctatcatatggaactagagcaataggatatgctgtacctgacacccctgtgactaaaacaagtgctaatcagtttcatatgggaagggaatatcgtccagtcaatgaaattccaaaggtccccaagcctccctccagatgtttatctgaaggcgacaatgcgagtaactctaaagacaagacccagtggcaccatatgccagctggaccattggttgacatcactaattacatggctacatgttctggaaatacggactgcttagcaaatggaaagagaattattggggggagaaactccgtatctccattcaaacggccccgttcttccaggttcatcactccaataaaaaacaacaaactatcttctgctgaatccatagtgccaccaatgcagatcagtccctgtaggacaatgctatctgtacgttatcctttccaacatcaaaggaaaaattataaagaatattttggtggtcctccttgcttcaaatatttgactgaacatgtgactgatgatgtgaagctcatggatgcaagaagagctgagaagtttagatttcagcatatggatactggtgcagaagagtttcagaaaatgctgctcacatgtggtgcttcattgtcatgtgcaacaaaagaatgggtcagtaaccactataaatggattgtgtggaagcttgcttcacttgagaggtgctacccaactagagttgctggtaaattcttgacggttgacaatgttcttgaggagcttaagtaccggtattcacttgatgcatcattggatgtggcacttctggaacaactagagaaaagaaagcttttcgtagggcagaagcttcggatatggggagcttctttatgtggttggtctgggcctgtgtcatttcatgaggtgtctggtgttgtcaaattagttgtccacataaatggcacctatcgtgcaagatggaatgatgccttaggattctgcaaacatgttggactcccactggcattcaggtgcataaaagtttctggtggtagagttcctaggacactggttggaatcacaaggatatatcctattctctaccgggaaaggttgcctgatggtcgttttgttgtgagatctgaaaggatggaaagaaaggcgctggaactataccaccagagagtatctaagatcacagaagatattctgtttgaacaacaagaaaactgtgacagtactgatgataacgaggaaggggctacaatttgtaaaatgctagagcatgccgctgagcctgagtttatacttgcgggcatgactccagagcagttgaagtgtttctcatcttatatagaaaagcaaaagattgttaagcaaaatgaagtatctgagaaggttgagaaggcccttgttgttgctggccttagttcaagggatgttacaccatttttgaaagtgagagtgattggccttgtcaataaacattcagcttccacatccagtaacaaggaagggctaataacaatttggaatccgactgagatgcagaaagataatcttgtggagggacaagcttattctgttatgggattggtaccttcgaactattgcaccgaaatcatgtacttgcatgctagaggatcatctacaacatggaagcccttagcatcagctcagactacagattttaaaccattctttacccctcgtagagcaattgaactcttgaaatttggtgaggtgccgatttcaagtgaatttgatattgcaggtcttattttatatgttggcaatacttatttatgtaacaacaagaaaaagcagtggctttttttaacagatggatctaaatttgtctctgggcaagggtgtgaagagcaagattgtcttctagctgttagcttttcgtccgcaaccactgatgaagactctacattatttagttacactctctctggaaatacagttggttttagtaatctggtcaaacgacagaaagacgagacgaggcaagtatgggtagctgaggcaacagagagctcaagctacactctttccaacgagattcctagaaaatctcacctaaaagaagctgcagttttggctgagagatgggcttctagatcttatcataaaattcaagagctaaaagaaagggttttatgtatagttggcaacgctggtgtctgaattataataaacggtaccacctgctgtttttggaaatggtgcaagattttgcttgggggttgtcttagctacaccattatttctcactgatgttggttggttctggttggagcctttttaacgcaatatgaatggcccttgcaaaaaacttcaagagcagcaagatccttgcacaaacttcaaaaatcaacttgaagatgtacacatttgaagacacgaggcttcagggctgttttctaagtctgtgtataaagcctttttcagagggtcgattaactttgagccgtggaaaaggttatggagatcttgggcgccgcctaaatgcaaaacttttctctggctagccattaggaacaaatgttgaactgcagacagataggagaagagggctttctcacctagaggcctgccccctctgcgatcaagagcaggaaacagctcaacacatcctaacgagttgtgtttttgcaaggcttttttggcacaacattatggctcccttcggtatgggtacctcaccccgagtcagaatgaacttatcctttgcagatttgtggcgaaaagtgagcaacaatgtgcataaagagaagagaacaggaataaacaatgctattatcttggaggcctggtgcatttggcggcaaagaaatcgtacggtttttgaaggagatttgccagctgttagcaaggtgcagcaaagttttctagaagagctaacatgtttggtcttgactggggctcatcaccttagcattttagggataattgatactcttagagcggtcggattgggctctcttgatcatatgtaatttttgtttcagtttcgatgtggtgtgggtgatgatcttgctcagcaagatcctcatcttgtaggattttcttttctctctaatataaaatatgggacgcgttcgagaaaaaaaaacttcaagagctaaaagaaaggcttctatgtatagttggcgaccctggtgtctgaattataataaatggtgctgcccgccattttttttggagatgatgcaagattttgcatgggggttcttgccataactacatgtctacatcaatatttctcagtggtacaattagaagatcaac

SEQ ID NO: 210406 - DNA, 5460 bp, Zea Mays
aaacgcctttgtgtcgtgatttcgctccccgcctccgcagcgcggtcactcaatttccaagtaaatccagttctccctcgtctccgtcgctggctcgtcccggccccgcctgtgcgccgcggcccaggaatcatgccgagcaagtggcaggtctggggccagcccgacggcagcatcgtctggctccccgtctccgacgcgcccccaaacccgcctcggccgggtccgcttcgtcccgctcctcgtcatccgccgctgcccgacgaagcgccaatcgaagaaaccctatgcccggacaccgccggcggatgccgtatctcttctatggccgacctactccttcaagcgcgggagcagctgattgaaggcgatgcgatggatggattggctcagagtgtcaatacggctggactgttctccaccgggtctgggaggccactggctgtcagccagagagccgtaaggagggccagtgcgttggttggcgaggaagtggacgaggctactgataacaataacaagaagagaaagaaaccatttggttgtgatgctggtctggagggtgaactggcaaacttacatgttccatttggaggtggtgtgcataaagataacttcttcccaatgttccaaagtggatctggtaaggcagtcttgctcaacaaggactcaattcagaaggcaagagctgttctagaagaaaatgttgagaatgcagctggtgccaaacagccaatgttccataccagtacgggtagatctgtcctagtcagcaagagctcaatcgataaggcgagagctgttttagggggtcggatgattgcacatgaaggagatgtaggaggtgtggatggtatggaacagtttcctgtgtctcaagctggttcaggaaatgtggaaggtccaggtagaccggccaatcagtctctgatatttcaaactagttccggaagaccagttttgatcagcaaaagatacgtcgagagatctagggctctgctgatggatgaagatgttaaaaatattcgacaatgggatactggctgccagctcccaattttccaaacaggacttggaaggcctgttgctgtgaaacatagttcaattaaaaaggcaagcacaattttgggggatggagatgttaaaagaagtggtaatggacataccggtgtttgtaccacacctttccaatttgaaacaccaaaatccgttttgatgagtagcagtttgattattaatggcatgacagttacaccagaagaaaatacttcagtgcgagaaaaatgtttcaacgatgatggccaattgccgttatttcagactgggtcagggaggtcagtcacagcaagtaagggttcctttaaaagggcaagttctgttctggagccaagaaatattgcaaaggaattggaagatgaatctcatctcaatgatggttatgccacctcaatatttaaaactggacttggaaagtctatcttaccaactgagaactcaagagaaagggcacaatttgtattagaggctaaagaggctgtaaaacaagcagtaattagtgacattggagctggctttggtgaaaatccaatgttccattctggaaaacaacagttttcacctgaaaatgatacttcaagacctagggccagtacccccatggagcaaggcaaatttgcaacaaaaggatatgaagactgtggaagtccattgccaatgtttcaaactggatctggaaaatctgtattggtctgtgaaagctcgatgcaaaaggcaagagccgttcttgaggaagaagagcactacaagttggttaagatggacaaaaaaattgcagcctcagcttcaccgctcaagacaagccatgcaagaacagtaaacatatcttcaactggtgtttctagagctgctaccttattgggcttggaggagaataccctttcaacacaattttttggacatgtgagtgataagttagaaaaccccacacatatggataaacatcagcagtttggattttctaaaagttctacctcttacgttggtgagcattctatcaggttcagcactgcaggtggccgatcaatggctatctctgtcgatgcactacaacgtgcgaaaagccttttgggtgattcagatttagtggtttctccaaatggttcaattggtcgctctttggcatcagctatagagaatctaccaaaaccaactatttctccgaaaggagatgtatctaacctatcatatggaactagagcaataggatatgctgtacctgacacccctgtgactaaaacaagtgctaatcagtttcatatgggaagggaatatcgtccagtcaatgaaattccaaaggtccccaagcctccctccagatgtttatctgaaggcgacaatgcgagtaactctaaagacaagacccagtggcaccatatgccagctggaccattggttgacatcactaattacatggctacatgttctggaaatacggactgcttagcaaatggaaagagaattattggggggagaaactccgtatctccattcaaacggccccgttcttccaggttcatcactccaataaaaaacaacaaactatcttctgctggagaatccatagtgccaccaatgcagatcagtccctgtaggacaatgctatctgtacgttatcctttccaacatcaaaggaaaaattataaagaatattttggtggtcctccttgcttcaaatatttgactgaacatgtgactgatgatgtgaagctcatggatgcaagaagagctgagaagtttagatttcagcatatggatactggtgcagaagagtttcagaaaatgctgctcacatgtggtgcttcattgtcatgtgcaacaaaagaatgggtcagtaaccactataaatggattgtgtggaagcttgcttcacttgagaggtgctacccaactagagttgctggtaaattcttgacggttgacaatgttcttgaggagcttaagtaccggtattcacttgatgcatcattggatgtggcacttctggaacaactagagaaaagaaagcttttcgtagggcagaagcttcgggtgtctggtgttgtcaaattagttgtccacataaatggcacctatcgtgcaagatggaatgatgccttaggattctgcaaacatgttggactcccactggcattcaggtgcataaaagtttctggtggtagagttcctaggacactggttggaatcacaaggatatatcctattctctaccgggaaaggttgcctgatggtcgttttgttgtgagatctgaaaggatggaaagaaaggcgctggaactataccaccagagagtatctaagatcacagaagatattctgtttgaacaacaagaaaactgtgacagtactgatgataacgaggaaggggctacaatttgtaaaatgctagagcatgccgctgagcctgagtttatacttgcgggcatgactccagagcagttgaagtgtttctcatcttatatagaaaagcaaaagattgttaagcaaaatgaagtatctgagaaggttgagaaggcccttgttgttgctggccttagttcaagggatgttacaccatttttgaaagtgagagtgattggccttgtcaataaacattcagcttccacatccagtaacaaggaagggctaataacaatttggaatccgactgagatgcagaaagataatcttgtggagggacaagcttattctgttatgggattggtaccttcgaactattgcaccgaaatcatgtacttgcatgctagaggatcatctacaacatggaagcccttagcatcagctcagactacagattttaaaccattctttacccctcgtagagcaattgaactcttgaaatttggtgaggtgccgatttcaagtgaatttgatattgcaggtcttattttatatgttggcaatacttatttatgtaacaacaagaaaaagcagtggctttttttaacagatggatctaaatttgtctctgggcaagggtgtgaagagcaagattgtcttctagctgttagcttttcgtccgcaaccactgatgaagactctacattatttagttacactctctctggaaatacagttggttttagtaatctggtcaaacgacagaaagacgagacgaggcaagtatgggtagctgaggcaacagagagctcaagctacactctttccaacgagattcctagaaaatctcacctaaaagaagctgcagttttggctgagagatgggcttctagatcttatcataaaattcaagagctaaaagaaagggttttatgtatagttggcaacgctggtgtctgaattataataaacggtaccacctgctgtttttggaaatggtgcaagattttgcttgggggttgtcttagctacaccattatttctcactgatgttggttggttctggttggagcctttttaacgcaatatgaatggcccttgcaaaaaacttcaagagcagcaagatccttgcacaaacttcaaaaatcaacttgaagatgtacacatttgaagacacgaggcttcagggctgttttctaagtctgtgtataaagcctttttcagagggtcgattaactttgagccgtggaaaaggttatggagatcttgggcgccgcctaaatgcaaaacttttctctggctagccattaggaacaaatgttgaactgcagacagataggagaagagggctttctcacctagaggcctgccccctctgcgatcaagagcaggaaacagctcaacacatcctaacgagttgtgtttttgcaaggcttttttggcacaacattatggctcccttcggtatgggtacctcaccccgagtcagaatgaacttatcctttgcagatttgtggcgaaaagtgagcaacaatgtgcataaagagaagagaacaggaataaacaatgctattatcttggaggcctggtgcatttggcggcaaagaaatcgtacggtttttgaaggagatttgccagctgttagcaaggtgcagcaaagttttctagaagagctaacatgtttggtcttgactggggctcatcaccttagcattttagggataattgatactcttagagcggtcggattgggctctcttgatcatatgtaatttttgtttcagtttcgatgtggtgtgggtgatgatcttgctcagcaagatcctcatcttgtaggattttcttttctctctaatataaaatatgggacgcgttcgagaaaaaaaaacttcaagagctaaaagaaaggcttctatgtatagttggcgaccctggtgtctgaattataataaatggtgctgcccgccattttttttggagatgatgcaagattttgcatgggggttcttgccataactacatgtctacatcaatatttctcagtggtacaattagaagatcaac

SEQ ID NO: 210407 - DNA, 5784 bp, Zea Mays
aaacgcctttgtgtcgtgatttcgctccccgcctccgcagcgcggtcactcaatttccaagtaaatccagttctccctcgtctccgtcgctggctcgtcccggccccgcctgtgcgccgcggcccaggaatcatgccgagcaagtggcaggtctggggccagcccgacggcagcatcgtctggctccccgtctccgacgcgcccccaaacccgcctcggccgggtccgcttcgtcccgctcctcgtcatccgccgctgcccgacgaagcgccaatcgaagaaaccctatgcccggacaccgccggcggatgccgtatctcttctatggccgacctactccttcaagcgcgggagcagctgattgaaggcgatgcgatggatggattggctcagagtgtcaatacggctggactgttctccaccgggtctgggaggccactggctgtcagccagagagccgtaaggagggccagtgcgttggttggcgaggaagtggacgaggctactgataacaataacaagaagagaagtggtgtgcataaagataacttcttcccaatgttccaaagtggatctggtaaggcagtcttgctcaacaaggactcaattcagaaggcaagagctgttctagaagaaaatgttgagaatgcagctggtgccaaacagccaatgttccataccagtacgggtagatctgtcctagtcagcaagagctcaatcgataaggcgagagctgttttagggggtcggatgattgcacatgaaggagatgtaggaggtgtggatggtatggaacagtttcctgtgtctcaagctggttcaggaaatgtggaaggtccaggtagaccggccaatcagtctctgatatttcaaactagttccggaagaccagttttgatcagcaaaagatacgtcgagagatctagggctctgctgatggatgaagatgttaaaaatattcgacaatgggatactggctgccagctcccaattttccaaacaggacttggaaggcctgttgctgtgaaacatagttcaattaaaaaggcaagcacaattttgggggatggagatgttaaaagaagtggtaatggacataccggtgtttgtaccacacctttccaatttgaaacaccaaaatccgttttgatgagtagcagtttgattattaatggcatgacagttacaccagaagaaaatacttcagtgcgagaaaaatgtttcaacgatgatggccaattgccgttatttcagactgggtcagggaggtcagtcacagcaagtaagggttcctttaaaagggcaagttctgttctggagccaagaaatattgcaaaggaattggaagatgaatctcatctcaatgatggttatgccacctcaatatttaaaactggacttggaaagtctatcttaccaactgagaactcaagagaaagggcacaatttgtattagaggctaaagaggctgtaaaacaagtaattagtgacattggagctggctttggtgaaaatccaatgttccattctggaaaacaacagttttcacctgaaaatgatacttcaagacctagggccagtacccccatggagcaaggcaaatttgcaacaaaaggatatgaagactgtggaagtccattgccaatgtttcaaactggatctggaaaatctgtattggtctgtgaaagctcgatgcaaaaggcaagagccgttcttgaggaagaagagcactacaagttggttaagatggacaaaaaaattgcagcctcagcttcaccgctcaagacaagccatgcaagaacagtaaacatatcttcaactggtgtttctagagctgctaccttattgggcttggaggagaataccctttcaacacaattttttggacatgtgagtgataagttaggtacggagataactgttaagcggggaaatccagaacacatgcttgatgttgcatctgcacatgcaatttctagtggcactcataagggttttatttatccaacagaaaaccccacacatatggataaacatcagcagtttggattttctaaaagttctacctcttacgttggtgagcattctatcaggttcagcactgcaggtggccgatcaatggctatctctgtcgatgcactacaacgtgcgaaaagccttttgggtgattcagatttagtggtttctccaaatggttcaattggtcgctctttggcatcagctatagagaatctaccaaaaccaactatttctccgaaaggagatgtatctaacctatcatatggaactagagcaataggatatgctgtacctgacacccctgtgactaaaacaagtgctaatcagtttcatatgggaagggaatatcgtccagtcaatgaaattccaaaggtccccaagcctccctccagatgtttatctgaaggcgacaatgcgagtaactctaaagacaagacccagtggcaccatatgccagctggaccattggttgacatcactaattacatggctacatgttctggaaatacggactgcttagcaaatggaaagagaattattggggggagaaactccgtatctccattcaaacggccccgttcttccaggttcatcactccaataaaaaacaacaaactatcttctgctggagaatccatagtgccaccaatgcagatcagtccctgtaggacaatgctatctgtacgttatcctttccaacatcaaaggaaaaattataaagaatattttggtggtcctccttgcttcaaatatttgactgaacatgtgactgatgatgtgaagctcatggatgcaagaagagctgagaagtttagatttcagcatatggatactggtgcagaagagtttcagaaaatgctgctcacatgtggtgcttcattgtcatgtgcaacaaaagaatgggtcagtaaccactataaatggattgtgtggaagcttgcttcacttgagaggtgctacccaactagagttgctggtaaattcttgacggttgacaatgttcttgaggagcttaagtaccggtatgacagagaagtgaatcatggtcatcgatcagcaataaagaaaattttagaagggaattcttcaccatctttaatgatggtcttgtgcatttcagctatttactcttgtccttaccaaaataacaataagttggaggttaacaaggtagatactaatgaagacaacagtggcaaccaaagcttctctgccactaatagaaacatgtctgcaaatattgaattaactgatggatggtattcacttgatgcatcattggatgtggcacttctggaacaactagagaaaagaaagcttttcgtagggcagaagcttcggatatggggagcttctttatgtggttggtctgggcctgtgtcatttcatgaggtgtctggtgttgtcaaattagttgtccacataaatggcacctatcgtgcaagatggaatgatgccttaggattctgcaaacatgttggactcccactggcattcaggtgcataaaagtttctggtggtagagttcctaggacactggttggaatcacaaggatatatcctattctctaccgggaaaggttgcctgatggtcgttttgttgtgagatctgaaaggatggaaagaaaggcgctggaactataccaccagagagtatctaagatcacagaagatattctgtttgaacaacaagaaaactgtgacagtactgatgataacgaggaaggggctacaatttgtaaaatgctagagcatgccgctgagcctgagtttatacttgcgggcatgactccagagcagttgaagtgtttctcatcttatatagaaaagcaaaagattgttaagcaaaatgaagtatctgagaaggttgagaaggcccttgttgttgctggccttagttcaagggatgttacaccatttttgaaagtgagagtgattggccttgtcaataaacattcagcttccacatccagtaacaaggaagggctaataacaatttggaatccgactgagatgcagaaagataatcttgtggagggacaagcttattctgttatgggattggtaccttcgaactattgcaccgaaatcatgtacttgcatgctagaggatcatctacaacatggaagcccttagcatcagctcagactacagattttaaaccattctttacccctcgtagagcaattgaactcttgaaatttggtgaggtgccgatttcaagtgaatttgatattgcaggtcttattttatatgttggcaatacttatttatgtaacaacaagaaaaagcagtggctttttttaacagatggatctaaatttgtctctgggcaagggtgtgaagagcaagattgtcttctagctgttagcttttcgtccgcaaccactgatgaagactctacattatttagttacactctctctggaaatacagttggttttagtaatctggtcaaacgacagaaagacgagacgaggcaagtatgggtagctgaggcaacagagagctcaagctacactctttccaacgagattcctagaaaatctcacctaaaagaagctgcagttttggctgagagatgggcttctagatcttatcataaaattcaagagctaaaagaaagggttttatgtatagttggcaacgctggtgtctgaattataataaacggtaccacctgctgtttttggaaatggtgcaagattttgcttgggggttgtcttagctacaccattatttctcactgatgttggttggttctggttggagcctttttaacgcaatatgaatggcccttgcaaaaaacttcaagagcagcaagatccttgcacaaacttcaaaaatcaacttgaagatgtacacatttgaagacacgaggcttcagggctgttttctaagtctgtgtataaagcctttttcagagggtcgattaactttgagccgtggaaaaggttatggagatcttgggcgccgcctaaatgcaaaacttttctctggctagccattaggaacaaatgttgaactgcagacagataggagaagagggctttctcacctagaggcctgccccctctgcgatcaagagcaggaaacagctcaacacatcctaacgagttgtgtttttgcaaggcttttttggcacaacattatggctcccttcggtatgggtacctcaccccgagtcagaatgaacttatcctttgcagatttgtggcgaaaagtgagcaacaatgtgcataaagagaagagaacaggaataaacaatgctattatcttggaggcctggtgcatttggcggcaaagaaatcgtacggtttttgaaggagatttgccagctgttagcaaggtgcagcaaagttttctagaagagctaacatgtttggtcttgactggggctcatcaccttagcattttagggataattgatactcttagagcggtcggattgggctctcttgatcatatgtaatttttgtttcagtttcgatgtggtgtgggtgatgatcttgctcagcaagatcctcatcttgtaggattttcttttctctctaatataaaatatgggacgcgttcgagaaaaaaaaacttcaagagctaaaagaaaggcttctatgtatagttggcgaccctggtgtctgaattataataaatggtgctgcccgccattttttttggagatgatgcaagattttgcatgggggttcttgccataactacatgtctacatcaatatttctcagtggtacaattagaagatcaac

SEQ ID NO: 210408 - DNA, 5733 bp, Zea Mays
aaacgcctttgtgtcgtgatttcgctccccgcctccgcagcgcggtcactcaatttccaagtaaatccagttctccctcgtctccgtcgctggctcgtcccggccccgcctgtgcgccgcggcccaggaatcatgccgagcaagtggcaggtctggggccagcccgacggcagcatcgtctggctccccgtctccgacgcgcccccaaacccgcctcggccgggtccgcttcgtcccgctcctcgtcatccgccgctgcccgacgaagcgccaatcgaagaaaccctatgcccggacaccgccggcggatgccgtatctcttctatggccgacctactccttcaagcgcgggagcagctgattgaaggcgatgcgatggatggattggctcagagtgtcaatacggctggactgttctccaccgggtctgggaggccactggctgtcagccagagagccgtaaggagggccagtgcgttggttggcgaggaagtggacgaggctactgataacaataacaagaagagaagtggtgtgcataaagataacttcttcccaatgttccaaagtggatctggtaaggcagtcttgctcaacaaggactcaattcagaaggcaagagctgttctagaagaaaatgttgagaatgcagctggtgccaaacagccaatgttccataccagtacgggtagatctgtcctagtcagcaagagctcaatcgataaggcgagagctgttttagggggtcggatgattgcacatgaaggaaatgtggaaggtccaggtagaccggccaatcagtctctgatatttcaaactagttccggaagaccagttttgatcagcaaaagatacgtcgagagatctagggctctgctgatggatgaagatgttaaaaatattcgacaatgggatactggctgccagctcccaattttccaaacaggacttggaaggcctgttgctgtgaaacatagttcaattaaaaaggcaagcacaattttgggggatggagatgttaaaagaagtggtaatggacataccggtgtttgtaccacacctttccaatttgaaacaccaaaatccgttttgatgagtagcagtttgattattaatggcatgacagttacaccagaagaaaatacttcagtgcgagcagaaaaatgtttcaacgatgatggccaattgccgttatttcagactgggtcagggaggtcagtcacagcaagtaagggttcctttaaaagggcaagttctgttctggagccaagaaatattgcaaaggaattggaagatgaatctcatctcaatgatggttatgccacctcaatatttaaaactggacttggaaagtctatcttaccaactgagaactcaagagaaagggcacaatttgtattagaggctaaagaggctgtaaaacaagcagtaattagtgacattggagctggctttggtgaaaatccaatgttccattctggaaaacaacagttttcacctgaaaatgatacttcaagacctagggccagtacccccatggagcaaggcaaatttgcaacaaaaggatatgaagactgtggaagtccattgccaatgtttcaaactggatctggaaaatctgtattggtctgtgaaagctcgatgcaaaaggcaagagccgttcttgaggaagaagagcactacaagttggttaagatggacaaaaaaattgcagcctcagcttcaccgctcaagacaagccatgcaagaacagtaaacatatcttcaactggtgtttctagagctgctaccttattgggcttggaggagaataccctttcaacacaattttttggacatgtgagtgataagttaggtacggagataactgttaagcggggaaatccagaacacatgcttgatgttgcatctgcacatgcaatttctagtggcactcataagggttttatttatccaacagaaaaccccacacatatggataaacatcagcagtttggattttctaaaagttctacctcttacgttggtgagcattctatcaggttcagcactgcaggtggccgatcaatggctatctctgtcgatgcactacaacgtgcgaaaagccttttgggtgattcagatttagtggtttctccaaatggttcaattggtcgctctttggcatcagctatagagaatctaccaaaaccaactatttctccgaaaggagatgtatctaacctatcatatggaactagagcaataggatatgctgtacctgacacccctgtgactaaaacaagtgctaatcagtttcatatgggaagggaatatcgtccagtcaatgaaattccaaaggtccccaagcctccctccagatgtttatctgaaggcgacaatgcgagtaactctaaagacaagacccagtggcaccatatgccagctggaccattggttgacatcactaattacatggctacatgttctggaaatacggactgcttagcaaatggaaagagaattattggggggagaaactccgtatctccattcaaacggccccgttcttccaggttcatcactccaataaaaaacaacaaactatcttctgctggagaatccatagtgccaccaatgcagatcagtccctgtaggacaatgctatctgtacgttatcctttccaacatcaaaggaaaaattataaagaatattttggtggtcctccttgcttcaaatatttgactgaacatgtgactgatgatgtgaagctcatggatgcaagaagagctgagaagtttagatttcagcatatggatactggtgcagaagagtttcagaaaatgctgctcacatgtggtgcttcattgtcatgtgcaacaaaagaatgggtcagtaaccactataaatggattgtgtggaagcttgcttcacttgagaggtgctacccaactagagttgctggtaaattcttgacggttgacaatgttcttgaggagcttaagtaccggtatgacagagaagtgaatcatggtcatcgatcagcaataaagaaaattttagaagggaattcttcaccatctttaatgatggtcttgtgcatttcagctatttactcttgtccttaccaaaataacaataagttggaggttaacaaggtagatactaatgaagacaacagtggcaaccaaagcttctctgccactaatagaaacatgtctgcaaatattgaattaactgatggatggtattcacttgatgcatcattggatgtggcacttctggaacaactagagaaaagaaagcttttcgtagggcagaagcttcggatatggggagcttctttatgtggttggtctgggcctgtgtcatttcatgaggtgtctggtgttgtcaaattagttgtccacataaatggcacctatcgtgcaagatggaatgatgccttaggattctgcaaacatgttggactcccactggcattcaggtgcataaaagtttctggtggtagagttcctaggacactggttggaatcacaaggatatatcctattctctaccgggaaaggttgcctgatggtcgttttgttgtgagatctgaaaggatggaaagaaaggcgctggaactataccaccagagagtatctaagatcacagaagatattctgtttgaacaacaagaaaactgtgacagtactgatgataacgaggaaggggctacaatttgtaaaatgctagagcatgccgctgagcctgagtttatacttgcgggcatgactccagagcagttgaagtgtttctcatcttatatagaaaagcaaaagattgttaagcaaaatgaagtatctgagaaggttgagaaggcccttgttgttgctggccttagttcaagggatgttacaccatttttgaaagtgagagtgattggccttgtcaataaacattcagcttccacatccagtaacaaggaagggctaataacaatttggaatccgactgagatgcagaaagataatcttgtggagggacaagcttattctgttatgggattggtaccttcgaactattgcaccgaaatcatgtacttgcatgctagaggatcatctacaacatggaagcccttagcatcagctcagactacagattttaaaccattctttacccctcgtagagcaattgaactcttgaaatttggtgaggtgccgatttcaagtgaatttgatattgcaggtcttattttatatgttggcaatacttatttatgtaacaacaagaaaaagcagtggctttttttaacagatggatctaaatttgtctctgggcaagggtgtgaagagcaagattgtcttctagctgttagcttttcgtccgcaaccactgatgaagactctacattatttagttacactctctctggaaatacagttggttttagtaatctggtcaaacgacagaaagacgagacgaggcaagtatgggtagctgaggcaacagagagctcaagctacactctttccaacgagattcctagaaaatctcacctaaaagaagctgcagttttggctgagagatgggcttctagatcttatcataaaattcaagagctaaaagaaagggttttatgtatagttggcaacgctggtgtctgaattataataaacggtaccacctgctgtttttggaaatggtgcaagattttgcttgggggttgtcttagctacaccattatttctcactgatgttggttggttctggttggagcctttttaacgcaatatgaatggcccttgcaaaaaacttcaagagcagcaagatccttgcacaaacttcaaaaatcaacttgaagatgtacacatttgaagacacgaggcttcagggctgttttctaagtctgtgtataaagcctttttcagagggtcgattaactttgagccgtggaaaaggttatggagatcttgggcgccgcctaaatgcaaaacttttctctggctagccattaggaacaaatgttgaactgcagacagataggagaagagggctttctcacctagaggcctgccccctctgcgatcaagagcaggaaacagctcaacacatcctaacgagttgtgtttttgcaaggcttttttggcacaacattatggctcccttcggtatgggtacctcaccccgagtcagaatgaacttatcctttgcagatttgtggcgaaaagtgagcaacaatgtgcataaagagaagagaacaggaataaacaatgctattatcttggaggcctggtgcatttggcggcaaagaaatcgtacggtttttgaaggagatttgccagctgttagcaaggtgcagcaaagttttctagaagagctaacatgtttggtcttgactggggctcatcaccttagcattttagggataattgatactcttagagcggtcggattgggctctcttgatcatatgtaatttttgtttcagtttcgatgtggtgtgggtgatgatcttgctcagcaagatcctcatcttgtaggattttcttttctctctaatataaaatatgggacgcgttcgagaaaaaaaaacttcaagagctaaaagaaaggcttctatgtatagttggcgaccctggtgtctgaattataataaatggtgctgcccgccattttttttggagatgatgcaagattttgcatgggggttcttgccataactacatgtctacatcaatatttctcagtggtacaattagaagatcaac

SEQ ID NO: 210409 - DNA, 5796 bp, Zea Mays
aaacgcctttgtgtcgtgatttcgctccccgcctccgcagcgcggtcactcaatttccaagtaaatccagttctccctcgtctccgtcgctggctcgtcccggccccgcctgtgcgccgcggcccaggaatcatgccgagcaagtggcaggtctggggccagcccgacggcagcatcgtctggctccccgtctccgacgcgcccccaaacccgcctcggccgggtccgcttcgtcccgctcctcgtcatccgccgctgcccgacgaagcgccaatcgaagaaaccctatgcccggacaccgccggcggatgccgtatctcttctatggccgacctactccttcaagcgcgggagcagctgattgaaggcgatgcgatggatggattggctcagagtgtcaatacggctggactgttctccaccgggtctgggaggccactggctgtcagccagagagccgtaaggagggccagtgcgttggttggcgaggaagtggacgaggctactgataacaataacaagaagagaaagaaaccatttggttgtgatgctggtctggagggtgaactggcaaacttacatgttccatttggaggtggtgtgcataaagataacttcttcccaatgttccaaagtggatctggtaaggcagtcttgctcaacaaggactcaattcagaaggcaagagctgttctagaagaaaatgttgagaatgcagctggtgccaaacagccaatgttccataccagtacgggtagatctgtcctagtcagcaagagctcaatcgataaggcgagagctgttttagggggtcggatgattgcacatgaaggaaatgtggaaggtccaggtagaccggccaatcagtctctgatatttcaaactagttccggaagaccagttttgatcagcaaaagatacgtcgagagatctagggctctgctgatggatgaagatgttaaaaatattcgacaatgggatactggctgccagctcccaattttccaaacaggacttggaaggcctgttgctgtgaaacatagttcaattaaaaaggcaagcacaattttgggggatggagatgttaaaagaagtggtaatggacataccggtgtttgtaccacacctttccaatttgaaacaccaaaatccgttttgatgagtagcagtttgattattaatggcatgacagttacaccagaagaaaatacttcagtgcgagcagaaaaatgtttcaacgatgatggccaattgccgttatttcagactgggtcagggaggtcagtcacagcaagtaagggttcctttaaaagggcaagttctgttctggagccaagaaatattgcaaaggaattggaagatgaatctcatctcaatgatggttatgccacctcaatatttaaaactggacttggaaagtctatcttaccaactgagaactcaagagaaagggcacaatttgtattagaggctaaagaggctgtaaaacaagtaattagtgacattggagctggctttggtgaaaatccaatgttccattctggaaaacaacagttttcacctgaaaatgatacttcaagacctagggccagtacccccatggagcaaggcaaatttgcaacaaaaggatatgaagactgtggaagtccattgccaatgtttcaaactggatctggaaaatctgtattggtctgtgaaagctcgatgcaaaaggcaagagccgttcttgaggaagaagagcactacaagttggttaagatggacaaaaaaattgcagcctcagcttcaccgctcaagacaagccatgcaagaacagtaaacatatcttcaactggtgtttctagagctgctaccttattgggcttggaggagaataccctttcaacacaattttttggacatgtgagtgataagttaggtacggagataactgttaagcggggaaatccagaacacatgcttgatgttgcatctgcacatgcaatttctagtggcactcataagggttttatttatccaacagaaaaccccacacatatggataaacatcagcagtttggattttctaaaagttctacctcttacgttggtgagcattctatcaggttcagcactgcaggtggccgatcaatggctatctctgtcgatgcactacaacgtgcgaaaagccttttgggtgattcagatttagtggtttctccaaatggttcaattggtcgctctttggcatcagctatagagaatctaccaaaaccaactatttctccgaaaggagatgtatctaacctatcatatggaactagagcaataggatatgctgtacctgacacccctgtgactaaaacaagtgctaatcagtttcatatgggaagggaatatcgtccagtcaatgaaattccaaaggtccccaagcctccctccagatgtttatctgaaggcgacaatgcgagtaactctaaagacaagacccagtggcaccatatgccagctggaccattggttgacatcactaattacatggctacatgttctggaaatacggactgcttagcaaatggaaagagaattattggggggagaaactccgtatctccattcaaacggccccgttcttccaggttcatcactccaataaaaaacaacaaactatcttctgctggagaatccatagtgccaccaatgcagatcagtccctgtaggacaatgctatctgtacgttatcctttccaacatcaaaggaaaaattataaagaatattttggtggtcctccttgcttcaaatatttgactgaacatgtgactgatgatgtgaagctcatggatgcaagaagagctgagaagtttagatttcagcatatggatactggtgcagaagagtttcagaaaatgctgctcacatgtggtgcttcattgtcatgtgcaacaaaagaatgggtcagtaaccactataaatggattgtgtggaagcttgcttcacttgagaggtgctacccaactagagttgctggtaaattcttgacggttgacaatgttcttgaggagcttaagtaccggtatgacagagaagtgaatcatggtcatcgatcagcaataaagaaaattttagaagggaattcttcaccatctttaatgatggtcttgtgcatttcagctatttactcttgtccttaccaaaataacaataagttggaggttaacaaggtagatactaatgaagacaacagtggcaaccaaagcttctctgccactaatagaaacatgtctgcaaatattgaattaactgatggatggtattcacttgatgcatcattggatgtggcacttctggaacaactagagaaaagaaagcttttcgtagggcagaagcttcggatatggggagcttctttatgtggttggtctgggcctgtgtcatttcatgaggtgtctggtgttgtcaaattagttgtccacataaatggcacctatcgtgcaagatggaatgatgccttaggattctgcaaacatgttggactcccactggcattcaggtgcataaaagtttctggtggtagagttcctaggacactggttggaatcacaaggatatatcctattctctaccgggaaaggttgcctgatggtcgttttgttgtgagatctgaaaggatggaaagaaaggcgctggaactataccaccagagagtatctaagatcacagaagatattctgtttgaacaacaagaaaactgtgacagtactgatgataacgaggaaggggctacaatttgtaaaatgctagagcatgccgctgagcctgagtttatacttgcgggcatgactccagagcagttgaagtgtttctcatcttatatagaaaagcaaaagattgttaagcaaaatgaagtatctgagaaggttgagaaggcccttgttgttgctggccttagttcaagggatgttacaccatttttgaaagtgagagtgattggccttgtcaataaacattcagcttccacatccagtaacaaggaagggctaataacaatttggaatccgactgagatgcagaaagataatcttgtggagggacaagcttattctgttatgggattggtaccttcgaactattgcaccgaaatcatgtacttgcatgctagaggatcatctacaacatggaagcccttagcatcagctcagactacagattttaaaccattctttacccctcgtagagcaattgaactcttgaaatttggtgaggtgccgatttcaagtgaatttgatattgcaggtcttattttatatgttggcaatacttatttatgtaacaacaagaaaaagcagtggctttttttaacagatggatctaaatttgtctctgggcaagggtgtgaagagcaagattgtcttctagctgttagcttttcgtccgcaaccactgatgaagactctacattatttagttacactctctctggaaatacagttggttttagtaatctggtcaaacgacagaaagacgagacgaggcaagtatgggtagctgaggcaacagagagctcaagctacactctttccaacgagattcctagaaaatctcacctaaaagaagctgcagttttggctgagagatgggcttctagatcttatcataaaattcaagagctaaaagaaagggttttatgtatagttggcaacgctggtgtctgaattataataaacggtaccacctgctgtttttggaaatggtgcaagattttgcttgggggttgtcttagctacaccattatttctcactgatgttggttggttctggttggagcctttttaacgcaatatgaatggcccttgcaaaaaacttcaagagcagcaagatccttgcacaaacttcaaaaatcaacttgaagatgtacacatttgaagacacgaggcttcagggctgttttctaagtctgtgtataaagcctttttcagagggtcgattaactttgagccgtggaaaaggttatggagatcttgggcgccgcctaaatgcaaaacttttctctggctagccattaggaacaaatgttgaactgcagacagataggagaagagggctttctcacctagaggcctgccccctctgcgatcaagagcaggaaacagctcaacacatcctaacgagttgtgtttttgcaaggcttttttggcacaacattatggctcccttcggtatgggtacctcaccccgagtcagaatgaacttatcctttgcagatttgtggcgaaaagtgagcaacaatgtgcataaagagaagagaacaggaataaacaatgctattatcttggaggcctggtgcatttggcggcaaagaaatcgtacggtttttgaaggagatttgccagctgttagcaaggtgcagcaaagttttctagaagagctaacatgtttggtcttgactggggctcatcaccttagcattttagggataattgatactcttagagcggtcggattgggctctcttgatcatatgtaatttttgtttcagtttcgatgtggtgtgggtgatgatcttgctcagcaagatcctcatcttgtaggattttcttttctctctaatataaaatatgggacgcgttcgagaaaaaaaaacttcaagagctaaaagaaaggcttctatgtatagttggcgaccctggtgtctgaattataataaatggtgctgcccgccattttttttggagatgatgcaagattttgcatgggggttcttgccataactacatgtctacatcaatatttctcagtggtacaattagaagatcaac

SEQ ID NO: 210410 - DNA, 1602 bp, Zea Mays
gccctctggcccagcgccatggccacgcccgccgtgacgtcccgatgagcacccatgtcggcagcgccttcgttacaccgtcacaaagttcggaaaccacacgaaaaccaccggccgagaattctgcaccgaatcttgacaacgtcatctcgaggggcatgccctactcgtgtgcataaagcttgcgcaggccaggattcacctcgcccttgcgcagaactgcataaaaccccaccccatctgcggcgagggttttcctcgaagcctcggatctccgccgagaaagcatctccaggtgagggggatttctgggaagaagagggagtggttgagccatgggcaaccttcacgccaaaggtgctggaacgggcgccaaaggtgctggagcagcaaacacttccatctcgaattctcgggactcgatgtccaatgccgccacaccttctccagtagagcaggcaaccttcaagtgggtcattgatggcttttcctccctgcttgacaaggatcaaggatggacatactccaacgtatttgagctcatgggtgtagaatggtatctgaaactgaatccaaagtacgaagtcagtaatgaggagtgtgtctctctcaggcttgaactgtcgcagagttcagtgaaactcgacactatctttgaggcatctttcaagttcatgatatatgatcagttaatcggaaagcacaaggtgcatctaggtaaccacagcttccagactgcaagtacgagctctgccatcgcattcatgttacctctgaaagcactcagacaatcctctagatttattgtcaataacagctgcgtatttggcattggcttcatcaaagttgccactatcaaagttaacacgacgctagaaacactgtttgtcaggaagatgaacatcttcaacgaggccaaagtttacacttggaaaatcgaggatttctctgctctgaagaacccgtcccactcaccggagtttgagatcgctggatacacatggattatctctttgaatccatcctacgatggtaacagcctgtccttattcctgaaaatgaagaagacaaacgacgtccccaaaggctctgggagcctggtcgagttcgctttatccatcaaagaccaggaaaacggcaaggacaggaaatatccaggcaggtgccagttctcgagcaaacaccatcgctggggatggaagaagttcatctcgctggaggacttcaaggactcgtcaaagggttatctcatcaagggcaagtgctgcatcgaggctgaggtcgcaatcagtggctcttcgaagacggagtactctatgtaatttgatttgtgagagctcatgattagtgtttattctcgctagaaccaactatatagcgtgttccatatgtattagcatgccatcgagactctagcttgctctatagatatctcgacgtatccgctcttcaagcttcgttctgtcgagttgaatgtggtctaataagtgaatatatgcaaactgggatcttattattttaggctattctggcaatctatcttgattgcgacgaatgatttcacagcagttcttttttttctctatctaatttttgctgtcg

SEQ ID NO: 210411 - DNA, 1596 bp, Zea Mays
gccctctggcccagcgccatggccacgcccgccgtgacgtcccgatgagcacccatgtcggcagcgccttcgttacaccgtcacaaagttcggaaaccacacgaaaaccaccggccgagaattctgcaccgaatcttgacaacgtcatctcgaggggcatgccctactcgtgtgcataaagcttgcgcaggccaggattcacctcgcccttgcgcagaactgcataaaaccccaccccatctgcggcgagggttttcctcgaagcctcggatctccgccgagaaagcatctccaggtgagggggatttctgggaagaagagggagtggttgagccatgggcaaccttcacgccaaaggtgctggaacgggcgccaaaggagcagcaaacacttccatctcgaattctcgggactcgatgtccaatgccgccacaccttctccagtagagcaggcaaccttcaagtgggtcattgatggcttttcctccctgcttgacaaggatcaaggatggacatactccaacgtatttgagctcatgggtgtagaatggtatctgaaactgaatccaaagtacgaagtcagtaatgaggagtgtgtctctctcaggcttgaactgtcgcagagttcagtgaaactcgacactatctttgaggcatctttcaagttcatgatatatgatcagttaatcggaaagcacaaggtgcatctaggtaaccacagcttccagactgcaagtacgagctctgccatcgcattcatgttacctctgaaagcactcagacaatcctctagatttattgtcaataacagctgcgtatttggcattggcttcatcaaagttgccactatcaaagttaacacgacgctagaaacactgtttgtcaggaagatgaacatcttcaacgaggccaaagtttacacttggaaaatcgaggatttctctgctctgaagaacccgtcccactcaccggagtttgagatcgctggatacacatggattatctctttgaatccatcctacgatggtaacagcctgtccttattcctgaaaatgaagaagacaaacgacgtccccaaaggctctgggagcctggtcgagttcgctttatccatcaaagaccaggaaaacggcaaggacaggaaatatccaggcaggtgccagttctcgagcaaacaccatcgctggggatggaagaagttcatctcgctggaggacttcaaggactcgtcaaagggttatctcatcaagggcaagtgctgcatcgaggctgaggtcgcaatcagtggctcttcgaagacggagtactctatgtaatttgatttgtgagagctcatgattagtgtttattctcgctagaaccaactatatagcgtgttccatatgtattagcatgccatcgagactctagcttgctctatagatatctcgacgtatccgctcttcaagcttcgttctgtcgagttgaatgtggtctaataagtgaatatatgcaaactgggatcttattattttaggctattctggcaatctatcttgattgcgacgaatgatttcacagcagttcttttttttctctatctaatttttgctgtcg

SEQ ID NO: 210412 - DNA, 1791 bp, Zea Mays
gccctctggcccagcgccatggccacgcccgccgtgacgtcccgatgagcacccatgtcggcagcgccttcgttacaccgtcacaaagttcggaaaccacacgaaaaccaccggccgagaattctgcaccgaatcttgacaacgtcatctcgaggggcatgccctactcgtgtgcataaagcttgcgcaggccaggattcacctcgcccttgcgcagaactgcataaaaccccaccccatctgcggcgagggttttcctcgaagcctcggatctccgccgagaaagcatctccaggtgagggggatttctgggaagaagagggagtggttgagccatgggcaaccttcacgccaaaggtgctggaacgggcgccaaaggtgctgcaaacacttccatctcgaattctcgggactcgatgtccaatgccgccacaccttctccagtagagcaggcaaccttcaagtgggtcattgatggcttttcctccctgcttgacaaggatcaaggatggacatactccaacgtatttgagctcatgggtgtagaatggtatctgaaactgaatccaaagtacgaagtcagtaatgaggagtgtgtctctctcaggcttgaactgtcgcagagttcagtgaaactcgacactatctttgaggcatctttcaagttcatgatatatgatcagttaatcggaaagcacaaggtgcatctaggtaaccacagcttccagactgcaagtacgagctctgccatcgcattcatgttacctctgaaagcactcagacaatcctctagatttattgtcaataacagctgcgtatttggcattggcttcatcaaagttgccactatcaaagttaacacgacgctagaaacactgtttgtcaggaagatgaacatcttcaacgaggccaaagtttacacttggaaaatcgaggatttctctgctctgaagaacccgtcccactcaccggagtttgagatcgctggatacacatggtgataaataatcttttcagcttgcagtacttgacatgtactccacatgactgaacgttgatatcataatctgaacttccttgcaatgctaagagtggttctgaaccacatcggttttgaaaattttacttgaaacacaattatagcagtcctgcacgtcgtcaacctgattgtgtgaccctgaccaatttgcaggattatctctttgaatccatcctacgatggtaacagcctgtccttattcctgaaaatgaagaagacaaacgacgtccccaaaggctctgggagcctggtcgagttcgctttatccatcaaagaccaggaaaacggcaaggacaggaaatatccaggcaggtgccagttctcgagcaaacaccatcgctggggatggaagaagttcatctcgctggaggacttcaaggactcgtcaaagggttatctcatcaagggcaagtgctgcatcgaggctgaggtcgcaatcagtggctcttcgaagacggagtactctatgtaatttgatttgtgagagctcatgattagtgtttattctcgctagaaccaactatatagcgtgttccatatgtattagcatgccatcgagactctagcttgctctatagatatctcgacgtatccgctcttcaagcttcgttctgtcgagttgaatgtggtctaataagtgaatatatgcaaactgggatcttattattttaggctattctggcaatctatcttgattgcgacgaatgatttcacagcagttcttttttttctctatctaatttttgctgtcg

SEQ ID NO: 210413 - DNA, 1591 bp, Zea Mays
gccctctggcccagcgccatggccacgcccgccgtgacgtcccgatgagcacccatgtcggcagcgccttcgttacaccgtcacaaagttcggaaaccacacgaaaaccaccggccgagaattctgcaccgaatcttgacaacgtcatctcgaggggcatgccctactcgtgtgcataaagcttgcgcaggccaggattcacctcgcccttgcgcagaactgcataaaaccccaccccatctgcggcgagggttttcctcgaagcctcggatctccgccgagaaagcatctccagggggatttctgggaagaagagggagtggttgagccatgggcaaccttcacgccaaaggtgctggaacgggcgccaaaggagcagcaaacacttccatctcgaattctcgggactcgatgtccaatgccgccacaccttctccagtagagcaggcaaccttcaagtgggtcattgatggcttttcctccctgcttgacaaggatcaaggatggacatactccaacgtatttgagctcatgggtgtagaatggtatctgaaactgaatccaaagtacgaagtcagtaatgaggagtgtgtctctctcaggcttgaactgtcgcagagttcagtgaaactcgacactatctttgaggcatctttcaagttcatgatatatgatcagttaatcggaaagcacaaggtgcatctaggtaaccacagcttccagactgcaagtacgagctctgccatcgcattcatgttacctctgaaagcactcagacaatcctctagatttattgtcaataacagctgcgtatttggcattggcttcatcaaagttgccactatcaaagttaacacgacgctagaaacactgtttgtcaggaagatgaacatcttcaacgaggccaaagtttacacttggaaaatcgaggatttctctgctctgaagaacccgtcccactcaccggagtttgagatcgctggatacacatggattatctctttgaatccatcctacgatggtaacagcctgtccttattcctgaaaatgaagaagacaaacgacgtccccaaaggctctgggagcctggtcgagttcgctttatccatcaaagaccaggaaaacggcaaggacaggaaatatccaggcaggtgccagttctcgagcaaacaccatcgctggggatggaagaagttcatctcgctggaggacttcaaggactcgtcaaagggttatctcatcaagggcaagtgctgcatcgaggctgaggtcgcaatcagtggctcttcgaagacggagtactctatgtaatttgatttgtgagagctcatgattagtgtttattctcgctagaaccaactatatagcgtgttccatatgtattagcatgccatcgagactctagcttgctctatagatatctcgacgtatccgctcttcaagcttcgttctgtcgagttgaatgtggtctaataagtgaatatatgcaaactgggatcttattattttaggctattctggcaatctatcttgattgcgacgaatgatttcacagcagttcttttttttctctatctaatttttgctgtcg

SEQ ID NO: 210414 - DNA, 1366 bp, Zea Mays
gtggattttagaggggtttcgggcttttgcgaatccgtgttgttggctttcttgatgagttccgggggatttctgggaagaagagggagtggttgagccatgggcaaccttcacgccaaaggtgctggaacgggcgccaaaggtgctggagcagcaaacacttccatctcgaattctcgggactcgatgtccaatgccgccacaccttctccagtagagcaggcaaccttcaagtgggtcattgatggcttttcctccctgcttgacaaggatcaaggatggacatactccaacgtatttgagctcatgggtgtagaatggtatctgaaactgaatccaaagtacgaagtcagtaatgaggagtgtgtctctctcaggcttgaactgtcgcagagttcagtgaaactcgacactatctttgaggcatctttcaagttcatgatatatgatcagttaatcggaaagcacaaggtgcatctaggtaaccacagcttccagactgcaagtacgagctctgccatcgcattcatgttacctctgaaagcactcagacaatcctctagatttattgtcaataacagctgcgtatttggcattggcttcatcaaagttgccactatcaaagttaacacgacgctagaaacactgtttgtcaggaagatgaacatcttcaacgaggccaaagtttacacttggaaaatcgaggatttctctgctctgaagaacccgtcccactcaccggagtttgagatcgctggatacacatggattatctctttgaatccatcctacgatggtaacagcctgtccttattcctgaaaatgaagaagacaaacgacgtccccaaaggctctgggagcctggtcgagttcgctttatccatcaaagaccaggaaaacggcaaggacaggaaatatccaggcaggtgccagttctcgagcaaacaccatcgctggggatggaagaagttcatctcgctggaggacttcaaggactcgtcaaagggttatctcatcaagggcaagtgctgcatcgaggctgaggtcgcaatcagtggctcttcgaagacggagtactctatgtaatttgatttgtgagagctcatgattagtgtttattctcgctagaaccaactatatagcgtgttccatatgtattagcatgccatcgagactctagcttgctctatagatatctcgacgtatccgctcttcaagcttcgttctgtcgagttgaatgtggtctaataagtgaatatatgcaaactgggatcttattattttaggctattctggcaatctatcttgattgcgacgaatgatttcacagcagttcttttttttctctatctaatttttgctgtcg

SEQ ID NO: 210415 - DNA, 1065 bp, Zea Mays
aacttcagccattcgattcttgatttgtggtccctggtgcagcgaggccacaagggggaaacgaccggaggcctggttctagagactacacaacatatcgcgatggctctatctgacctgaggtctatgtctggcttgctggcccgcacctctctcgatcccacatcggactcatctccttcgattcagcagaggacagcgctctgcctctccactacttgacagccacggatccttccatccctcgcctagcgaacagacccggctggccatcctcaacgcacccctcccattttccattcggatgtatgcgtgggtgaccagcacatcgaggagttccacaagcacacatgaggaagatgaacatcttcaacgaggccaaagtttacacttggaaaatcgaggatttctctgctctgaagaacccgtcccactcaccggagtttgagatcgctggatacacatggattatctctttgaatccatcctacgatggtaacagcctgtccttattcctgaaaatgaagaagacaaacgacgtccccaaaggctctgggagcctggtcgagttcgctttatccatcaaagaccaggaaaacggcaaggacaggaaatatccaggcaggtgccagttctcgagcaaacaccatcgctggggatggaagaagttcatctcgctggaggacttcaaggactcgtcaaagggttatctcatcaagggcaagtgctgcatcgaggctgaggtcgcaatcagtggctcttcgaagacggagtactctatgtaatttgatttgtgagagctcatgattagtgtttattctcgctagaaccaactatatagcgtgttccatatgtattagcatgccatcgagactctagcttgctctatagatatctcgacgtatccgctcttcaagcttcgttctgtcgagttgaatgtggtctaataagtgaatatatgcaaactgggatcttattattttaggctattctggcaatctatcttgattgcgacgaatgatttcacagcagttcttttttttctctatctaatttttgctgtcg

SEQ ID NO: 210416 - DNA, 1438 bp, Zea Mays
aacttcagccattcgattcttgatttgtggtccctggtgcagcgaggccacaagggggaaacgaccggaggcctggttctagagactacacaacatatcgcgatggctctatctgacctgaggtctatgtctggcttgctggcccgcacctctctcgatcccacatcggactcatctccttcgattcagcagaggacagcgctctgcctctccactacttgacagccacggatccttccatccctcgcctagcgaacagacccggctggccatcctcaacgcacccctcccattttccattcggatgtatgcgtgggtgaccagcacatcgaggagttccacaagcacacatgaggtatctgaaactgaatccaaagtacgaagtcagtaatgaggagtgtgtctctctcaggcttgaactgtcgcagagttcagtgaaactcgacactatctttgaggcatctttcaagttcatgatatatgatcagttaatcggaaagcacaaggtgcatctaggtaaccacagcttccagactgcaagtacgagctctgccatcgcattcatgttacctctgaaagcactcagacaatcctctagatttattgtcaataacagctgcgtatttggcattggcttcatcaaagttgccactatcaaagttaacacgacgctagaaacactgtttgtcaggaagatgaacatcttcaacgaggccaaagtttacacttggaaaatcgaggatttctctgctctgaagaacccgtcccactcaccggagtttgagatcgctggatacacatggtgataaataatcttttcagcttgcagtacttgacatgattatctctttgaatccatcctacgatggtaacagcctgtccttattcctgaaaatgaagaagacaaacgacgtccccaaaggctctgggagcctggtcgagttcgctttatccatcaaagaccaggaaaacggcaaggacaggaaatatccaggcaggtgccagttctcgagcaaacaccatcgctggggatggaagaagttcatctcgctggaggacttcaaggactcgtcaaagggttatctcatcaagggcaagtgctgcatcgaggctgaggtcgcaatcagtggctcttcgaagacggagtactctatgtaatttgatttgtgagagctcatgattagtgtttattctcgctagaaccaactatatagcgtgttccatatgtattagcatgccatcgagactctagcttgctctatagatatctcgacgtatccgctcttcaagcttcgttctgtcgagttgaatgtggtctaataagtgaatatatgcaaactgggatcttattattttaggctattctggcaatctatcttgattgcgacgaatgatttcacagcagttcttttttttctctatctaatttttgctgtcg

SEQ ID NO: 210417 - DNA, 1249 bp, Zea Mays
ttaattaagcaagcaaataaaaaatgactaaatgaactatttgttgtttcttccatttcccatcatttatgttttgtttcactaatttgtttttgtgtgtgtttaatttcattatggctgggaaggcttttaactggggccatgatagtgttgtccattagtggaagtgcttatgtgagtaccgcagatgaagtaaagttttggtatctgaaactgaatccaaagtacgaagtcagtaatgaggagtgtgtctctctcaggcttgaactgtcgcagagttcagtgaaactcgacactatctttgaggcatctttcaagttcatgatatatgatcagttaatcggaaagcacaaggtgcatctaggtaaccacagcttccagactgcaagtacgagctctgccatcgcattcatgttacctctgaaagcactcagacaatcctctagatttattgtcaataacagctgcgtatttggcattggcttcatcaaagttgccactatcaaagttaacacgacgctagaaacactgtttgtcaggaagatgaacatcttcaacgaggccaaagtttacacttggaaaatcgaggatttctctgctctgaagaacccgtcccactcaccggagtttgagatcgctggatacacatggattatctctttgaatccatcctacgatggtaacagcctgtccttattcctgaaaatgaagaagacaaacgacgtccccaaaggctctgggagcctggtcgagttcgctttatccatcaaagaccaggaaaacggcaaggacaggaaatatccaggcaggtgccagttctcgagcaaacaccatcgctggggatggaagaagttcatctcgctggaggacttcaaggactcgtcaaagggttatctcatcaagggcaagtgctgcatcgaggctgaggtcgcaatcagtggctcttcgaagacggagtactctatgtaatttgatttgtgagagctcatgattagtgtttattctcgctagaaccaactatatagcgtgttccatatgtattagcatgccatcgagactctagcttgctctatagatatctcgacgtatccgctcttcaagcttcgttctgtcgagttgaatgtggtctaataagtgaatatatgcaaactgggatcttattattttaggctattctggcaatctatcttgattgcgacgaatgatttcacagcagttcttttttttctctatctaatttttgctgtcg

SEQ ID NO: 210418 - DNA, 636 bp, Zea Mays
aaagaagtttgcaatgagggtgtctgaatggaggaaccagctgtcattgagtcatactataacaagcggatagtcggttgtcctggtggcgagggtgaggacgaacatgatgttgtatggttctggttgaaaaaagacgagccgcatgagtgtccagtctgctcgcaatactttcttaaggtaattggtgatggtggagatccagatggccatgacgatgaagatgatggacatcactaaggatgccttgtggttctgaaaataagaatctgatgaggcagatgagtccatcacacttcttttttcttgaaccagactgcacggcatccttgtttatgaacagacatttggccatcaagcgggtggtagttaatcacctagggattttgtccagacaaaagcttattgagatttgacccatgcatttctttaagagcatcatcgaataaaagatgactgcatcagattgctttcttttgttaccgtatggccatcgggtgtgatggacatgtaatattcagtcatggaatggaacagacccatttctttattcagtgtgctggggaatttgcaaaaggtctcctatatctcttacaagtttcaagccagaggttgatccttcagttttatgactat

SEQ ID NO: 210419 - DNA, 651 bp, Zea Mays
cgatcatctaagaaagaagtttgcaatgagggtgtctgaatggaggaaccagctgtcattgagtcatactataacaagcggatagtcggttgtcctggtggcgagggtgaggacgaacatgatgttgtatggttctggttgaaaaaagacgagccgcatgagtgtccagtctgctcgcaatactttgtgcttaaggtaattggtgatggtggagatccagatggccatgacgatgaagatgatggacatcactaaggatgccttgtggttctgaaaataagaatctgatgaggcagatgagtccatcacacttcttttttcttgaaccagactgcacggcatccttgtttatgaacagacatttggccatcaagcgggtggtagttaatcacctagggattttgtccagacaaaagcttattgagatttgacccatgcatttctttaagagcatcatcgaataaaagatgactgcatcagattgctttcttttgttaccgtatggccatcgggtgtgatggacatgtaatattcagtcatggaatggaacagacccatttctttattcagtgtgctggggaatttgcaaaaggtctcctatatctcttacaagtttcaagccagaggttgatccttcagttttatgactat

SEQ ID NO: 210420 - DNA, 2964 bp, Zea Mays
gtctggccagtcccgctgccgccccctccgcctctctcggccgtagtcgcaacgctgtgtcacgccgcacatggcgaagcgcccgcgccacgccggaaacggcgccggccgctcccagctggcgtcattcgagcggaagcttcacgacctcatactcaacggcggcctagcaggccccggcgcctccgccgaggacatcgccaacaccctccgcatccaccaccctaagttccgccgcctgaagcacggccccttctttgcctccgtccgccgcgctctcacctccatccccatcccctcctcctccgatgacgacggctcctccgcctcccgctgccgccacgacgcccacaccacctcctccgcctccgtctccgacgccgccgcccacccgtcgccaccggcccccgccttcgacgttaccaagtccacgctcttctcccattacgccgctcagacgcgcaagcggaaccaaaaccagcagctggagatcgaggtcacagcggagaagccgcgccgcctcatcacggccgaaggcggtggcggtggcgacgcgaagcccgaggccgtcccggctgctgaagggttttgcagagaggacaagggacccaggttcgccgacctcggcgggatggaggcggtgatcgaggagctcatgatggaggtggtcgtgcccctgtgccatccgaagctgccgcaccgccttggagtcagacctgtcgcggggctgctgctgcacggaccacccggctgcggaaagaccacccttgcccatgccatcgctattgagactggcgtgctgttctacaagatatctgcaccggaagttgtatctggggtgtctggagcttctgaggaaaacatcagaggcctgtttcagaaggcctatcggactgctccctcgattgtattcattgatgagatagatgcaattgcatccaagagggagaatctgcaacgagagatggagcgacgaatagttactcaattaatgacatgcatggatcaataccaccagaatattggatcggacactggcaatttggatgctgaatcatctgaatagaaacctggttatgttattgtaattggagccacaaataggcctgatgctgtggaccaagctctgcgaaggccaggaaggtttgatcgagagatatctcttggtgttccagatgagaatgcacgaaaacaaatactgaagatgcttactcagcatcttcgacttgaaggcgaatttgacttgttcaagatagctagagcgacacaaggttttgttggtgctgacttgaaggcattagtggataaagcagggaatcttgcaatgaagagaataattgataaaagaagaattcactatcgccgtgagcatgacgggaatagcaagcatgactggtggaggcaaccttgggatgaaagtgaggtggagggcctacatattactatggatgactttgagcaacaaaaatggttcaaccatctttgagaagagaagggttttcttctgttcctgatgtcacttgggatgatgttggcggtcttgattcattaagaaaagagtttgaccgctgcattattcgttgtatcaagaaccctgaagactatgaggtatttggagtgaatatgcaagctggcttcctgctgttcggtcctcctggttgcgggaaaacactaatagcaaaagcagtggcacatgaggcaggagccaattttattcatataaaggggcctgagctattgaacaagtatgttggggagagtgaatcagaagttaggaaaatattcactcgtgcacgtactaactctccatgcatcctattttttgatgaggttgatgctttgacaacaaaaagagggaaagagggaggatgggttgttgaacgtctcttaaatcagttacttatcgaacttgatggtgctgatcaacgacaaggtgtctatgtgataggagctacgaacaggattgatgtgatagatgatgctgttctacggcctggtagatttggaaagaaacattatgtacctttacctggtgcacacgagcgggtttcaatattaaaagcacatgctcgcagcaagcccatctcgaccgatgttcatttggatgcacttgcacgtcgtgccgagtgcaacaatctcactggtgctgacctagcatcactggtaatatttgtgatatatcatcgaaccattcttttggaagttgtccaaacacaagcactagtgcttcttcagtttgcagaatgtagcattgttttctctctctcgtattgttaccttttgctttgcattgagatgggtgctggtgaattcaacctgacttagttgacaagctagctgcatcgtaataattaatagcagcgcttctttcatcgggtcaacgaagcacttgcagaacgttttaccaaaaaagagagagagagaagggagtgatgtgcttctttcaccaggtcaatgaagcagccatggcagcattggaagagcgattagagttcattgagaacgggacatcctcaatgggttcatcttgtttgattaagctctcacactttgagcgtgctctatcgaagatcaagccatcagtatctgaacagcaaattaaatattacgaggcgttgtcaaagagatactcgtcaaactgaggtatcaccacgtctccatgactcccatccatggttcgtcagtggttgcagctttgtatttttggtggtggtgaatggtgatgaaattctacagttgtagaaatcattttaggttttgctgcctacaggcaaatttttgtatggccttaagatacattatacaaggatgagtagtaccacaaatatgtcgcagttaatgctatcgaaggcctccagtcgtggagcgcattcccccagtgtgctggtgtctgtccgattaaacttgctccctggtttggttgaatggtgatcaaacttactggtttggttgagtgatataaag

SEQ ID NO: 210421 - DNA, 2984 bp, Zea Mays
gtctggccagtcccgctgccgccccctccgcctctctcggccgtagtcgcaacgctgtgtcacgccgcacatggcgaagcgcccgcgccacgccggaaacggcgccggccgctcccagctggcgtcattcgagcggaagcttcacgacctcatactcaacggcggcctagcaggccccggcgcctccgccgaggacatcgccaacaccctccgcatccaccaccctaagttccgccgcctgaagcacggccccttctttgcctccgtccgccgcgctctcacctccatccccatcccctcctcctccgatgacgacggctcctccgcctcccgctgccgccacgacgcccacaccacctcctccgcctccgtctccgacgccgccgcccacccgtcgccaccggcccccgccttcgacgttaccaagtccacgctcttctcccattacgccgctcagacgcgcaagcggaaccaaaaccagcagctggagatcgaggtcacagcggagaagccgcgccgcctcatcacggccgaaggcggtggcggtggcgacgcgaagcccgaggccgtcccggctgctgaagggttttgcagagaggacaagggacccaggttcgccgacctcggcgggatggaggcggtgatcgaggagctcatgatggaggtggtcgtgcccctgtgccatccgaagctgccgcaccgccttggagtcagacctgtcgcggggctgctgctgcacggaccacccggctgcggaaagaccacccttgcccatgccatcgctattgagactggcgtgctgttctacaagatatctgcaccggaagttgtatctggggtgtctggagcttctgaggaaaacatcagaggcctgtttcagaaggcctatcggactgctccctcgattgtattcattgatgagatagatgcaattgcatccaagagggagaatctgcaacgagagatggagcgacgaatagttactcaattaatgacatgcatggatcaataccaccagaatattggatcggacactggcaatttggatgctgaatcatctgaatagaaacctggttatgttattgtaattggagccacaaataggcctgatgctgtggaccaagctctgcgaaggccaggaaggtttgatcgagagatatctcttggtgttccagatgagaatgcacgaaaacaaatactgaagatgcttactcagcatcttcgacttgaaggcgaatttgacttgttcaagatagctagagcgacacaaggttttgttggtgctgacttgaaggcattagtggataaagcagggaatcttgcaatgaagagaataattgataaaagaagaattcactatcgccgtgagcatgacgggaatagcaagcatgactggtggaggcaaccttgggatgaaagtgaggtggagggcctacatattactatggatgactttgaggaagcaacaaaaatggttcaaccatctttgagaagagaagggttttcttctgttcctgatgtcacttgggatgatgttggcggtcttgattcattaagaaaagagtttgaccgctgcattattcgttgtatcaagaaccctgaagactatgaggtatttggagtgaatatgcaagctggcttcctgctgttcggtcctcctggttgcgggaaaacactaatagcaaaagcagtggcacatgaggcaggagccaattttattcatataaaggggcctgagctattgaacaagtatgttggggagagtgaatcagaagttaggaaaatattcactcgtgcacgtactaactctccatgcatcctattttttgatgaggttgatgctttgacaacaaaaagagggaaagagggaggatgggttgttgaacgtctcttaaatcagttacttatcgaacttgatggtgctgatcaacgacaaggtgtctatgtgataggagctacgaacagctcctttctggtgtaggattgatgtgatagatgatgctgttctacggcctggtagatttggaaagaaacattatgtacctttacctggtgcacacgagcgggtttcaatattaaaagcacatgctcgcagcaagcccatctcgaccgatgttcatttggatgcacttgcacgtcgtgccgagtgcaacaatctcactggtgctgacctagcatcactggtaatatttgtgatatatcatcgaaccattcttttggaagttgtccaaacacaagcactagtgcttcttcagtttgcagaatgtagcattgttttctctctctcgtattgttaccttttgctttgcattgagatgggtgctggtgaattcaacctgacttagttgacaagctagctgcatcgtaataattaatagcagcgcttctttcatcgggtcaacgaagcacttgcagaacgttttaccaaaaaagagagagagagaagggagtgatgtgcttctttcaccaggtcaatgaagcagccatggcagcattggaagagcgattagagttcattgagaacgggacatcctcaatgggttcatcttgtttgattaagctctcacactttgagcgtgctctatcgaagatcaagccatcagtatctgaacagcaaattaaatattacgaggcgttgtcaaagagatactcgtcaaactgaggtatcaccacgtctccatgactcccatccatggttcgtcagtggttgcagctttgtatttttggtggtggtgaatggtgatgaaattctacagttgtagaaatcattttaggttttgctgcctacaggcaaatttttgtatggccttaagatacattatacaaggatgagtagtaccacaaatatgtcgcagttaatgctatcgaaggcctccagtcgtggagcgcattcccccagtgtgctggtgtctgtccgattaaacttgctccctggtttggttgaatggtgatcaaacttactggtttggttgagtgatataaag

SEQ ID NO: 210422 - DNA, 2677 bp, Zea Mays
gtctggccagtcccgctgccgccccctccgcctctctcggccgtagtcgcaacgctgtgtcacgccgcacatggcgaagcgcccgcgccacgccggaaacggcgccggccgctcccagctggcgtcattcgagcggaagcttcacgacctcatactcaacggcggcctagcaggccccggcgcctccgccgaggacatcgccaacaccctccgcatccaccaccctaagttccgccgcctgaagcacggccccttctttgcctccgtccgccgcgctctcacctccatccccatcccctcctcctccgatgacgacggctcctccgcctcccgctgccgccacgacgcccacaccacctcctccgcctccgtctccgacgccgccgcccacccgtcgccaccggcccccgccttcgacgttaccaagtccacgctcttctcccattacgccgctcagacgcgcaagcggaaccaaaaccagcagctggagatcgaggtcacagcggagaagccgcgccgcctcatcacggccgaaggcggtggcggtggcgacgcgaagcccgaggccgtcccggctgctgaagggttttgcagagaggacaagggacccaggttcgccgacctcggcgggatggaggcggtgatcgaggagctcatgatggaggtggtcgtgcccctgtgccatccgaagctgccgcaccgccttggagtcagacctgtcgcggggctgctgctgcacggaccacccggctgcggaaagaccacccttgcccatgccatcgctattgagactggcgtgctgttctacaagatatctgcaccggaagttgtatctggggtgtctggagcttctgaggaaaacatcagaggcctgtttcagaaggcctatcggactgctccctcgattgtattcattgatgagatagatgcaattgcatccaagagggagaatctgcaacgagagatggagcgacgaatagttactcaattaatgacatgcatggatcaataccaccagaatattggatcggacactggcaatttggatgctgaatcatctgaatagaaacctggttatgttattgtaattggagccacaaataggcctgatgctgtggaccaagctctgcgaaggccaggaaggtttgatcgagagatatctcttggtgttccagatgagaatgcacgaaaacaaatactgaagatgcttactcagcatcttcgacttgaaggcgaatttgacttgttcaagatagctagagcgacacaaggttttgttggtgctgacttgaaggcattagtggataaagcagggaatcttgcaatgaagagaataattgataaaagaagaattcactatcgccgtgagcatgacgggaatagcaagcatgactggtggaggcaaccttgggatgaaagtgaggtggagggcctacatattactatggatgactttgagcaacaaaaatggttcaaccatctttgagaagagaagggttttcttctgttcctgatgtcacttgggatgatgttggcggtcttgattcattaagaaaagagtttgaccgctgcattattcgttgtatcaagaaccctgaagactatgaggtatttggagtgaatatgcaagctggcttcctgctgttcggtcctcctggttgcgggaaaacactaatagcaaaagcagtggcacatgaggcaggagccaattttattcatataaaggggcctgagctattgaacaagtatgttggggagagtgaatcagaagttaggaaaatattcactcgtgcacgtactaactctccatgcatcctattttttgatgaggttgatgctttgacaacaaaaagagggaaagagggaggatgggttgttgaacgtctcttaaatcagttacttatcgaacttgatggtgctgatcaacgacaaggtgtctatgtgataggagctacgaacaggattgatgtgatagatgatgctgttctacggcctggtagatttggaaagaaacattatgtacctttacctggtgcacacgagcgggtttcaatattaaaagcacatgctcgcagcaagcccatctcgaccgatgttcatttggatgcacttgcacgtcgtgccgagtgcaacaatctcactggtgctgacctagcatcactggtcaatgaagcagccatggcagcattggaagagcgattagagttcattgagaacgggacatcctcaatgggttcatcttgtttgattaagctctcacactttgagcgtgctctatcgaagatcaagccatcagtatctgaacagcaaattaaatattacgaggcgttgtcaaagagatactcgtcaaactgaggtatcaccacgtctccatgactcccatccatggttcgtcagtggttgcagctttgtatttttggtggtggtgaatggtgatgaaattctacagttgtagaaatcattttaggttttgctgcctacaggcaaatttttgtatggccttaagatacattatacaaggatgagtagtaccacaaatatgtcgcagttaatgctatcgaaggcctccagtcgtggagcgcattcccccagtgtgctggtgtctgtccgattaaacttgctccctggtttggttgaatggtgatcaaacttactggtttggttgagtgatataaag

SEQ ID NO: 210423 - DNA, 1076 bp, Zea Mays
tttgcttcttccttccggccgaattgcgagcgagcgttcctctccgtccgcttccgccgtttgcccgtcgatcagttgttggctgccggccgggtactaccgcctgcacgagcagcggctagccacagcccacagacagacgacgtcaggtcttggcaggtgtgcaagcagacagagctcgctcggtcgccatgtctttcaccggcacgcaggacaagtgcaaagcctgcgacaagacggtccacttcatcgacctgctcaccgccgacggcgtctcgtaccacaagacctgcttcaaatgcagccactgcaagggcgtcctctcgattagcagctactcttccatggacggcgttctgtactgcaagacgcactttgaacagctcttcaaggagacggggaacttctccaagaaattccaaggtggaggtggagcatcttcaaacaagaacgacccggctccgagcaagctgtcatctgcattctctggaactcaagacaaatgcgcagcctgccagaagaccgtgtatccattggagaagatgacgctggaaggcgagtcgtaccacaagggctgcttcaagtgctcgcacggcggctgcatcctgaccacctcctcctacgccgcgctcaacgggatcctctactgcaagatccatttctcgcagctgttcaaggagaagggcagctacaaccacctcatcgagacggcgcagaccaagaagaacgaggccgcggaggccgcagaggagccatcggtggacgcatgcgccgcggctgaggcggaagcgtccgcggaatcggcgtagaacgaagagtagccgtgtgtgtatctcctaattatacgaactctgcattcagtaagtagttttcacaaatctatatatgttgttgttatgctgcagcttggttttggtcagtctgggattgtaacacgtgtatgttgaattgcttgaattgcttattctgtacactacaagaaactgataaatgttcgtgagtaaaagtaagaacgtgggtaccgacgttcttacttgagttaagttcatgggttatgttaagaacgtgggtaccga

SEQ ID NO: 210424 - DNA, 2216 bp, Zea Mays
tttatcaaatacggagcagtcctgtttccaccccaaggaaacgtgtgaaaagtagatgggagcctgttgtggatgaaaatgttaccaataaggtggaacaaatagcaaaaggattgatcggcagtaatgtccacagtacttcggaccctaaaaatagaatgggtagcagttgggatcataggaagtttctccagtcttctcaagcaccttcaaataaagtcaatcagaggtctgccaagaagcaaaaaatgggtagtaatttgagtcaaatacagaatggaaatgcttcaagtgacagtgagaaggaacatgatctaaccaaatattatgccagtgcaactgcactagcaaattcgcctgaggaaaagaaacgtagggagcatagatccaagcgttttgaaaagagtaaagattcatcatttaaatcaagaaatgtttctgcaaataaagatgctatgactaatttgcgtgcaagaagggcaattttgtcttttcgtactagaacctatgaaggcggcactttggctgttgaggatatggattgggatgcactgacagtcaaaggaacatgtcaggaaattgagaaaagatatctacgacttacagaagcacctgatcctgccaaaataaggccagaagatgtcctggagaaggcccttgcaatggttgaaacatcacaaaagaattatctttacaagtgtgatcaactaaaatctatccgccaagatcttacagttcagagaatccagaatgaactgactataaaggtttatgaaacacatgcccgattagctatgcaagctggtgatttacatgaatttaaccagtgccagtcacaactgaagaggctatatgcacaaggaatcaagggttgctattttgaattttctgcttacaatttgctgtgtgtcatgctacactctaataataaacgagacttgctgtcatcaatggcaagcttatcaaaagaagccaaacaagatgcagctgttaagcatgcccttgcagttcatgcttctgttttatctggcaattatgttctatttttcaaactgtacaagaaggcgcccaatttgaactcatgcctcatggatctatatgtggagcggatgcgcttcgaagctatgaaatgcatgtctaggtcatatcgcccaactgtacctgtgggatatgttgcacagattttggggttcatgagaactgatacaggctgtgcaaccaatggggatgatggattagaagaatgcgaaaaatggttgaaagcgcatgggatagttctttcagaaggcttcgtcttctacactttacatgccagagccagagaatgcggttgcacatggtgatgcatcacttgctgttgatgactttttggcacggactgacgggcatcttaaaaggtgcagcagcgatgagccaacggtggatactccgtagtgtagtatattggtgctgctgtggcagtcgtgccgagatgtggacgcactgcacttctcccgtagaaactgcaaagggggcatgaaatggagctgcccaacgaagctcgcggagctaagagagtcggaacaactgaacaaggatgtggtcatcgggttttgccacttgcgcaaattgatccagtcatccagagttgcaccgcgatgagcttcgttgagaagacagagaagaaagcagcattacccgacatgagcagaagtttttatgtcgtggtggtttgctcacaagggcctgttccgataggagtagattgaaggtattagaagatattaaatttcttagtcttgtttggaagtaaggggattggaggaactgaagatttgaaggggccaaaatcctagaaggggattttagccttggctgatttgatgacccctccaatctctctcaatctccttatcatcaaatcagccctgcctcgattctcttctcccaaacaagccagcccttactagtaaaaattgaatagaaaaaaagatttaatcctcctcaatctccttcaaccaaacaaggtctaacttgcattaagcgtagaaagtattgtgaaaaacagctacagctttgaagcatacatcatacattatcttttccggtgctctttttttctggctgccccttcctctgtgaagattgtgaattactttttcttgcacgtaaatttattttcctatcccatagaataatgaaaattatatactaatgttcctatagttgcatctgag

SEQ ID NO: 210425 - DNA, 4180 bp, Zea Mays
gtttgtgggaaccctcacgcactacgccgccgcgtcgtcggcttctccgctcttcacctgctccctctcgacgaactacgaagccatccccgcctccgcaaaccgccccgagcctccgacgtattccctggccagtaggccacttcccttctggccttcctactctctccacgctccacagctgtgagcctgtgaccctccgcttcgacgcggacgccgcaggccgttgacgatacaacgcaccccgccgaaaggggctgggactccttttccgtttccttcgcacatctcctcgctttccgccgagagaacttttttcagtcaatcataataataataataaaaaattcgccgttcggccccgaatttcccctctgtttctgcttcatctgacgcatctgatccattcccccttctcgacgcggatcgaatcacgagcgtgtggcggcggctgtggtggttagggacttagggttggagctcctggaggatggcgagccacggcgccggggtggctgctggatctgacgccccgcacgctgaggttgtcagtatgggtcaaacaaatctatctccatatcctctttcttccagtcatcattcatggtcctctgcaactgggtcagcaacggtttcatggaacaatacagtggacaaacttagccaagatacagtttactatgatccacaaagggatgtatcagattcaggagggaatcaaaatgtagaaagtagcgtgcctcatgttgcccagtcgagtagggggatggcagatgtagcccattctcacatgtcttactctagttcagatcaacatgtctataaccctgtagaatatgccaactattattatagctacccacaagcaacaaatgattcttctgtccagcaaggagcaaaccaacatccagaccgtgccaggatatggaagcagcagctactattatcagaacaacacatggaatggtggaagcacagggaatacttttgctcaatcataccagaactactcatcatctgatacaaatgcacaacaaagttctacttcagtgcctgccaattctttaccatatcagcagcagtataaccagtggccatactattacaatcaatctgtgccaagtgcttctagcaatccagttgctgggaacagtactacagataacttaactggtaacatgccttctggctattcatatcctagtagccagccacctccaccaggaacaacatcatggaaaagtaattcagttgcttctgttgcacctcctatgcaggttccaggtgttccaggacagcaaagtcaatatggcaaccaggcagaaggccattataaccagggacctggtgtgcaatggtctcaaaatcattatgcctaccagacacagccataccctcagaagactaattccaatcatccacaactaagcaaccatgaagatcaacaggagactgtatattctaacagtccaagcacaaatctttcgtcgaaccatgtttctgaaaattttaaaccaaacttgcaggattctgtgacaatggacacttccagcgaaggcaaaatacaggttcctataaatcctcaaattgccccaggtttctctatggtgataccaaagaatgagaagaaacattctggacttgatttatcaaagaaacctgcctatgttagtgtctccatgcctacgaatgatgctaaagcaactcaagttggtcttgatgctagattacccttttcactccgtaactatgctacgaggaacctcaatcgttgcaagaatgatgcccagagggaggcctgccgaagcataatgaatgagatcacaaaaaaagcttttgctgagggaacccttcttactaagaactgggacactgaaccactatttcctttgcctgaaagtactgtgggcatgactggaacaagcagtgtaaacaatttaagtcccttctcatcagtttccaccccaaggaaacgtgtgaaaagtagatgggagcctgttgtggatgaaaatgttaccaataaggtggaacaaatagcaaaaggattgatcggcagtaatgtccacagtacttcggaccctaaaaatagaatgggtagcagttgggatcataggaagtttctccagtcttctcaagcaccttcaaataaagtcaatcagaggtctgccaagaagcaaaaaatgggtagtaatttgagtcaaatacagaatggaaatgcttcaagtgacagtgagaaggaacatgatctaaccaaatattatgccagtgcaactgcactagcaaattcgcctgaggaaaagaaacgtagggagcatagatccaagcgttttgaaaagagtaaagattcatcatttaaatcaagaaatgtttctgcaaataaagatgctatgactaatttgcgtgcaagaagggcaattttgtcttttcgtactagaacctatgaaggcggcactttggctgttgaggatatggattgggatgcactgacagtcaaaggaacatgtcaggaaattgagaaaagatatctacgacttacagaagcacctgatcctgccaaaataaggccagaagatgtcctggagaaggcccttgcaatggttgaaacatcacaaaagaattatctttacaagtgtgatcaactaaaatctatccgccaagatcttacagttcagagaatccagaatgaactgactataaaggtttatgaaacacatgcccgattagctatgcaagctggtgatttacatgaatttaaccagtgccagtcacaactgaagaggctatatgcacaaggaatcaagggttgctattttgaattttctgcttacaatttgctgtgtgtcatgctacactctaataataaacgagacttgctgtcatcaatggcaagcttatcaaaagaagccaaacaagatgcagctgttaagcatgcccttgcagttcatgcttctgttttatctggcaattatgttctatttttcaaactgtacaagaaggcgcccaatttgaactcatgcctcatggatctatatgtggagcggatgcgcttcgaagctatgaaatgcatgtctaggtcatatcgcccaactgtacctgtgggatatgttgcacagattttggggttcatgagaactgatacaggctgtgcaaccaatggggatgatggattagaagaatgcgaaaaatggttgaaagcgcatgggatagttctttcagaaggtaacagtggggaattacaaatagacatgaaggcttcgtcttctacactttacatgccagagccagagaatgcggttgcacatggtgatgcatcacttgctgttgatgactttttggcacggactgacgggcatcttaaaaggtgcagcagcgatgagccaacggtggatactccgtagtgtagtatattggtgctgctgtggcagtcgtgccgagatgtggacgcactgcacttctcccgtagaaactgcaaagggggcatgaaatggagctgcccaacgaagctcgcggagctaagagagtcggaacaactgaacaaggatgtggtcatcgggttttgccacttgcgcaaattgatccagtcatccagagttgcaccgcgatgagcttcgttgagaagacagagaagaaagcagcattacccgacatgagcagaagtttttatgtcgtggtggtttgctcacaagggcctgttccgataggagtagattgaaggtattagaagatattaaatttcttagtcttgtttggaagtaaggggattggaggaactgaagatttgaaggggccaaaatcctagaaggggattttagccttggctgatttgatgacccctccaatctctctcaatctccttatcatcaaatcagccctgcctcgattctcttctcccaaacaagccagcccttactagtaaaaattgaatagaaaaaaagatttaatcctcctcaatctccttcaaccaaacaaggtctaacttgcattaagcgtagaaagtattgtgaaaaacagctacagctttgaagcatacatcatacattatcttttccggtgctctttttttctggctgccccttcctctgtgaagattgtgaattactttttcttgcacgtaaatttattttcctatcccatagaataatgaaaattatatactaatgttcctatagttgcatctgag

SEQ ID NO: 210426 - DNA, 1659 bp, Zea Mays
aaaaaagacattgggcctcgcttgtcggcccagtccccagcaaaaccctggaggcccgcgcggcactccgaaaccgtcatctcattttccttttcacgcccactcactcacccgccgcccccgccgccgccatcccctccttgccgtctccgggcacggcctcgtcaatcctttgctcctcctccgccgcagccgctgccatggactccacgccggcgcccgaggcggctcccggagcctcctcttccgccaccgccgctgccgaggatctggcggggggcgtggcggcgatgaccctggatgagcggttcgctctgctgcgggggatcggggaggagtgcatccaggaggacgagctcaggcgcctgctcgagaacaagcccgtgcccatctgctacgacggcttcgagccctccggacgcatgcacatcgcccagggcattgtgaagaccatcaacgtcaacaagatggtcagggccgggtgcaaggtgaaaatctggattgccgactggttcgcgcagctcaacaacaagatgggaggcgacctcaagaaaatccagacagtcgggcgctacatgatcgagatttggaaggcggccgggatgaacctcgacggggtggagttcctgtggtcctccgaggagatcaaccggcgcgcccacgagtactggccaatcgtgatggacattgcccggaaaaacaacgtcaaacggataacgagatgctgccaaattatgggcagaagtgaccaggacgacttgactgctgcccagattttctacccttgcatgcaatgtgctgatatatttttcttgaaggctgacatatgccaattggggatggaccaaaggaaggtcaatgtgctagctagggagtactgtgattacatcaaaaggaagaacaaaccaattattctttcacatcatatgctccctggttttaaagaaggccaggagaaaatgtcaaagagtgacccatcctcggctatctttatggaagatgacgaggcccaagttaatgtgaagataaagcaagcattttgccctcccaaaattgttgaggggaatccttgtttggagtacattaaatacatcgttttcccttggtttggaaggtttgaggtggcccggaaggaaagcaatggcggtaacaagacatttacaagcatggatgaactaatttctgattatgagactggtgctttgcatcctgctgatgtcaaacctgcactggcaaaagcaataaatgaaattttgcagcctgttcgtgaccacttcaacaacaataacgaagccaaagttctactaaacactgtcaagagtaaccagttgaggagcggaaggtgttcatctttagggtgaatgtcgctgattgaaattcttctatgcttattctgttactaatgccaccactcattttagatcaagcattgagccattggttatcagtgtacaatctctctatacaggcattttggtggcagtggccttgtctgtcattggctacaacgttctagataaaaaaacatttaaattttgtggaagttgaattatcttctcatgtgtgtatgactgtatgtgagactggttgaaagtgcaagcgacaaggcatatatggccgagaagtttaaatgtttttatactgtgggggtgtttgaat

SEQ ID NO: 210427 - DNA, 1248 bp, Zea Mays
ggaaaatccttccgcacgaccccgcgttccgccttcgtttctctgcctctcgcctagtgtcgcggtccgacgaccggtgtcgccgccgtcgccgccgccgccgctctaacgccaggtgctgaggccttcgccagcctctttgccggcgacgaaaacccaccagtcctttcaggatgaccaagtatacgaggaacaaaaaaagttcatcttctcacagtagttccagattcaaaagagtttccagaaaggagatgtcatttgcagtggagaaatacgcatggacaaatgcaacttgtccagtatgcatggaattcccacacagcgctgttcttctactctaaaagaagcctctgaggacccagatgcaatagagcttatgtgtcccctatgccgtggcgaggtcaagggatataccttggttgagcctgctcggaagcagctgaatcgcaagaggaggagctgcatggaagacggctgttcgtacatgggcacatacagagagctctgcaagcatgtccaaaagaagcaccctactgcaaacccacgagctgtggaccccttgcatgcttacagatggaagcggcttctatttcgaagttcattgcatgatatgatttgttcaactacttcagaggctatgcgaaggttttgttctcacatgctgcagattgaagaggttgtggctgctttgcgagagggtggtgatcatcgtggcgctaccaatgacgatcaactgatccatgatctcttgacctctcgctgaaatgtgagaacctgtgttgatcctgcaggcaatctttgcatgaatccccaacttggcacccctgccgattcacattttctgacccgacaaagcaaactagtcttcatctgtcctcaatgaaacagactgttaaagctttgatggatttattcattcacagtgataatggctggttgaatggcacggggctttttttcgtactcatctagcctctagtgtgtcatgcgatgcactgttcctgtgcaccctcccactgtatgactatgacataactgtttcttatggaacgcaatgtgttcctgttcataaaacgaaatcttgcccccttttttctgcatttaaatgggctcgtttggtttcctccccggcgaagctgcctggctcatgcagcgctcccaggcgttggatttttaacgcctgggtctgggatggggccgggatggtttccctggcaggcaattgttgcctgtgagggttccaaccaa

SEQ ID NO: 210428 - DNA, 1004 bp, Zea Mays
ctcgaagcagcgtagcgactagcgagcattcgcacagcggctctctttcctcgcgcagtcgcgctagacaagcggctgcctccttgcaagttgctactgctaccctcaccctactaccgacgagacgtcgacggcgacttggtctaagccccgcccacccgccaattgccaccaaaaactaaccgcctgctctttcaggggagcggacccggacgacgagccacgccgacgctagggtttggtttcgccggcctgcccggccatggacctgcccccgggcgccggccgtcgcaccacctactccctcctcccacagttccccgacgacgccgccgcacctgctcccgcccccgccaacatcctgcagcgccagtccagcggcagcagctacggcgccggcagctctatctccacctccagcgactacccattccacttacaaccccccgcctcggccgcgggggtcgcgccgcccggatcggcagcggcgcctcccggggcggctggctcgccctgcaagagctgggcgcagcaggccgaggagacctaccagctgcagctcgcgctcgcgctccgcctctgcgccgatgctgcgtgcgctgccgacccgggcttcctcgacccaggcgattcaggaagcgggaggggcagcggtaacgggagagccttcccgctcgcgcagcccgcgccctctgcggagtcgctctcgcatcgcttctgggtaaatggttcgctatcatacaacagcacaataccagatggattttacttgattcatgggatggacccctttgtatggtcactatgcactgatgtacaggaagagaaccacataccctccatggaatcactcaagtatgttggagagttatgcttccagcattctttccagttctgctgatgccaaagatgtggtaatccaactggccaaactcatatcttcaagaatggggggtacaacttccaatgaagagaacttgctaacgaataaaagcatttattca

SEQ ID NO: 210429 - DNA, 1307 bp, Zea Mays
agccgccaccgccagcgaatcacgtgacttcccctccccttctcccctctccactccatcgtcaaggaaggaacacggccctaactaaaccctagctaagggaagggaaacaagaccatggatgcctccaagctccgcgagcttcgcgacttcgtcgaggcgtgcaagaagaatccttcgctcctcgccgaccccaacctctccttcttccgggattacctccagagtttgggtgccaaaattcccgccgccgccccctctttcgaaagtcccaaggtaacattacccatccatcttctcctctatccaccccgcagatcttccatggacgacattgatgacgacggtgatgacgacgacgatttggatatgagggatcccactcctgagcgagacgagctcgatgaagagattgttgagtctgatcttgagctcgaaggagaaattgtacagtctgaccatgatgacccaccacagaagatgggaaatccttcagtggaggtgactgaggaaaaccgtgatgcttcccaagaagcaaaaggcaaggctatggaagcaatttctgaaggaaaacttgaagatgctattgaacaccttaccaacgcaatagtgctgaatccactctcagcaatcatgtatggtactagagcatctgtgtttataaaaatgaagaaaccagctgctgccattcgtgatgccaatgctgctctagagatcaacccagactctgcaaaaggctataaaactcgtggaatggcatatgccatgcttggcaaatgggaggaagctgctcatgatctgcacacagcatctaacatggattacgacgaggagatcaatgctgtgctcaagaaggtggagcctaatgctcacaagatagtggaacatcgcaggaagtatgagaggttgagaaaagagagggaggaaaagagagcgcagcgtgatcggcttcgtcaacgtgcagaggcgcaggctgcttacgacaaggccaagaggaaggagcaatcgtcaagtcgctcatcaggaggtgcatctcccagaggctttcctggagggatgcctggtggtggtttccctagagggatgcccggtggaggtttccccgggggtggcatgcctgggggtttccctgggggtggcatgcctggaggtttccctggtggtgttcccggtaatgttgatatgagtaaaatcctgaatgaccctgacctgatggcagcattcagtgacccagaggtcatggcggctttacaagatggtatgtttctggtttccgccacaaatcttgtgatgttggtttactttca

SEQ ID NO: 210430 - DNA, 2645 bp, Zea Mays
cacgcccataacctccacacatatatatattgtagttgtagtgagatggcacagcagaacagaggttattcgttttagctacccgttttgaagagaagccgattttggaggagacgatgatgagtccggcgtcggagcgcagcctcatcatccagagcgacgacgacgacgacgcccgatccggccacgacgtggaggagccggagcaggactccgactcctcctcgtcgtcctcatcctgcgccaccccacgccgcggcccaagctcacccccctacatccagcaatggccgcagagttacaggcaatcgatcgacattctcagcagcgtgcagtcacccaacctgagctttctggggactccaactctgagcaggctgtcgaactctttcctcgccatcaccgattctttccggagcaaggcccccgaaacgatctctagctttatcaagccactccttggccccacgccaagtgacgagcagcagcggcagcatgaaggcacccgaaagagttccgagtaccttgtgccctcgagaagatcatctctgcagcagatcccagaggatcaaaagccacctgtaggtggccatggggcgtctcatgaccagaactgctcttacacccagggagtgatgaatggaataaatgttctatgtggtgtggggatcctatcaacaccttatgccatcaaacaggggggctggattgggctggcgatactctgtacatttgctcttctcgcatggtacacaggtgtgctcctgcgccattgcctggacagcaaggagggcctcaagacatacccagatattggccatgcagcctttggcagcacaggccgcatagttatctcgataatactgtacgtggagttgtatgcatgttgcatcgagtatttgatattggagggtgacaatttgtcaaaattattccccaatgctcacctgaccattgggagcatgacactgaactcacatgtattttttgcaatcttgactaccatcatagtcatgccaaccacctggctccgtgacctgagctggctgagctacatttcagctgggggtgtcattgcatcaatccttgtggtcatctgcctgttcttggttggggttgtcaatgatttcggctttgagaatgaagggactgcactgaacgccccaggaattcctattgcaattggattatatggttactgctactcagggcatggggtttttccaaatatctattcctccctgaagaatcgcaaccagtttccttcaattctttttacttgtattgggctgtctacctttttgtatgctggtgctgcagtgatgggatacaaaatgtttggtgaagccacagagtcccaattcacactcaacttaccagataattctgtcatttctaagattgctgtttggacaacggtaattgttgcttgataaaccttttcaaattcctctttcaccccctccgtctcaaattaaatcaacttctaaagttatcctaagtcaaactattttaagtttgatcaaccttatagaaaagaacaccaatatttataacaccaaattagtatcactagatacactgtgaaatatatttcataatatacttatttggtgtcatggatgtaattataatatcatataaagttggtcaaacctaagatagttgacttagggtgaccctaagaattaatttattttgaaacggaggtagtaagaaaaagggcctgaccttgttgtttaataataattaatcatctctcgatgcttactgcaggtggcaaatccaataaccaaatatccttggtgtgccaattgatagtctcataaaaaaaaatggaacaaatgtttctttatgtccaagtatattttagtacatagagttagttaactacttagattcaaaagtaaaaagggtacactggaaatcgtgctgaaacatttctcccaagctcctctaaaatacagtcgggttcttcattccattgaggataccatacacgttttactacatcctcagattattgcaatattgttcgcttactttccttaatgaataaacacatatgcattaactattattccattggctatgagtttggaagagctgctgccaccaaaccaacaaaagtattctacaataatcatgcttagatcatctctggtgatatcaaccctcctgattgctctatctgtgcctttctttggacttgtgatggccttggttggttctttgtttgccatgcttgtgacctacattttgccttgcgcttgttttttggcgatcctcaagacaaaagtggggtggcatcagatagcagcttgctcgttcatcatagttgtcggggtttgctgtgcctacgtgggaacatactcgtccctgtcgaagataatccagaactacgcatagcacagctgttcctgtgatcctgtatatgcatctgcccgacaaaatcatgtgtgtgctatatgggccgaacatatgtacaagatgaaagtttaccattcaattcactcgatgtataataaattattggtgccttatcatagggctcaatgatttctactacgattttaaggttgtatggtgcgtgagtaacattgttccttatggtgagaaaaaagttgatttggtcttcttctagc

SEQ ID NO: 210431 - DNA, 2270 bp, Zea Mays
cacatatatatattgtagttgtagtgagatggcacagcagaacagaggttattcgttttagctacccgttttgaagagaagccgattttggaggagacgatgatgagtccggcgtcggagcgcagcctcatcatccagagcgacgacgacgacgacgcccgatccggccacgacgtggaggagccggagcaggactccgactcctcctcgtcgtcctcatcctgcgccaccccacgccgcggcccaagctcacccccctacatccagcaatggccgcagagttacaggcaatcgatcgacattctcagcagcgtgcagtcacccaacctgagctttctggggactccaactctgagcaggctgtcgaactctttcctcgccatcaccgattctttccggagcaaggcccccgaaacgatctctagctttatcaagccactccttggccccacgccaagtgacgagcagcagcggcagcatgaaggcacccgaaagagttccgagtaccttgtgccctcgagaagatcatctctgcagcagatcccagaggatcaaaagccacctgtaggtggccatggggcgtctcatgaccagaactgctcttacacccagggagtgatgaatggaataaatgttctatgtggtgtggggatcctatcaacaccttatgccatcaaacaggggggctggattgggctggcgatactctgtacatttgctcttctcgcatggtacacaggtgtgctcctgcgccattgcctggacagcaaggagggcctcaagacatacccagatattggccatgcagcctttggcagcacaggccgcatagttatctcgataatactgtacgtggagttgtatgcatgttgcatcgagtatttgatattggagggtgacaatttgtcaaaattattccccaatgctcacctgaccattgggagcatgacactgaactcacatgtattttttgcaatcttgactaccatcatagtcatgccaaccacctggctccgtgacctgagctggctgagctacatttcagctgggggtgtcattgcatcaatccttgtggtcatctgcctgttcttggttggggttgtcaatgatttcggctttgagaatgaagggactgcactgaacgccccaggaattcctattgcaattggattatatggttactgctactcagggcatggggtttttccaaatatctattcctccctgaagaatcgcaaccagtttccttcaattctttttacttgtattgggctgtctacctttttgtatgctggtgctgcagtgatgggatacaaaatgtttggtgaagccacagagtcccaattcacactcaacttaccagataattctgtcatttctaagattgctgtttggacaacggtggcaaatccaataaccaaatatccttggtgtgccaattgatagtctcataaaaaaaaatggaacaaatgtttctttatgtccaagtatattttagtacatagagttagttaactacttagattcaaaagtaaaaagggtacactggaaatcgtgctgaaacatttctcccaagctcctctaaaatacagtcgggttcttcattccattgaggataccatacacgttttactacatcctcagattattgcaatattgttcgcttactttccttaatgaataaacacatatgcattaactattattccattggctatgagtttggaagagctgctgccaccaaaccaacaaaagtattctacaataatcatgcttagatcatctctggtgatatcaaccctcctgattgctctatctgtgcctttctttggacttgtgatggccttggttggttctttgtttgccatgcttgtgacctacattttgccttgcgcttgttttttggcgatcctcaagacaaaagtggggtggcatcagatagcagcttgctcgttcatcatagttgtcggggtttgctgtgcctacgtgggaacatactcgtccctgtcgaagataatccagaactacgcatagcacagctgttcctgtgatcctgtatatgcatctgcccgacaaaatcatgtgtgtgctatatgggccgaacatatgtacaagatgaaagtttaccattcaattcactcgatgtataataaattattggtgccttatcatagggctcaatgatttctactacgattttaaggttgtatggtgcgtgagtaacattgttccttatggtgagaaaaaagttgatttggtcttcttctagc

SEQ ID NO: 210432 - DNA, 926 bp, Zea Mays
ctttcaccccctccgtctcaaattaaatcaacttctaaagttatcctaagtcaaactattttaagtttgatcaaccttatagaaaagaacaccaatatttataacaccaaattagtatcactagatacactgtgaaatatatttcataatatacttatttggtgtcatggatgtaattataatatcatataaagttggtcaaacctaagatagttgacttagggtgaccctaagaattaatttattttgaaacggaggtagtaagaaaaagggcctgaccttgttgtttaataataattaatcatctctcgatgcttactgcaggtggcaaatccaataaccaaatatgcattaactattattccattggctatgagtttggaagagctgctgccaccaaaccaacaaaagtattctacaataatcatgcttagatcatctctggtgatatcaaccctcctgattgctctatctgtgcctttctttggacttgtgatggccttggttggttctttgtttgccatgcttgtgacctacattttgccttgcgcttgttttttggcgatcctcaagacaaaagtggggtggcatcagatagcagcttgctcgttcatcatagttgtcggggtttgctgtgcctacgtgggaacatactcgtccctgtcgaagataatccagaactacgcatagcacagctgttcctgtgatcctgtatatgcatctgcccgacaaaatcatgtgtgtgctatatgggccgaacatatgtacaagatgaaagtttaccattcaattcactcgatgtataataaattattggtgccttatcatagggctcaatgatttctactacgattttaaggttgtatggtgcgtgagtaacattgttccttatggtgagaaaaaagttgatttggtcttcttctagc

SEQ ID NO: 210433 - DNA, 1529 bp, Zea Mays
tggcgatggtggagggattcgtacggggaagtagccaattcaaggagctagctcaggcttatgaggtcctcagtgatcctgaaaagcgggagatttatgatcaatatggtgaggatgccctcaaggagggaatgggaggtggtggagggatgcacgatccctttgacatattccagtcattctttggtggtggaagcccttttggaggtggtggcagcagtaggggcagaaggcagcgaaggggagaggatgtggttcatcctctaaaggtttctctggaggatttgtacaatggcacatcaaagaagctctctctgtcccgcagtgtcctctgctccaagtgcaatggtaagggttcaaagtctggagcttcatcgaggtgtgctggttgccaaggttctggctttaaggtccaaatccggcagttggggcctggaatgatccagcaaatgcagcatccttgcaacgagtgcaagggttctggagagacaatcagcgacaaggatagatgcccacagtgcaagggtgataaagttgtgcaggagaagaaggttcttgaagtgtttgtggagaaaggcatgcagaatgggcagaagatcacattccctggtgaagctgatgaagcgcctgacactgtcactggagatatcatttttgttctccagcagaaggagcatcccaagttcaagagaaagggcgatgacctcttctacgagcacaccctgaccttgactgaatctctgtgtggcttccagtttgttgtgactcacttggataacaggcagctgctgatcaaatcaaatccgggcgaagttgtgaagcctgattctttcaaggcgatcaacgacgaaggcatgcccatgtaccagaggccgttcatgaagggcaagctgtacatccacttctcggtggagttcccggactcgctgagcccggagcagtgcaaggccctggaggctgtgctcccgcccaagccggtgtcgcagtacaccgacatggagctggacgagtgcgaggagacgatgccctatgacgtgaacatcgaagcggagatgcggaggcggcagcagcagcaccaggaggcctacgacgaggatgaggacatgccgggcggcgcgcagagggtgcagtgcgcccagcagtaggcagcagtttggtagcggtgataaaatatttgacggcggcggaaaaatttgtgcgactactgttaggtccaaccgtccaattttacacgcgcgtattaatgttatgatcatacttgtctttgtttattatgtatgttttgcgttacgggatctgtgcggattagttctaggcgatgtttagattcaatttggtgttgctactagcagcgatctccaacccatatgacagttggaacgtgactgtgcctgctatttcctcgatcctgatctgtccgtacaaagcccggaatccgtcgaaccttaaacctcctttggaatggataataaataaataaattgtataggattcaattcctttcctagcagagccttttgacatcctcc

SEQ ID NO: 210434 - DNA, 1531 bp, Zea Mays
ccctgattctgaaaaatgtcaacgtgcacattcttacacattcaaggagctagctcaggcttatgaggtcctcagtgatcctgaaaagcgggagatttatgatcaatatggtgaggatgccctcaaggagggaatgggaggtggtggagggatgcacgatccctttgacatattccagtcattctttggtggtggaagcccttttggaggtggtggcagcagtaggggcagaaggcagcgaaggggagaggatgtggttcatcctctaaaggtttctctggaggatttgtacaatggcacatcaaagaagctctctctgtcccgcagtgtcctctgctccaagtgcaatggtaagggttcaaagtctggagcttcatcgaggtgtgctggttgccaaggttctggctttaaggtccaaatccggcagttggggcctggaatgatccagcaaatgcagcatccttgcaacgagtgcaagggttctggagagacaatcagcgacaaggatagatgcccacagtgcaagggtgataaagttgtgcaggagaagaaggttcttgaagtgtttgtggagaaaggcatgcagaatgggcagaagatcacattccctggtgaagctgatgaagcgcctgacactgtcactggagatatcatttttgttctccagcagaaggagcatcccaagttcaagagaaagggcgatgacctcttctacgagcacaccctgaccttgactgaatctctgtgtggcttccagtttgttgtgactcacttggataacaggcagctgctgatcaaatcaaatccgggcgaagttgtgaagcctgattctttcaaggcgatcaacgacgaaggcatgcccatgtaccagaggccgttcatgaagggcaagctgtacatccacttctcggtggagttcccggactcgctgagcccggagcagtgcaaggccctggaggctgtgctcccgcccaagccggtgtcgcagtacaccgacatggagctggacgagtgcgaggagacgatgccctatgacgtgaacatcgaagcggagatgcggaggcggcagcagcagcaccaggaggcctacgacgaggatgaggacatgccgggcggcgcgcagagggtgcagtgcgcccagcagtaggcagcagtttggtagcggtgataaaatatttgacggcggcggaaaaatttgtgcgactactgttaggtccaaccgtccaattttacacgcgcgtattaatgttatgatcatacttgtctttgtttattatgtatgttttgcgttacgggatctgtgcggattagttctaggcgatgtttagattcaatttggtgttgctactagcagcgatctccaacccatatgacagttggaacgtgactgtgcctgctatttcctcgatcctgatctgtccgtacaaagcccggaatccgtcgaaccttaaacctcctttggaatggataataaataaataaattgtataggattcaattcctttcctagcagagccttttgacatcctcc

SEQ ID NO: 210435 - DNA, 1981 bp, Zea Mays
atcaaaaaaagctacagccacggccaaagcagagcaggagcaggccgcgcggaacgagggaagcagcaggccgctagactagggagcggtcgccggcctcggcggcggagggatggggcgtgggggtgcggtgatggaggacggcgacagggaggagggaagctatccgacgctgctgcagcggtggtcctcgtcggtgtgggccgtcagcggcagcgggcgcctgctgtgggcgggcaacgaggcgtggcgggcgcacgtcgggatggccctcgtccaggtcgcctacggcggctaccacgtcctcaccaagtccgtcctcaacgtcggcatgaaccagatcgtcttctgcgtctaccgcgacctcgtcgcgctcgcgctcctcgcgcccatcgccttctttcgcgagaggatcttcgggaaccagctcctcttcctcctgggcctcggcttcaccaacgcctcctacgccgcggcgttccagccggccataccggtgttcacgttcctcctggccgcaatcgtcggcgtcgaggtgatcaacatcttcacgaaacacggggtcgtcaaagtcctcggcacagccgtgtgcgtctctggcgccgtcctgatggtcttctaccgaggcccatctctgatcgggaccggaggcgcggccgatgcaactgccctgtcagtggttattgaccacagccatgcctataactatgctcctcagtggctggccgcggccatgctccggaacggcgtggaggcatggcatctcggcgtcgtctgcctcatcggaaactgcttcctgatgggcgcttacctcgtcatccaggccccggtgctgatcaaataccccgcgagcttatccctgaccgcctactcctactccttcgcaaccttgttcatggtggtcaccggcgcgttcgccaccagtgggctccacgagtgggcgctgacagcgaccgagatcttagccatcttgtacgctggagtcgttgcgtcctgcctgaactacgcgatcatgacctgggcgaacaagatcctcgggccgtctctggtcgccctctacaacccactccaaccggcatgctctaccttgctctcgaccatgtttcttggaactccaatttacgttggaagtgtgattgggggactcttcatcatcgctggcctttacctggtcacttgggctcgctacaaagaggctcagagcgctctggtagccggttatctgcgacctcttcttctgccgaccaccaaggcagaaggaagctccttcagggggctccattgatccttttacaccccaggcagagaggcagatggatttttgcctcaagtgtttctctaggccagcggcgtcagcagatttagttttcatgtctttgttgtataccaatcttgcatatatttgagatggccagtactagtaccattttttcaagcattcaagcaaggttccattgtcagggaagaacggcagggcactgaagaaaatatcgtatcctgaacattgtattctggtgtcccaatcggcatttttgaagatgcccttttggttgtcctttcgacttcaacacttgtgtctgtaaggctagctgcagctgggtttaacgtcaccaacgaaagaatatgaatatcattttcatgcctaagaagtgaagctgcagtgcgctagagctatcgtgctcgtggcaagatgaactattcttctgtgatgatggaacctaacccgttccctgtattcaagggagagtcaaaataatactccaaagttcacgtactcgtgtatcagattttggaacaattggacaaagtagtctcgtattgtgccctttttgttctactctttttgttctactatatgcgtttatatcttctctgttacctatgctgtctgtgcttctttgggcattatgctccaataaaaattcaactttgacagatgttttgccgtcacaatacattgattcaatttgggctactgaga

SEQ ID NO: 210436 - DNA, 2083 bp, Zea Mays
atcaaaaaaagctacagccacggccaaagcagagcaggagcaggccgcgcggaacgagggaagcagcaggccgctagactagggagcggtcgccggcctcggcggcggagggatggggcgtgggggtgcggtgatggaggacggcgacagggaggagggaagctatccgacgctgctgcagcggtggtcctcgtcggtgtgggccgtcagcggcagcgggcgcctgctgtgggcgggcaacgaggcgtggcgggcgcacgtcgggatggccctcgtccaggtcgcctacggcggctaccacgtcctcaccaagtccgtcctcaacgtcggcatgaaccagatcgtcttctgcgtctaccgcgacctcgtcgcgctcgcgctcctcgcgcccatcgccttctttcgcgagagaaacgtgcggcgcccggtgactcctcgcctcctcgcgtccttcgctctcctcggattcactgggatcttcgggaaccagctcctcttcctcctgggcctcggcttcaccaacgcctcctacgccgcggcgttccagccggccataccggtgttcacgttcctcctggccgcaatcgtcggcgtcgaggtgatcaacatcttcacgaaacacggggtcgtcaaagtcctcggcacagccgtgtgcgtctctggcgccgtcctgatggtcttctaccgaggcccatctctgatcgggaccggaggcgcggccgatgcaactgccctgtcagtggttattgaccacagccatgcctataactatgctcctcagtggctggccgcggccatgctccggaacggcgtggaggcatggcatctcggcgtcgtctgcctcatcggaaactgcttcctgatgggcgcttacctcgtcatccaggtgacgcagacttggtgacgcagacttggcagcactggggccccggtgctgatcaaataccccgcgagcttatccctgaccgcctactcctactccttcgcaaccttgttcatggtggtcaccggcgcgttcgccaccagtgggctccacgagtgggcgctgacagcgaccgagatcttagccatcttgtacgctggagtcgttgcgtcctgcctgaactacgcgatcatgacctgggcgaacaagatcctcgggccgtctctggtcgccctctacaacccactccaaccggcatgctctaccttgctctcgaccatgtttcttggaactccaatttacgttggaagtgtgattgggggactcttcatcatcgctggcctttacctggtcacttgggctcgctacaaagaggctcagagcgctctggtagccggttatctgcgacctcttcttctgccgaccaccaaggcagaaggaagctccttcagggggctccattgatccttttacaccccaggcagagaggcagatggatttttgcctcaagtgtttctctaggccagcggcgtcagcagatttagttttcatgtctttgttgtataccaatcttgcatatatttgagatggccagtactagtaccattttttcaagcattcaagcaaggttccattgtcagggaagaacggcagggcactgaagaaaatatcgtatcctgaacattgtattctggtgtcccaatcggcatttttgaagatgcccttttggttgtcctttcgacttcaacacttgtgtctgtaaggctagctgcagctgggtttaacgtcaccaacgaaagaatatgaatatcattttcatgcctaagaagtgaagctgcagtgcgctagagctatcgtgctcgtggcaagatgaactattcttctgtgatgatggaacctaacccgttccctgtattcaagggagagtcaaaataatactccaaagttcacgtactcgtgtatcagattttggaacaattggacaaagtagtctcgtattgtgccctttttgttctactctttttgttctactatatgcgtttatatcttctctgttacctatgctgtctgtgcttctttgggcattatgctccaataaaaattcaactttgacagatgttttgccgtcacaatacattgattcaatttgggctactgaga

SEQ ID NO: 210437 - DNA, 6496 bp, Zea Mays
gttaaaccctccgccctccctccattgtgtctcctttcccagaaaaaccctcgttcagctgctacactcaccgcggtctctctctgtccatttcccgcctcctcgccgcaactagggtttcttaagccctcaccgcccatggcgagcggcagggcggctacatccagttccatcctcgtcaacgccgccggcaccagcaagaccctgtccgcatcgctatggtgggactccttcgtcgtcctctccgacgacctcgaccgagccactgctggcccctctgtcccggatgccctcgctaagcggatcaaaagccaccacgcgtggctccgagggtcggtctctatgttcgggaagccgaacgacgcgtccaggagcgcactggaagttggcgaggttgccgtcggggagcgtcgcctcactgtcaagccagagctcaaggaggccgcgcttcgtgcaagcaaatgcctgaacctggatgaagtgcaatcatacattctggtcaagagatcttcagaagtctctccaacaatccgtgatgctgatgctgaggagtttcttcatctggtatctgtacgatattaccttgagcgtcagtgcttactgaagtgcatcagaagaatctttgtgcatgcaagtgacgtgtctgattcaactgatcccattcgagatgaggcttcattattgattagtgaagagatagacagaaaactgatatctatcattgaagattctttttcaactgcatcttctgtaaaagcggaagcggaatttacaatttctagtctggaagaaactttgattgaagttaacttgattcttgacatattgtttcttactttttatgataacttctcaagatgtaatggtagacagtggataactttgtgttcaatttttaaggacattctatgtggttcttatggtgtcgggaaatttgttgcatctgttgaggcaaagaattcatttcattatgctaaagctcagctacttctcatccttattgaaactttggactttgagaatctcctccggatgattcatgatgaagttcctctgagtggagggtgttctgcattttctgtcggtgatattctggagatggatgttgaaatatcaaaattgcctgaattttcattggtagaatcaggaccacttatactggcttgggcagttttcctttgcctagttctgtctcttccagaaagtaacaccaacttggaaattgatcatacatcctatgcccgacgggcctttgagtttgcgccattcaattatttactaggagttctttgttcaagcatcttcagggagtcagatggtcctgtttctggttatcggggtatattgcggacattcatttcagcattcatcgcttcatatgagaaagaacacagttcctttgacatgatttcgagtattttatgtgaagtttatgatggagaggaatctctctgtatgcaattttgggataaagatagctttgttgatggtcctatcagatctgttcttcatatgctggaggaggagtatccttttcagatatctgaactgatacgtttcttatcagcagtttgccatgggacctggcctgctaattgtgtatataattatcttgagaggatgaatggagttacaacaatctataccatcccttgtgttgctgatggtgttggttatggccatcaaattgaaagtcatcatccagtcagcattcctagtattgaaggcattacaattccacaaggaacccatggctacattttgaaagttcttcaagaggataccacattagttcgctgggagttcccgcattctggggtatcctttttgctcataactctggcgcaagagctccattcatgcaattacaagaaggcatgtgatatcataggtctactttatcggatggtgtcgtcaaataaggacctgtgcttcgctttgatgcatgttgacaagtcactggctgttcaaacatcaaataacttaggacaaattgaaaagcatgtcaggattgatattgctaaggtattttgcaattccattttcaaatatgtgcgagatgttaataatgctgacatattgtccaaaacctttggtctactagcagaaatgatgaaatgcgctccatatcacgtgtttgatgcggcgttcgagtgcaacatcttcacttcacaattaagtagtccatcaagtgattggttactttctggtgccctagctagaatgctttttgctgcctatgaaggaaatggagattgttcttcgcttacatcttcagtgcttgactttaccactcaggttcttcggaaaggagcagatgctgatgatataatatcacctttaattgttttctcaattaaatacatcatgattaatcatgtgaactggaaacacaaggaatgtagtcgttggaagacaaccctacgggtgtttgaattggtgaaaagctgtcttcaagtaaaaccattctcatcaaagcttggtggcatcatttgggaaattctactatatgattcatctgtccacggtgtactctggagcatattatctgtactaacacgattactgcatgactcatataggagcaattatcatggtcttaaggatattgaagatatccagcttgtcctttgcaatggacttgatattatatatcacatcctgtccaatttaccagagggtatgcaagtagctgccgctagagcattctcagcattgtgtttcattgcatataaggcccaacctcagttgatggaaaatgccagctttacaagtgatgtttctgagatacggagattggaatcaaatatatcctgcattctagatgaggatgataaaaataatgattgtttggttgtggctgtattcaaccttttgacatctgctgctcgttatcagcctgcttttcttatttccttgatagagcagagtacgaagtcaactgatcataatgcttccaccaatgatcgtgacaatagagttttggttacttcaaaaagtaatgctagacttgttgaccaaatcttggactatattgataggtccattgagctcatgaatagatctcccttggtgttactcagtattctggacttgttgaaggcactatgggaaagtggtatacgatttttgtttattttagagaagctaagaagctctgtaacattctgggataacttatcacggtgtattcgtgctacacttgatatctcccctattgacaatattgatgccattgacgagaaattttcgttaaggtaccattgtcagggtaaaatatttgagatcatgtcacacgagttatttttgcaaggaaaattgcttacagagacttctaatactgtccaagatgatccaaaggggcaaaaagagcataaaagtgggccttgtcgtatcagtgtagtcttgaaatggttcgataatgctattttggccgatctggtcagtaatttgtcaagtaatgcatacaaaaaggaacttcatcatgcaaaggtagctgcctgcctatgtatcatccatttaataacaaagttgtcaaccggtgatactgggagcttgtctttctcattcatgaagaaaattcagatcatatcaacaaaattgttgcagcaccatgcatttttagctctcctgtcacagtattccctgcatggatacagcggtgaacaagaacttaataatttggttctcaatgatctttattaccttatacgtggagaactcgaaggacgtcagattagctctggcccttttcaggagttgctcagttttcttcttgggtttagaatttttgaacacaatcccttggagcaactacaaaacacatacctgatggcaaatgacaaatttttatttgatgtggagcacatacatgacgagcttggagttgatctctggactgattcagacaagaggtctaaagaagtagctaaaaaaatgctggatattatgagtaaagcaaatttaatgaagtattatgctgatgcaaaactttctgcattgatgtccttcttgaaatttttatctgtctacaaaggagcgatttctaacaaaaacttggacttacctgatggaggcatatcagtagcggccacacaatcagcaattaaatgtgcatgtaaatcatttgagtcaactgttgattcactgctgcctcaagctcatacagatgaggttttgtttcccctcttgtccgggcaagtggaattattgcttactttggcccgaatattgtttcatcaagcaaagaacaagaaatcaagccatctctgtccagatattgtacttctaatgaaaacttcaggtgccagcacttgtttgtttgttgatctcatgccatctgctcatgctcttaagcaaccagtgaagacacttcttgttctgcttttgtcgtcatatgagttcatgtacagcaaggttgacataaaagacctaccaaatgatattaacatttttggcgaattagcccttttaagtgtgagcttgctacctatactgtgcaaattggcagagaatagggaatgctctgatcttgctgttgcatcaatggacctaatattgaagggatctgtaccttctaatttatggatgcctattctgcaaaagcattttcatctccagactatactgcataaatgccagaatggtgatttattatctactcaagttatacttaatttcctcttgaccttggggcgaacaaaggatggtgctaaagttcttcagtctgccaatatttttgcattcttaaagttacttttgagtcagttgtctctggatgactcctgtttgagaaattccttgagcgcccaagtgaaggatgtgaacctatggggcttgggtctcggtattgttgcgtccctgaaccattgtttggatgatgacatttctcataacaatgtcgtgagcaacactatcagcttcctttcaggacatgtgcctttggtgtcatcatatctgtctacacagagtgctactactcatcagagcaagaaacgggcattgtcgcagaagtcacagacatcgctttcagcccttagtcttactgagaatattctcatacttctatgcatcttggcaaaataccattttccacgggacactggaaagaaggaagtagattcagaactaagagagattattatccacctgctagcatttataagcaaaggaagtgtaaagactggcaatgcctctaaatggaactcatcgtttttctgccctgctgttatcaaagaggaagtagcgcttaatgagaaaccaccactcatttgtagcaagtatgggtggttcagatttgcagcaagttgtactttgtcaactgcaggtgtttcagtttctcccagtgcagctttatcagtggtgagacgggacaagacttcaggagattctgattctataaggcagactcgttttactgagatattagctgttcagatatacaggattgcttttcttatcatgaagtttctctgtagtcaagcaaaagaagcagtaaaaagggcagaagaactggagtttcttgacctcgcccattttcctgagcttcccatgccagatattcttcatggtttacaggatcaagtggtttgtattgtcactgaaatattcgaggcaaatgggtcaagcactctaaatcccgagacagagaaggtatgccagctcctattggtgacacttgaaacgtcactttacatggaactatgtgtatcccaatcatgtggcatcaggccagtacttggtcggcttgaagatttctgcaaaggaattaaggctatgcttcaagctatagagaagcactccagttttgaaccttttgtcaggtcgctaactgaaattacttctcttttgtatcccgggcttttgcataataaccttctcatgtgactcttgtaaattgtcactgttaaagagatgtgttgttggctaactttgaattgagccacatatggacttgcatactcagttgacgtcacccgaggaagcttcgttttcgcacgttactgtcaccaaagtaaagtgggttccagcggctacgaagcaaattcgcagagccagggcaccaaatcaaactgaaggcgacgacgcccgaggaagcttcgttttcgcatcacctttgttcggtttcacagccgaggctcccaaagtggccagagaatcttggtggacttgcctttccgggactccacactgccgaccacgcttattcacccgtgtaaattatgctgggattctcctttgctggctcgtctggccgatgtgcgtcccatcatcacagagaactagaaacaaatgatacatatgtagatgctatgcgttcttgatcaatcagacacgcatttttttttctgtagaggaatacatgttcggcgcgttgcatctttacactaccatttgtttgccttctccatcctgtttaagccctgtttcaaaacgctaccatgcaaattaaccctaagggataatttgggagccgtaaaaccggaggggattggag

SEQ ID NO: 210438 - DNA, 6394 bp, Zea Mays
gttaaaccctccgccctccctccattgtgtctcctttcccagaaaaaccctcgttcagctgctacactcaccgcggtctctctctgtccatttcccgcctcctcgccgcaactagggtttcttaagccctcaccgcccatggcgagcggcagggcggctacatccagttccatcctcgtcaacgccgccggcaccagcaagaccctgtccgcatcgctatggtgggactccttcgtcgtcctctccgacgacctcgaccgagccactgctggcccctctgtcccggatgccctcgctaagcggatcaaaagccaccacgcgtggctccgagggtcggtctctatgttcgggaagccgaacgacgcgtccaggagcgcactggaagttggcgaggttgccgtcggggagcgtcgcctcactgtcaagccagagctcaaggaggccgcgcttcgtgcaagcaaatgcctgaacctggatgaagtgcaatcatacattctggtcaagagatcttcagaagtctctccaacaatccgtgatgctgatgctgaggagtttcttcatctggtatctgtacgatattaccttgagcgtcagtgcttactgaagtgcatcagaagaatctttgtgcatgcaagtgacgtgtctgattcaactgatcccattcgagatgaggcttcattattgattagtgaagagatagacagaaaactgatatctatcattgaagattctttttcaactgcatcttctgtaaaagcggaagcggaatttacaatttctagtctggaagaaactttgattgaagttaacttgattcttgacatattgtttcttactttttatgataacttctcaagatgtaatggtagacagtggataactttgtgttcaatttttaaggacattctatgtggttcttatggtgtcgggaaatttgttgcatctgttgaggcaaagaattcatttcattatgctaaagctcagctacttctcatccttattgaaactttggactttgagaatctcctccggatgattcatgatgaagttcctctgagtggagggtgttctgcattttctgtcggtgatattctggagatggatgttgaaatatcaaaattgcctgaattttcattggtagaatcaggaccacttatactggcttgggcagttttcctttgcctagttctgtctcttccagaaagtaacaccaacttggaaattgatcatacatcctatgcccgacgggcctttgagtttgcgccattcaattatttactaggagttctttgttcaagcatcttcagggagtcagatggtcctgtttctggttatcggggtatattgcggacattcatttcagcattcatcgcttcatatgagaaagaacacagttcctttgacatgatttcgagtattttatgtgaagtttatgatggagaggaatctctctgtatgcaattttgggataaagatagctttgttgatggtcctatcagatataattatcttgagaggatgaatggagttacaacaatctataccatcccttgtgttgctgatggtgttggttatggccatcaaattgaaagtcatcatccagtcagcattcctagtattgaaggcattacaattccacaaggaacccatggctacattttgaaagttcttcaagaggataccacattagttcgctgggagttcccgcattctggggtatcctttttgctcataactctggcgcaagagctccattcatgcaattacaagaaggcatgtgatatcataggtctactttatcggatggtgtcgtcaaataaggacctgtgcttcgctttgatgcatgttgacaagtcactggctgttcaaacatcaaataacttaggacaaattgaaaagcatgtcaggattgatattgctaaggtattttgcaattccattttcaaatatgtgcgagatgttaataatgctgacatattgtccaaaacctttggtctactagcagaaatgatgaaatgcgctccatatcacgtgtttgatgcggcgttcgagtgcaacatcttcacttcacaattaagtagtccatcaagtgattggttactttctggtgccctagctagaatgctttttgctgcctatgaaggaaatggagattgttcttcgcttacatcttcagtgcttgactttaccactcaggttcttcggaaaggagcagatgctgatgatataatatcacctttaattgttttctcaattaaatacatcatgattaatcatgtgaactggaaacacaaggaatgtagtcgttggaagacaaccctacgggtgtttgaattggtgaaaagctgtcttcaagtaaaaccattctcatcaaagcttggtggcatcatttgggaaattctactatatgattcatctgtccacggtgtactctggagcatattatctgtactaacacgattactgcatgactcatataggagcaattatcatggtcttaaggatattgaagatatccagcttgtcctttgcaatggacttgatattatatatcacatcctgtccaatttaccagagggtatgcaagtagctgccgctagagcattctcagcattgtgtttcattgcatataaggcccaacctcagttgatggaaaatgccagctttacaagtgatgtttctgagatacggagattggaatcaaatatatcctgcattctagatgaggatgataaaaataatgattgtttggttgtggctgtattcaaccttttgacatctgctgctcgttatcagcctgcttttcttatttccttgatagagcagagtacgaagtcaactgatcataatgcttccaccaatgatcgtgacaatagagttttggttacttcaaaaagtaatgctagacttgttgaccaaatcttggactatattgataggtccattgagctcatgaatagatctcccttggtgttactcagtattctggacttgttgaaggcactatgggaaagtggtatacgatttttgtttattttagagaagctaagaagctctgtaacattctgggataacttatcacggtgtattcgtgctacacttgatatctcccctattgacaatattgatgccattgacgagaaattttcgttaaggtaccattgtcagggtaaaatatttgagatcatgtcacacgagttatttttgcaaggaaaattgcttacagagacttctaatactgtccaagatgatccaaaggggcaaaaagagcataaaagtgggccttgtcgtatcagtgtagtcttgaaatggttcgataatgctattttggccgatctggtcagtaatttgtcaagtaatgcatacaaaaaggaacttcatcatgcaaaggtagctgcctgcctatgtatcatccatttaataacaaagttgtcaaccggtgatactgggagcttgtctttctcattcatgaagaaaattcagatcatatcaacaaaattgttgcagcaccatgcatttttagctctcctgtcacagtattccctgcatggatacagcggtgaacaagaacttaataatttggttctcaatgatctttattaccttatacgtggagaactcgaaggacgtcagattagctctggcccttttcaggagttgctcagttttcttcttgggtttagaatttttgaacacaatcccttggagcaactacaaaacacatacctgatggcaaatgacaaatttttatttgatgtggagcacatacatgacgagcttggagttgatctctggactgattcagacaagaggtctaaagaagtagctaaaaaaatgctggatattatgagtaaagcaaatttaatgaagtattatgctgatgcaaaactttctgcattgatgtccttcttgaaatttttatctgtctacaaaggagcgatttctaacaaaaacttggacttacctgatggaggcatatcagtagcggccacacaatcagcaattaaatgtgcatgtaaatcatttgagtcaactgttgattcactgctgcctcaagctcatacagatgaggttttgtttcccctcttgtccgggcaagtggaattattgcttactttggcccgaatattgtttcatcaagcaaagaacaagaaatcaagccatctctgtccagatattgtacttctaatgaaaacttcaggtgccagcacttgtttgtttgttgatctcatgccatctgctcatgctcttaagcaaccagtgaagacacttcttgttctgcttttgtcgtcatatgagttcatgtacagcaaggttgacataaaagacctaccaaatgatattaacatttttggcgaattagcccttttaagtgtgagcttgctacctatactgtgcaaattggcagagaatagggaatgctctgatcttgctgttgcatcaatggacctaatattgaagggatctgtaccttctaatttatggatgcctattctgcaaaagcattttcatctccagactatactgcataaatgccagaatggtgatttattatctactcaagttatacttaatttcctcttgaccttggggcgaacaaaggatggtgctaaagttcttcagtctgccaatatttttgcattcttaaagttacttttgagtcagttgtctctggatgactcctgtttgagaaattccttgagcgcccaagtgaaggatgtgaacctatggggcttgggtctcggtattgttgcgtccctgaaccattgtttggatgatgacatttctcataacaatgtcgtgagcaacactatcagcttcctttcaggacatgtgcctttggtgtcatcatatctgtctacacagagtgctactactcatcagagcaagaaacgggcattgtcgcagaagtcacagacatcgctttcagcccttagtcttactgagaatattctcatacttctatgcatcttggcaaaataccattttccacgggacactggaaagaaggaagtagattcagaactaagagagattattatccacctgctagcatttataagcaaaggaagtgtaaagactggcaatgcctctaaatggaactcatcgtttttctgccctgctgttatcaaagaggaagtagcgcttaatgagaaaccaccactcatttgtagcaagtatgggtggttcagatttgcagcaagttgtactttgtcaactgcaggtgtttcagtttctcccagtgcagctttatcagtggtgagacgggacaagacttcaggagattctgattctataaggcagactcgttttactgagatattagctgttcagatatacaggattgcttttcttatcatgaagtttctctgtagtcaagcaaaagaagcagtaaaaagggcagaagaactggagtttcttgacctcgcccattttcctgagcttcccatgccagatattcttcatggtttacaggatcaagtggtttgtattgtcactgaaatattcgaggcaaatgggtcaagcactctaaatcccgagacagagaaggtatgccagctcctattggtgacacttgaaacgtcactttacatggaactatgtgtatcccaatcatgtggcatcaggccagtacttggtcggcttgaagatttctgcaaaggaattaaggctatgcttcaagctatagagaagcactccagttttgaaccttttgtcaggtcgctaactgaaattacttctcttttgtatcccgggcttttgcataataaccttctcatgtgactcttgtaaattgtcactgttaaagagatgtgttgttggctaactttgaattgagccacatatggacttgcatactcagttgacgtcacccgaggaagcttcgttttcgcacgttactgtcaccaaagtaaagtgggttccagcggctacgaagcaaattcgcagagccagggcaccaaatcaaactgaaggcgacgacgcccgaggaagcttcgttttcgcatcacctttgttcggtttcacagccgaggctcccaaagtggccagagaatcttggtggacttgcctttccgggactccacactgccgaccacgcttattcacccgtgtaaattatgctgggattctcctttgctggctcgtctggccgatgtgcgtcccatcatcacagagaactagaaacaaatgatacatatgtagatgctatgcgttcttgatcaatcagacacgcatttttttttctgtagaggaatacatgttcggcgcgttgcatctttacactaccatttgtttgccttctccatcctgtttaagccctgtttcaaaacgctaccatgcaaattaaccctaagggataatttgggagccgtaaaaccggaggggattggag

SEQ ID NO: 210439 - DNA, 6422 bp, Zea Mays
gttaaaccctccgccctccctccattgtgtctcctttcccagaaaaaccctcgttcagctgctacactcaccgcggtctctctctgtccatttcccgcctcctcgccgcaactagggtttcttaagccctcaccgcccatggcgagcggcagggcggctacatccagttccatcctcgtcaacgccgccggcaccagcaagaccctgtccgcatcgctatggtgggactccttcgtcgtcctctccgacgacctcgaccgagccactgctggcccctctgtcccggatgccctcgctaagcggatcaaaagccaccacgcgtggctccgagggtcggtctctatgttcgggaagccgaacgacgcgtccaggagcgcactggaagttggcgaggttgccgtcggggagcgtcgcctcactgtcaagccagagctcaaggaggccgcgcttcgtgcaagcaaatgcctgaacctggatgaagtgcaatcatacattctggtcaagagatcttcagaagtctctccaacaatccgtgatgctgatgctgaggagtttcttcatctggtatctgtacgatattaccttgagcgtcagtgcttactgaagtgcatcagaagaatctttgtgcatgcaagtgacgtgtctgattcaactgatcccattcgagatgaggcttcattattgattagtgaagagatagacagaaaactgatatctatcattgaagattctttttcaactgcatcttctgtaaaagcggaagcggaatttacaatttctagtctggaagaaactttgattgaagttaacttgattcttgacatattgtttcttactttttatgataacttctcaagatgtaatggtagacagtggataactttgtgttcaatttttaaggacattctatgtggttcttatggtgtcgggaaatttgttgcatctgttgaggcaaagaattcatttcattatgctaaagctcagctacttctcatccttattgaaactttggactttgagaatctcctccggatgattcatgatgaagttcctctgagtggagggtgttctgcattttctgtcggtgatattctggagatggatgttgaaatatcaaaattgcctgaattttcattggtagaatcaggaccacttatactggcttgggcagttttcctttgcctagttctgtctcttccagaaagtaacaccaacttggaaattgatcatacatcctatgcccgacgggcctttgagtttgcgccattcaattatttactaggagttctttgttcaagcatcttcagggagtcagatggtcctgtttctggttatcggggtatattgcggacattcatttcagcattcatcgcttcatatgaggtatcttatcagaaagaacacagttcctttgacatgatttcgagtattttatgtgaagtttatgatggagaggaatctctctgtatgcaattttgggataaagatagctttgttgatggtcctatcagatctgttcttcatatgctggaggaggagtatccttttcagatatctgaactgatacgtttcttatcagcagtttgccatgggacctggcctgctaattgtgtatataattatcttgagaggatgaatggagttacaacaatctataccatcccttgtgttgctgatggtgttggttatggccatcaaattgaaagtcatcatccagtcagcattcctagtattgaaggcattacaattccacaaggaacccatggctacattttgaaagttcttcaagaggataccacattagttcgctgggagttcccgcattctggggtatcctttttgctcataactctggcgcaagagctccattcatgcaattacaagaaggcatgtgatatcataggtctactttatcggatggtgtcgtcaaataaggattgatattgctaaggtattttgcaattccattttcaaatatgtgcgagatgttaataatgctgacatattgtccaaaacctttggtctactagcagaaatgatgaaatgcgctccatatcacgtgtttgatgcggcgttcgagtgcaacatcttcacttcacaattaagtagtccatcaagtgattggttactttctggtgccctagctagaatgctttttgctgcctatgaaggaaatggagattgttcttcgcttacatcttcagtgcttgactttaccactcaggttcttcggaaaggagcagatgctgatgatataatatcacctttaattgttttctcaattaaatacatcatgattaatcatgtgaactggaaacacaaggaatgtagtcgttggaagacaaccctacgggtgtttgaattggtgaaaagctgtcttcaagtaaaaccattctcatcaaagcttggtggcatcatttgggaaattctactatatgattcatctgtccacggtgtactctggagcatattatctgtactaacacgattactgcatgactcatataggagcaattatcatggtcttaaggatattgaagatatccagcttgtcctttgcaatggacttgatattatatatcacatcctgtccaatttaccagagggtatgcaagtagctgccgctagagcattctcagcattgtgtttcattgcatataaggcccaacctcagttgatggaaaatgccagctttacaagtgatgtttctgagatacggagattggaatcaaatatatcctgcattctagatgaggatgataaaaataatgattgtttggttgtggctgtattcaaccttttgacatctgctgctcgttatcagcctgcttttcttatttccttgatagagcagagtacgaagtcaactgatcataatgcttccaccaatgatcgtgacaatagagttttggttacttcaaaaagtaatgctagacttgttgaccaaatcttggactatattgataggtccattgagctcatgaatagatctcccttggtgttactcagtattctggacttgttgaaggcactatgggaaagtggtatacgatttttgtttattttagagaagctaagaagctctgtaacattctgggataacttatcacggtgtattcgtgctacacttgatatctcccctattgacaatattgatgccattgacgagaaattttcgttaaggtaccattgtcagggtaaaatatttgagatcatgtcacacgagttatttttgcaaggaaaattgcttacagagacttctaatactgtccaagatgatccaaaggggcaaaaagagcataaaagtgggccttgtcgtatcagtgtagtcttgaaatggttcgataatgctattttggccgatctggtcagtaatttgtcaagtaatgcatacaaaaaggaacttcatcatgcaaaggtagctgcctgcctatgtatcatccatttaataacaaagttgtcaaccggtgatactgggagcttgtctttctcattcatgaagaaaattcagatcatatcaacaaaattgttgcagcaccatgcatttttagctctcctgtcacagtattccctgcatggatacagcggtgaacaagaacttaataatttggttctcaatgatctttattaccttatacgtggagaactcgaaggacgtcagattagctctggcccttttcaggagttgctcagttttcttcttgggtttagaatttttgaacacaatcccttggagcaactacaaaacacatacctgatggcaaatgacaaatttttatttgatgtggagcacatacatgacgagcttggagttgatctctggactgattcagacaagaggtctaaagaagtagctaaaaaaatgctggatattatgagtaaagcaaatttaatgaagtattatgctgatgcaaaactttctgcattgatgtccttcttgaaatttttatctgtctacaaaggagcgatttctaacaaaaacttggacttacctgatggaggcatatcagtagcggccacacaatcagcaattaaatgtgcatgtaaatcatttgagtcaactgttgattcactgctgcctcaagctcatacagatgaggttttgtttcccctcttgtccgggcaagtggaattattgcttactttggcccgaatattgtttcatcaagcaaagaacaagaaatcaagccatctctgtccagatattgtacttctaatgaaaacttcaggtgccagcacttgtttgtttgttgatctcatgccatctgctcatgctcttaagcaaccagtgaagacacttcttgttctgcttttgtcgtcatatgagttcatgtacagcaaggttgacataaaagacctaccaaatgatattaacatttttggcgaattagcccttttaagtgtgagcttgctacctatactgtgcaaattggcagagaatagggaatgctctgatcttgctgttgcatcaatggacctaatattgaagggatctgtaccttctaatttatggatgcctattctgcaaaagcattttcatctccagactatactgcataaatgccagaatggtgatttattatctactcaagttatacttaatttcctcttgaccttggggcgaacaaaggatggtgctaaagttcttcagtctgccaatatttttgcattcttaaagttacttttgagtcagttgtctctggatgactcctgtttgagaaattccttgagcgcccaagtgaaggatgtgaacctatggggcttgggtctcggtattgttgcgtccctgaaccattgtttggatgatgacatttctcataacaatgtcgtgagcaacactatcagcttcctttcaggacatgtgcctttggtgtcatcatatctgtctacacagagtgctactactcatcagagcaagaaacgggcattgtcgcagaagtcacagacatcgctttcagcccttagtcttactgagaatattctcatacttctatgcatcttggcaaaataccattttccacgggacactggaaagaaggaagtagattcagaactaagagagattattatccacctgctagcatttataagcaaaggaagtgtaaagactggcaatgcctctaaatggaactcatcgtttttctgccctgctgttatcaaagaggaagtagcgcttaatgagaaaccaccactcatttgtagcaagtatgggtggttcagatttgcagcaagttgtactttgtcaactgcaggtgtttcagtttctcccagtgcagctttatcagtggtgagacgggacaagacttcaggagattctgattctataaggcagactcgttttactgagatattagctgttcagatatacaggattgcttttcttatcatgaagtttctctgtagtcaagcaaaagaagcagtaaaaagggcagaagaactggagtttcttgacctcgcccattttcctgagcttcccatgccagatattcttcatggtttacaggatcaagtggtttgtattgtcactgaaatattcgaggcaaatgggtcaagcactctaaatcccgagacagagaaggtatgccagctcctattggtgacacttgaaacgtcactttacatggaactatgtgtatcccaatcatgtggcatcaggccagtacttggtcggcttgaagatttctgcaaaggaattaaggctatgcttcaagctatagagaagcactccagttttgaaccttttgtcaggtcgctaactgaaattacttctcttttgtatcccgggcttttgcataataaccttctcatgtgactcttgtaaattgtcactgttaaagagatgtgttgttggctaactttgaattgagccacatatggacttgcatactcagttgacgtcacccgaggaagcttcgttttcgcacgttactgtcaccaaagtaaagtgggttccagcggctacgaagcaaattcgcagagccagggcaccaaatcaaactgaaggcgacgacgcccgaggaagcttcgttttcgcatcacctttgttcggtttcacagccgaggctcccaaagtggccagagaatcttggtggacttgcctttccgggactccacactgccgaccacgcttattcacccgtgtaaattatgctgggattctcctttgctggctcgtctggccgatgtgcgtcccatcatcacagagaactagaaacaaatgatacatatgtagatgctatgcgttcttgatcaatcagacacgcatttttttttctgtagaggaatacatgttcggcgcgttgcatctttacactaccatttgtttgccttctccatcctgtttaagccctgtttcaaaacgctaccatgcaaattaaccctaagggataatttgggagccgtaaaaccggaggggattggag

SEQ ID NO: 210440 - DNA, 6406 bp, Zea Mays
gttaaaccctccgccctccctccattgtgtctcctttcccagaaaaaccctcgttcagctgctacactcaccgcggtctctctctgtccatttcccgcctcctcgccgcaactagggtttcttaagccctcaccgcccatggcgagcggcagggcggctacatccagttccatcctcgtcaacgccgccggcaccagcaagaccctgtccgcatcgctatggtgggactccttcgtcgtcctctccgacgacctcgaccgagccactgctggcccctctgtcccggatgccctcgctaagcggatcaaaagccaccacgcgtggctccgagggtcggtctctatgttcgggaagccgaacgacgcgtccaggagcgcactggaagttggcgaggttgccgtcggggagcgtcgcctcactgtcaagccagagctcaaggaggccgcgcttcgtgcaagcaaatgcctgaacctggatgaagtgcaatcatacattctggtcaagagatcttcagaagtctctccaacaatccgtgatgctgatgctgaggagtttcttcatctggtatctgtacgatattaccttgagcgtcagtgcttactgaagtgcatcagaagaatctttgtgcatgcaagtgacgtgtctgattcaactgatcccattcgagatgaggcttcattattgattagtgaagagatagacagaaaactgatatctatcattgaagattctttttcaactgcatcttctgtaaaagcggaagcggaatttacaatttctagtctggaagaaactttgattgaagttaacttgattcttgacatattgtttcttactttttatgataacttctcaagatgtaatggtagacagtggataactttgtgttcaatttttaaggacattctatgtggttcttatggtgtcgggaaatttgttgcatctgttgaggcaaagaattcatttcattatgctaaagctcagctacttctcatccttattgaaactttggactttgagaatctcctccggatgattcatgatgaagttcctctgagtggagggtgttctgcattttctgtcggtgatattctggagatggatgttgaaatatcaaaattgcctgaattttcattggtagaatcaggaccacttatactggcttgggcagttttcctttgcctagttctgtctcttccagaaagtaacaccaacttggaaattgatcatacatcctatgcccgacgggcctttgagtttgcgccattcaattatttactaggagttctttgttcaagcatcttcagggagtcagatggtcctgtttctggttatcggggtatattgcggacattcatttcagcattcatcgcttcatatgaggtatcttatcagaaagaacacagttcctttgacatgatttcgagtattttatgtgaagtttatgatggagaggaatctctctgtatgcaattttgggataaagatagctttgttgatggtcctatcagatataattatcttgagaggatgaatggagttacaacaatctataccatcccttgtgttgctgatggtgttggttatggccatcaaattgaaagtcatcatccagtcagcattcctagtattgaaggcattacaattccacaaggaacccatggctacattttgaaagttcttcaagaggataccacattagttcgctgggagttcccgcattctggggtatcctttttgctcataactctggcgcaagagctccattcatgcaattacaagaaggcatgtgatatcataggtctactttatcggatggtgtcgtcaaataaggacctgtgcttcgctttgatgcatgttgacaagtcactggctgttcaaacatcaaataacttaggacaaattgaaaagcatgtcaggattgatattgctaaggtattttgcaattccattttcaaatatgtgcgagatgttaataatgctgacatattgtccaaaacctttggtctactagcagaaatgatgaaatgcgctccatatcacgtgtttgatgcggcgttcgagtgcaacatcttcacttcacaattaagtagtccatcaagtgattggttactttctggtgccctagctagaatgctttttgctgcctatgaaggaaatggagattgttcttcgcttacatcttcagtgcttgactttaccactcaggttcttcggaaaggagcagatgctgatgatataatatcacctttaattgttttctcaattaaatacatcatgattaatcatgtgaactggaaacacaaggaatgtagtcgttggaagacaaccctacgggtgtttgaattggtgaaaagctgtcttcaagtaaaaccattctcatcaaagcttggtggcatcatttgggaaattctactatatgattcatctgtccacggtgtactctggagcatattatctgtactaacacgattactgcatgactcatataggagcaattatcatggtcttaaggatattgaagatatccagcttgtcctttgcaatggacttgatattatatatcacatcctgtccaatttaccagagggtatgcaagtagctgccgctagagcattctcagcattgtgtttcattgcatataaggcccaacctcagttgatggaaaatgccagctttacaagtgatgtttctgagatacggagattggaatcaaatatatcctgcattctagatgaggatgataaaaataatgattgtttggttgtggctgtattcaaccttttgacatctgctgctcgttatcagcctgcttttcttatttccttgatagagcagagtacgaagtcaactgatcataatgcttccaccaatgatcgtgacaatagagttttggttacttcaaaaagtaatgctagacttgttgaccaaatcttggactatattgataggtccattgagctcatgaatagatctcccttggtgttactcagtattctggacttgttgaaggcactatgggaaagtggtatacgatttttgtttattttagagaagctaagaagctctgtaacattctgggataacttatcacggtgtattcgtgctacacttgatatctcccctattgacaatattgatgccattgacgagaaattttcgttaaggtaccattgtcagggtaaaatatttgagatcatgtcacacgagttatttttgcaaggaaaattgcttacagagacttctaatactgtccaagatgatccaaaggggcaaaaagagcataaaagtgggccttgtcgtatcagtgtagtcttgaaatggttcgataatgctattttggccgatctggtcagtaatttgtcaagtaatgcatacaaaaaggaacttcatcatgcaaaggtagctgcctgcctatgtatcatccatttaataacaaagttgtcaaccggtgatactgggagcttgtctttctcattcatgaagaaaattcagatcatatcaacaaaattgttgcagcaccatgcatttttagctctcctgtcacagtattccctgcatggatacagcggtgaacaagaacttaataatttggttctcaatgatctttattaccttatacgtggagaactcgaaggacgtcagattagctctggcccttttcaggagttgctcagttttcttcttgggtttagaatttttgaacacaatcccttggagcaactacaaaacacatacctgatggcaaatgacaaatttttatttgatgtggagcacatacatgacgagcttggagttgatctctggactgattcagacaagaggtctaaagaagtagctaaaaaaatgctggatattatgagtaaagcaaatttaatgaagtattatgctgatgcaaaactttctgcattgatgtccttcttgaaatttttatctgtctacaaaggagcgatttctaacaaaaacttggacttacctgatggaggcatatcagtagcggccacacaatcagcaattaaatgtgcatgtaaatcatttgagtcaactgttgattcactgctgcctcaagctcatacagatgaggttttgtttcccctcttgtccgggcaagtggaattattgcttactttggcccgaatattgtttcatcaagcaaagaacaagaaatcaagccatctctgtccagatattgtacttctaatgaaaacttcaggtgccagcacttgtttgtttgttgatctcatgccatctgctcatgctcttaagcaaccagtgaagacacttcttgttctgcttttgtcgtcatatgagttcatgtacagcaaggttgacataaaagacctaccaaatgatattaacatttttggcgaattagcccttttaagtgtgagcttgctacctatactgtgcaaattggcagagaatagggaatgctctgatcttgctgttgcatcaatggacctaatattgaagggatctgtaccttctaatttatggatgcctattctgcaaaagcattttcatctccagactatactgcataaatgccagaatggtgatttattatctactcaagttatacttaatttcctcttgaccttggggcgaacaaaggatggtgctaaagttcttcagtctgccaatatttttgcattcttaaagttacttttgagtcagttgtctctggatgactcctgtttgagaaattccttgagcgcccaagtgaaggatgtgaacctatggggcttgggtctcggtattgttgcgtccctgaaccattgtttggatgatgacatttctcataacaatgtcgtgagcaacactatcagcttcctttcaggacatgtgcctttggtgtcatcatatctgtctacacagagtgctactactcatcagagcaagaaacgggcattgtcgcagaagtcacagacatcgctttcagcccttagtcttactgagaatattctcatacttctatgcatcttggcaaaataccattttccacgggacactggaaagaaggaagtagattcagaactaagagagattattatccacctgctagcatttataagcaaaggaagtgtaaagactggcaatgcctctaaatggaactcatcgtttttctgccctgctgttatcaaagaggaagtagcgcttaatgagaaaccaccactcatttgtagcaagtatgggtggttcagatttgcagcaagttgtactttgtcaactgcaggtgtttcagtttctcccagtgcagctttatcagtggtgagacgggacaagacttcaggagattctgattctataaggcagactcgttttactgagatattagctgttcagatatacaggattgcttttcttatcatgaagtttctctgtagtcaagcaaaagaagcagtaaaaagggcagaagaactggagtttcttgacctcgcccattttcctgagcttcccatgccagatattcttcatggtttacaggatcaagtggtttgtattgtcactgaaatattcgaggcaaatgggtcaagcactctaaatcccgagacagagaaggtatgccagctcctattggtgacacttgaaacgtcactttacatggaactatgtgtatcccaatcatgtggcatcaggccagtacttggtcggcttgaagatttctgcaaaggaattaaggctatgcttcaagctatagagaagcactccagttttgaaccttttgtcaggtcgctaactgaaattacttctcttttgtatcccgggcttttgcataataaccttctcatgtgactcttgtaaattgtcactgttaaagagatgtgttgttggctaactttgaattgagccacatatggacttgcatactcagttgacgtcacccgaggaagcttcgttttcgcacgttactgtcaccaaagtaaagtgggttccagcggctacgaagcaaattcgcagagccagggcaccaaatcaaactgaaggcgacgacgcccgaggaagcttcgttttcgcatcacctttgttcggtttcacagccgaggctcccaaagtggccagagaatcttggtggacttgcctttccgggactccacactgccgaccacgcttattcacccgtgtaaattatgctgggattctcctttgctggctcgtctggccgatgtgcgtcccatcatcacagagaactagaaacaaatgatacatatgtagatgctatgcgttcttgatcaatcagacacgcatttttttttctgtagaggaatacatgttcggcgcgttgcatctttacactaccatttgtttgccttctccatcctgtttaagccctgtttcaaaacgctaccatgcaaattaaccctaagggataatttgggagccgtaaaaccggaggggattggag

SEQ ID NO: 210441 - DNA, 1003 bp, Zea Mays
cctccctttgctcccgaagcgcgtccccttcttcctccctttgcgctccctttgttctcgctttgtttgtttctactgctttggtggttgtgaccgaagcacttctcttggaagaacacgtagagcttttgttagcttgaggaaggagcagccttttgtctgtacttgttctgctgggaacttgggcaacaacaatgaagctaagcaggccaatattctttctggcacgttgattttgctggtttgtgtaataggtcaatacatctcatcaaagaaagaaggaattcgggtattgtacctataggttcactgcaattaggtgtttgtaggcaccgagctgacctaatgaagtatttgtgtgaccgggcggatcctccaattccttgtgagcttgtgaggggccatcttgactatacacctcatgcttggaacattgttcctgttaaaaagaggaatggctgggtaaggatgattgttgatgcttgttaccccaccagcataaatgaagagacagatccagagtacttttgcaggcgtccacagaggaaattagtgcacggttctgcctttctccacgcgctgggcttgcatccatggccgcgaatctcacccacaaagcttccatccatggctgtcgcgaccaatccatggcagccacgtcccggtccccgtaccttgggcaaatgtgtttctatgtttcctgagttgtgttggctagcccatgatataaagtgatcattgcctatctattacttagattgattaattgtctattatttactatttatttattactgatattttattgttgttattgttgtactcttgacctttgtaaatgctattgctcattcttttttaaagcagtctgcttcactaggcactaaatatgttgtaatttttagcaatggcatgctgcatcattttttgtagaaatattcaaatcgtgtccttttgattttgctctggaagacaaatggatctaggttctgggttgtgttta

SEQ ID NO: 210442 - DNA, 973 bp, Zea Mays
gaagcacttctcttggaagaacacgtagagcttttgttagcttgaggaaggagcagccttttgtctgtacttgttctgctgggaacttgggcaacaacaatgaagctaagcaggccaatattctttctggcacgttgattttgctggtttgtgtaataggtcaatacatctcatcaaagaaagaaggaattcgggtattgtacctataggttcactgcaattaggtgtttgtaggcaccgagctgacctaatgaagtatttgtgtgaccgggcggatcctccaattccttgtgagcttgtgaggggccatcttgactatacacctcatgcttggaacattgttcctgttaaaaagaggaatggctgggtaaggatgattgttgatgcttgttaccccaccagcataaatgaagagacagatccagagtacttttgcagaaactgatggttaatgctggtagatactcttttaatctctactactacttatgtaactaacgtaggcgtccacagaggaaattagtgcacggttctgcctttctccacgcgctgggcttgcatccatggccgcgaatctcacccacaaagcttccatccatggctgtcgcgaccaatccatggcagccacgtcccggtccccgtaccttgggcaaatgtgtttctatgtttcctgagttgtgttggctagcccatgatataaagtgatcattgcctatctattacttagattgattaattgtctattatttactatttatttattactgatattttattgttgttattgttgtactcttgacctttgtaaatgctattgctcattcttttttaaagcagtctgcttcactaggcactaaatatgttgtaatttttagcaatggcatgctgcatcattttttgtagaaatattcaaatcgtgtccttttgattttgctctggaagacaaatggatctaggttctgggttgtgttta

SEQ ID NO: 210443 - DNA, 1693 bp, Zea Mays
cttttgaatataactgaacttcttctcgcccctccaacccttcatgatgcttagataatatacagtgctgggttttagcactgttttgagtttttaaattgagctaaggcttcagtgttagtcttgaaagatgaacggttcaagtggttcccaagggcatcatgtcagtggagagaagaagcaagtgtgtcatgttagccggcccattcttaacaatggaccaaagcaccgtccattgacccccatgaggcgatgccgtggtgtagcatgtgtagtgattatactgtcaacagcattcctgttggtagtttacttggctcctattactacttttgctgtgcggctgttcagtgtgcattacagccgaaaggcgacttcctttctatttggaatgtggttatctttatggccgttcttgtttgagaagataaacaaaaccaaggttgtcttctccggtgaaaatgtgcctccaaaacgacgtgtattgttatttgctaaccacaggaccgaggttgactggatgtacttgtgggatcttgcactgaggaaaggccatttaggatatatcaagtacatacttaagagcagcttgatgaagttgcctatttttagctgggcatttcacatttttgagtttatcccggtagaacggaaatgggagattgatgaagcaattattcagaacaagctatcaaaatttaagaacccgagagatcctatctggttggcggtttttcctgaaggcacggattatactgagaagaaatgcatcatgagtcaagagtatgcttcagaacatggcttgcctatgctagaacatgtcctccttccaaagacaaagggcttcatttgttgtttgcaagagctgaggagttccttagatgcagtttatgatgtcacaatagcatacaagcatcgactcccagattttctggacaatgtgtatggcgttgatccttctgaagtccacatccacgtcagaatggttcagctccatcacatccccacaacagaagacaagataacagaatggatggtagagaggtttaggcagaaggaccagctcctggcagatttcttcatgaaggggcactttcctgatgaaggaactgaaggagatctgtcgacgccgaagtgcctggcaaacttcttaacagtagtatgcttgacggccatctgtttgtacctaactcttttctcatttgtgtggttcaaggtctatgttgtagcaagctgcgcttacctctcatttgttacctattactccatactaccaccccaactgataggttcaccagagggtgatgtcaaggccaaaaaggttgtgtagatgttgatgtaacttgccatgaaaactgtacatccgcaaacgatttttactgctggagtttctgccttgtgacatttaaggttccctttctgcagtaggaggtatgaatgtatgatagtgcgtatgtaggaattttctgtgattcatcagtgtgtgagggccctatctgaaggcagtaaactgattttagatatatgttcttaacatttttataaacaaaactagaccacatttgttacaaatattgaagatttatttatttattttatttgatctttgttctgatgcaaacaatcaaacattagctatatccaacttgaatatattaatacaaacaaccaaacaaaaacaaccaaacaaacg

SEQ ID NO: 210444 - DNA, 1228 bp, Zea Mays
tcggcgtcgccgacgagctccgccccaagtacctccgcatccagggctggccgccgcaggatgaggatgaggtcgccggggcgggatctgcgcgagttctccttcgacgaggaagctcccgggaggtacgcgcggtggagaggagagcgcttctcgagacgcttgcttctaagctgccaccaggcgccatatcgttctcgtcgaagctgaaatcgatctcggagcaagggcgtgcaggcaccctgctcgaactggaagacgggaggcagattcttgccaagatcgtggtcggctgcgacggagtgaactcgccgatcgcgaggtggatgggtttctcggagccccggtacgtcgggcacatggcgttccggggcctcgcggagtacgccgacggccagccgttcgagcccaaggtgaactacatctacggccgaggcgtccgtgccggctttgtccccgtctccgcaaccaaagtctactggttcatctgcttcaacagacaagatccagggcctaagatcaccgaccccacggcgctcaagaccgaggcgctggagctcgtccgcggctggccatcggacctcctggcggtgatgcgcagcacgcccgagggcgccgtggtgaggacgccgctggtggaccggtggctctggcccgggctggccccggccgcgtcgaggggcggccgggtggtgctggccggcgacgcgtggcatcccatgacgcccaacctcgggcagggcgcctgctgcgcgctcgaggacgccatcgtactggcgcgccgcctcgccgacgccggcgcggacggggcccaggccgccgccgccatgcgcgcgtacgaggcggagcggtgggcgcgcgtgttcccgctcacggcgcgcgcggggctggtgggtgcgctcgtgcagtgggagaacgcggcggtgtgcgcggcccgcgacggcgtggtcatccccaggctcgtcaggctgggaccgttcctggagcacaccaacttcgagtgcgacctgctcgaaccggcgccgggagtcgccatgacaccggcacactagctttctccggcacaatgtaactagtagtatattgattaacctcttcttcgaaagatcgattaacctctgattgacatgtactccctctatctcatctcaaaatagtatttattttagggtgaatttatacaatatttgatatatatgaatttatatatgtatatgttatatatata

SEQ ID NO: 210445 - DNA, 1705 bp, Zea Mays
ctcccgttcacttcccgcacatcacaccagtggacgtgccttgtgcacgctctcttctccggggtcaggaacctgtggccccaaatcctccacctttccgctttccagaccaagtttgttcttgtatcatctgtgtgcagcatggcgctgccagttccccgctgctagcctcgtcgccgtcgccatggcaatggtcaccgccacgatctcttgctcttatccacagctccggtatcgcccctctcctcgatgccggcgccacggccccgcagcggccaccgtggccgccttggcgacgccgcggtcggagcaggacatcgtcatcgtcggcgcgggcgtcgcggggctggccacggcggtggcgctgcggcggctcggcgtgggcgccgccgtgctggagcagggcgacgccctgcgcgcgggcggcacgtccctgacgctgttcaagaacgggtggcgcgtgctggacgccatcggcgtcgccgacgagctccgccccaagtacctccgcatccagggctggccgccgcaggatgaggatgaggtcgccggggcgggatctgcgcgagttctccttcgacgaggaagctcccgggcaggaggtacgcgcggtggagaggagagcgcttctcgagacgcttgcttctaagctgccaccaggcgccatatcgttctcgtcgaagctgaaatcgatctcggagcaagggcgtgcaggcaccctgctcgaactggaagacgggaggcagattcttgccaagatcgtggtcggctgcgacggagtgaactcgccgatcgcgaggtggatgggtttctcggagccccggtacgtcgggcacatggcgttccggggcctcgcggagtacgccgacggccagccgttcgagcccaaggtgaactacatctacggccgaggcgtccgtgccggctttgtccccgtctccgcaaccaaagtctactggttcatctgcttcaacagacaagatccagggcctaagatcaccgaccccacggcgctcaagaccgaggcgctggagctcgtccgcggctggccatcggacctcctggcggtgatgcgcagcacgcccgagggcgccgtggtgaggacgccgctggtggaccggtggctctggcccgggctggccccggccgcgtcgaggggcggccgggtggtgctggccggcgacgcgtggcatcccatgacgcccaacctcgggcagggcgcctgctgcgcgctcgaggacgccatcgtactggcgcgccgcctcgccgacgccggcgcggacggggcccaggccgccgccgccatgcgcgcgtacgaggcggagcggtgggcgcgcgtgttcccgctcacggcgcgcgcggggctggtgggtgcgctcgtgcagtgggagaacgcggcggtgtgcgcggcccgcgacggcgtggtcatccccaggctcgtcaggctgggaccgttcctggagcacaccaacttcgagtgcgacctgctcgaaccggcgccgggagtcgccatgacaccggcacactagctttctccggcacaatgtaactagtagtatattgattaacctcttcttcgaaagatcgattaacctctgattgacatgtactccctctatctcatctcaaaatagtatttattttagggtgaatttatacaatatttgatatatatgaatttatatatgtatatgttatatatata

SEQ ID NO: 210446 - DNA, 2526 bp, Zea Mays
ccgaaccagacgccggagcccggagccggaacacgtcaccgatcaccgtcacgcacctcgcctttattattcaaaccttcttctccttgtcctcactcacctacccttctctatcaatcttccattgtccaccaccctcacgcctcgccctcccgtcccggcgacggcgaggccccctccgcctccgactcccgcgcgactgccccggaccccagtctcgcccttgtccaccgtcatggccgcacccgcggttgcctccccgagccgggcgacccccaccgacatccccaccgccgcgccctctcccgcctccccgccgcgccgccttgcgtcggcgccgcccgccgtcgacgcgtccgggtcctcctccccggcctccgcccattcgggggaccagctctccgcccccgacgcctcgagcccgctgctcgcgagcaggagcgaggagtacaggcttctgttccggctgccgcccgacgaggttctcgtgcaagattttaactgcgctgtccaagaaaatattcttcttcagggacatatgtatttatttcttcaccatatatgtttctactctaacatatttggatatgagacaaagaaaacaatacctttgcaagaggtaactgatgttcgtaaagcaaagacagctgccatttttcataatgccattgaaattgttgctggtagtagaaggcatttttttggatctttcttgtcacgtgatgaagcctatcgaattatagtagatggctgggaacaacatgttagtgatgcaagattgctccttgaacgtcaggagacaaagtcagctagtagcagtgaagaaaatggttatgttgtattggaaggaacaaaggaatctaaacaagatggagatttatcactgccggacaggtctgtcaacagtacagctgtctcaagtagcaatgctgatggtggtgattcgaacatcaacatttccaaaaggttttcagaagttgaggagaacggacttgaagacaacatcgtcgcgctaaacccattcaatttggagccagttgatgctcctcctagtgtacctgaatcttacactatgatctcggagtcgaagtttcaggtgcctgtggaggttctctttaatttcttgttgtctgatggtgcttttggctttgtggatgatttccacacaaaatgtggtgacaaagaatttagttgctccaaatggcgtacagatgagcaagggggacttgtaagggatgtctcatttttgcatccaataaaaatttatcttggtgcaaaatttgggacttgtcaagaggttcagaaacttcgtctttacaaaaacaggcgtctagtcattcaaacctctcaatcaataggtgatgccccatatggggaccattttactgtagagggcatctgggatgttgaacaagatagcctagatgagaactgttgtgacctcaggatatacatcaatgtagccttctcaaagaaaacaatatttagagggaaaatagagcagtcaacaaaagatgaatgccgggaagttttcagtctctggattaagctcggtcatgatcttttgaagcaggagtatgatcgatcaaaaggcgcctccagcacacctgattctggtgttcaaccaggggctacaacaaacgaggaaagtgccgtggaagtagcagttccagtggtgagttcctcacatgatgaatctggtgcgagaagcctcattcctcctactcaagatcaccagcagaggacaggaagagatccttccatcacgtccacttcacaagaattgtggggttctctatcgtcatacatgaggtcaaggcaacttggtccagtactagcaatgtcactggtagctctcattatcctaatgcaggtgaccatcatagttctactaacaagacccccccaggtccaaatggatcctcatgggatctggacgggcagttcagggtacagcaaagaaagcatagagtgggtgcagaagcgcctcagcttactaagcgaggagatgcagctcgcggaggcacacatggagacgatgaggcgcgagtttgcctggctcaggtcttacctggagagactgcagaggacgcggggcagcacatgacggcggcgcgtgtacatggcacaggggcacgagttcgctacgcgaattcggaggtgtatacaaatacaatacaatacaacccggaggtggtgttcagtgtttcttctgttgttacagatggtacagatgcaaacagagagaggtggattgttgtttgcagaggtatttgccgtaaggcagaactgcaagatcccggtatagcgttcgatgtaaatagctggagcttccccattgcgctggggtgatgtacaatgtcagggacgagtcactgcgatcacgctacggcggtgacgcgttatgttatttataaatttctgactgaattttaacttctaaaagctacccggtccgtccgcggtccgtccaaaaatgataaacagtactacctccgtttcacaataatgttctttttacctctt

SEQ ID NO: 210447 - DNA, 1770 bp, Zea Mays
tacgagcagcttgaaatggaaggcaagttattgaagggggaagacttagattttgcttttgatcgtatttcggctttctcagacaatatggagaatcaggaatacatattcttgacggaagaaagtcttgaagacatctgatgaatgcaatacttggaaaacttactgcatccacacaagagttgtcttactatcactcagaagctgatatcggggtctacctatcatactgtgacttccagccttatgtgaggagtgccctggcttgtaccaaggaactaaacaaatggttctctaagaagtttgagaagggaccactccaacttgttgttcaagatgacaagttaagaggagatccggtaaactcccaccattttgttgtcgaactgagccgaattaactccatatttgctaaaagtaagagacagtacatagaagcacaagtagaatatgctaaagaagaagctatactatcagttctgagaactcagttggcatcccaacagtcatatattcatcaggatagccattctctaaggaggaaaaactccgaacttgctgaagagcttaaagatctttcccatcaagtgcaggaatacttatctgagactgttacaggcctgtgtgcagaccttgctcggctttcaggtgcaaatattttggaaggagatcacaatttaaagcttctgcgccaggactgctacataagtcatcagaagaagttcatcaaccatcttgtcaatcaacttgctgctcacctatttctaaagatagcctgccagctcgaagaacagataaaaatatcgagtgcctactcatttctgaaagctgtagaattggaattgcagggctacttctcagcttttgatggccgcctgggccggtacaatttaattgatcaagcagcatctgaaatgtttgaagagggatcagttgacgacagtgattcttatcttcatgctgtgagggatatccttagcagtcactcgagttcccaagcaacgtcaccagaatatgtgtcatcatatggtttgatcgggcagataacagagctgcaggatgagctccagtaccttcagcatgagaccgaaaatgtccttccacgtgagcgaggaagatgcaccgacgaactatgcaggatgatccaaacactggagcaaattctcgctgtgtccctttctgatgagcaaccaaagctgacaccatggccattggcgcattcacttgaagacctcgaaatggtcagccagcaggtctccgcttccgttagtgaggtgacactagctcgagacgaaaaggccgagaagctgaaacagccttcacgcaacgcgcagcaggaaaggcaggtgttctcagatttcttctgccacccggaacgactcgagaatcgagtggaagagctgctctcccgctttagagctctccctgagtagtaccgtccatttcatttgccaagatgggtggaggaacccttggccctccgattttcaaacgggcatcgtgtctcattgcctattcgtttctttttctcgtgtctggacgactggaagtgcagttttttgcatatatatattcaaaagcacgcggcacagttttttttttgactaagataagacatcgtctgtggtttacccggcccggcgtgttcagttgataaaaggaagtgtatcagttgataaaagcgtaattcgttcaaatagtttactcaaatctttgaagtattgtttgtcgccaaaatgagagagcgcttaaaaagagaagtagcacgcc

SEQ ID NO: 210448 - DNA, 1966 bp, Zea Mays
tacgagcagcttgaaatggaaggcaagttattgaagggggaagacttagattttgcttttgatcgtatttcggctttctcagacaatatggagaatcaggaatacatattcttgacggaagaaagtcttgaagacatctgtgagtcaaagcttgctcttagagctgaagtttctgatttggaaaggcagcttgcttctctggagtggaggcttgatatacttacagcacaagctaccaccattaaccagggaaagaagtcccgctcatctgctaatactagagctaatggacaacttactggcttagataagatgtttgctaagagaagtttagagatgaatgcaatacttggaaaacttactgcatccacacaagagttgtcttactatcactcagaagctgatatcggggtctacctatcatactgtgacttccagccttatgtgaggagtgccctggcttgtaccaaggaactaaacaaatggttctctaagaagtttgagaagggaccactccaacttgttgttcaagatgacaagttaagaggagatccggtaaactcccaccattttgttgtcgaactgagccgaattaactccatatttgctaaaagtaagagacagtacatagaagcacaagtagaatatgctaaagaagaagctatactatcagttctgagaactcagttggcatcccaacagtcatatattcatcaggatagccattctctaaggaggaaaaactccgaacttgctgaagagcttaaagatctttcccatcaagtgcaggaatacttatctgagactgttacaggcctgtgtgcagaccttgctcggctttcaggtgcaaatattttggaaggagatcacaatttaaagcttctgcgccaggactgctacataagtcatcagaagaagttcatcaaccatcttgtcaatcaacttgctgctcacctatttctaaagatagcctgccagctcgaagaacagataaaaatatcgagtgcctactcatttctgaaagctgtagaattggaattgcagggctacttctcagcttttgatggccgcctgggccggtacaatttaattgatcaagcagcatctgaaatgtttgaagagggatcagttgacgacagtgattcttatcttcatgctgtgagggatatccttagcagtcactcgagttcccaagcaacgtcaccagaatatgtgtcatcatatggtttgatcgggcagataacagagctgcaggatgagctccagtaccttcagcatgagaccgaaaatgtccttccacgtgagcgaggaagatgcaccgacgaactatgcaggatgatccaaacactggagcaaattctcgctgtgtccctttctgatgagcaaccaaagctgacaccatggccattggcgcattcacttgaagacctcgaaatggtcagccagcaggtctccgcttccgttagtgaggtgacactagctcgagacgaaaaggccgagaagctgaaacagccttcacgcaacgcgcagcaggaaaggcaggtgttctcagatttcttctgccacccggaacgactcgagaatcgagtggaagagctgctctcccgctttagagctctccctgagtagtaccgtccatttcatttgccaagatgggtggaggaacccttggccctccgattttcaaacgggcatcgtgtctcattgcctattcgtttctttttctcgtgtctggacgactggaagtgcagttttttgcatatatatattcaaaagcacgcggcacagttttttttttgactaagataagacatcgtctgtggtttacccggcccggcgtgttcagttgataaaaggaagtgtatcagttgataaaagcgtaattcgttcaaatagtttactcaaatctttgaagtattgtttgtcgccaaaatgagagagcgcttaaaaagagaagtagcacgcc

SEQ ID NO: 210449 - DNA, 2353 bp, Zea Mays
tttctcctcctccgcaacgcacggcctgtcactacagcctacacgcccccgcctcctgccctcctctgtccacatcctcgcctctccccactagttcgctcgcgtgatggtggtgcgggagcagcggaacaagggttcgtcgtcggccaccctgtgacaccccgcccccgcccccgcggcggaacctgcaaacccggaggccggagctccgacttcgtcggccatcgaccgcgtctgatcggcgctgggacctgccgtccggacgaaatcggtcagcatggcggggcccaatgagaaggcggcggcgggaggcgggggtggcgagaggcgcaagtacccgatccacatggaggactacgagctgtacgaggagatcgggcagggcgtcagcgccatcgtgtaccgcgcactctgcaagccactcgacgagatcgtcgccgtcaaggtggtcgacttcgagcgcaccaacagcgacctgaacaacatcgttcgtgaagctcagacaatgattttgatagaccatcctaacgttgtcaaggcgcattgttcatttgcaaaagaccaaacgttatgggtggttatgccgtatatggctggggggtcctgtcttcacataatgaaatcagtgcatcctactggattcgaggaacccatcatcgcgactatacttcgtgaagtcctgaaaggtttagagtatcttcaccatcatggctctatacatcgagatgtgaaggcaggaaatattctagtcgattctcggggtggaattaaacttggggactttggagtctctgcttgcctttttgattctggtgatagacagagggccaggaatacttttgtgggaacaccttgctggatggcgcccgaggttatggagcaactacatggatatgatttcagagcagacatatggtcctttggaattactgcacttgaacttgctcatggtcatgctcctttctctaagtaccctcccatgaaggtcttgctcatgacacttcagaatgctcctccaggtcttgactatgaaagagataagaaattcacgaggaacttcaagcaaatggttgctatgtgtttggtaaaagacccttcaaagaggccttcggcaaaaaagttgttgaagcaaccatttttcaagcaagctcgttccactgattttattgcacgaaagcttttagaaggattgcctggccttggtgttagatatcaagctttgaaggaaaaggatcaacatttaatggctcaaaagaaaatgtctgatggaaagaaagaagaaatctcgcaggatgaatacaaaaggggtatcagcagctggacctttgacatggatgacctgagatctcaagcttcattgggcacagaatgtgaagacagtaccttatgcaaagattcagatatatctttctatgacttggacagtttacaggatcaagcaccagaagggtcacacttgttgagagatttctcaacgaagtatgatgctgacattgaaaatgatatgacaaccaaagataagtcagccgtttcatctcctgatcagcctgctagcttagtgaggaatgcttctatgcgtgggatgcccataaacggttctttcaggaaagacaactctacagaaagcttcgatttggaatgtcaagagaaacatctggacattgttccgactagctcatcccctgaaaggaagttttcttttagttcttgctcatcaaatgggctccttttgtccaaagagagctctaaacagcaaactagcatccacaaccttgacaagtgtaatggagggcatttgcatgtatcagatgaaacatcttctgaagctgctcctaagacacataaatcagcagaggaccatgatgatagatccaaacctccacttataagaggtcgatttagagttatacctgggcatgttgactcaaaggctcaaccacctggcctacagaagtgtcacagcatgcagacaatttctcgccttccatcattaagtataccctcttccgcagaagttgcatcaaccattattggtggctccttctacatgcagctatatagtattctacagacaaatatgcttcagagggaccaaatacttaacgcgatgaagcaggtgagtggttgtgctatggcttcaccaggcgtaccttctatggcttcaccgtgtatcccttccacaagtcgctcgacatctccatcaggtgtaccatcagttgacagatccatgctggaagctgcacaagaaagggagaaagagctgctgaatgaggtcttggagctgcaatggcggttattgtgcacacaagatgaggttcaaaagcttaaagcaaaggcagcgcagcattgacag

SEQ ID NO: 210450 - DNA, 1251 bp, Zea Mays
ccgtcggatctccatccgacgaccaaacgccgaaccccgtcatatataaatttacgctccgcctgccacgccgctcctccaaaccctagtctcagagcagccgcatccacaacctgcctctctcgtcccctggcggcgtccgcggcaggatggcggaatctacggcgaggacggtgaaggatgtcaacccgcacgagttcgtcaaggcctactccgcccacctcaagcgctccggcaagatggagctccctgagtgggttgacattgtgaagactgcgaggttcaaggagcttcctccttatgatcctgactggtactacatcagggctgcatccattgcaaggaagatctacggtggccgccagaggaatggctcccgcccaccacacttctgcaagagcagtggtgctgttgcacgcaacatcctgcagcagctgcagattatgggcatcatcgatgtcgatcccaagggtggacgcctcatcaccaaccagggaaggcgtgatctggaccaagtggctggaagggtcgctgttgaagcgtgagcagtgtcatctttggtttcaatggtgtcatgtttgatggttgagaaggctgcgctctatttgctcttttgggttaggattttcgagttcagaggactttaaggtttattgcatctagctatggcgccacactatgttccccgagtacctaatgtgatatcaagactcaattctcgaatctaagatatatgtttgcaaagtgtctgaccaggtatcaataatgtgtctttcttttggtacagatatacgtgataataacgtgcagttattggccacccttggttaccgatagcaaggctaataactcagctattgactcggtagatttttgtagtccaactgtagtcctttcgtttttctttattaatatatgggctcacttagctagctttaagcgtatttttatgtgagttaggacagctccaacaatctgacttatcagctaccttaggtcatttttttctacatattttaatttattaacatagtgatttttttctttttgttttaatagaagcgggtggaaaacaagattttatttccgtatacacattttaagattatgtgagatatacacatttcaagattatgtgttatgtggggctggctattcattgcagacattttaagattgcgtgactgcgtgagggtcacgtgcagctatcaattgagtgaatctatagttcataggttcatgcctaatttt

SEQ ID NO: 210451 - DNA, 522 bp, Zea Mays
ggaaggaaaaaaactcctctgccctcgcgtttctcgttcccgtcgcgtcagtctcgtctcgtccgtctctctctcagcagccatggcgcctagggtttgtgccaccagcgccagccatggccgctcactccattcgtaggaaacatgtccccattctgagatccattgctgccctccatccccacgcgcccacggatcaggagtggtcgttctcagccatttacaaccgcgtttcaggagccgtatttcgagatcgtatagcgaagaatcgctcgttctcagccacagatcaggagtgatcgttctcagccacggtgcatggatgtagagtggtcattcaccaaaggccgacatacccctactaccctccattccgagattggcagcagatcaggagcgaacgacgtttgtagccagtcatcactccactcaacgcggtctgcagtcgatcaagagcgtagcagaagtttcagaatgattaagcttctgttacatggctttgatgcatggtgaagtggtcta

SEQ ID NO: 210452 - DNA, 800 bp, Zea Mays
ggaaggaaaaaaactcctctgccctcgcgtttctcgttcccgtcgcgtcagtctcgtctcgtccgtctctctctcagcagccatggcgcctagggtttgtgccaccagcgccagccatggccgctcactccattcgtaggaaacatgtccccattctgagatccattgctgccctccatccccacgcgcccacggatcaggagtggtcgttctcagccatttacaaccgcgtttcaggagccgtatttcgagatcgtatagcgaagaatcgctcgttctcagccacagatcaggagtgatcgttctcagccacggtgcatggatgtagagtggtcattcaccaaaggccgacatacccctactaccctccattccgagattggcagcagatcaggagcgaacgacgtttgtagccagtcatcactccactcaacgcggtctgcagtcgatcaagagcgtagcagaagtttcagccgggacctttttctcttttttcctgacggcaacatgacatgtgcaaggacctggaagtatccagttgaatgtgttgaccctagatgctacgggaaggttctagtcgctgctgcaggccgtgcgataccttcccagccattgacagaatatcgaatggctgtaagaatttaagccgacgtggacgcacacagcagaattataagaatcttggtgcagtggtggaccgattgttgtatgacatgtacaagaatctgggttgtttcatactgatacttagaatgattaagcttctgttacatggctttgatgcatggtgaagtggtcta

SEQ ID NO: 210453 - DNA, 937 bp, Zea Mays
ggaaggaaaaaaactcctctgccctcgcgtttctcgttcccgtcgcgtcagtctcgtctcgtccgtctctctctcagcagccatggcgcctagggtttgtgccaccagcgccagccatggccgctcactccattcgtaggaaacatgtccccattctgagatccattgctgccctccatccccacgcgcccacggatcaggagtggtcgttctcagccatttacaaccgcgtttcaggagccgtatttcgagatcgtatagcgaagaatcgctcgttctcagccacagatcaggagtgatcgttctcagccacggtgcatggatgtagagtggtcattcaccaaaggccgacatacccctactaccctccattccgagattggcagcagatcaggagcgaacgacgtttgtagccagtcatcactccactcaacgcggtctgcagtcgatcaagagcgtagcagaagtttcagccgggacctttttctcttttttcctgacggcaacatgacatgtgcaaggacctggaagtatccagttgaatgtgttgaccctagatgctacgggaaggttctagtcgctgctgcaggccgtgcgataccttcccagccattgacagaatatcgaatggctgtaagaatttaagccgacgtggacgcacacagcagaattataagaatcttggtgcagtggtggaccgattgttgtatgacatgtacaagaatctgggttgtttcatactgatacttagctgatggctactgatggtgcttacattttccgcttctttgtatttggattttgaatattgtagtgaaggttcacatgaggaactcttgtatgaactttggaatggttaactttggtgtaccttgtggcaattagccttttatgaactttggaatgttttcattcaatgcatgtatttatactgaac

SEQ ID NO: 210454 - DNA, 1249 bp, Zea Mays
ttcgtacttgctgaatgcagtacaattaaaataatggaacttcaatgtgggaactgctgcggatcctggaaggatattattacatattgtaactgacgcgttgaattatcctgcaatgatgatgtggtttctgacaaacccaccaactccatcagtaatccaaatccagagcctagatgatttgaaatggttgcctggtgatttcagttccagattcaagctgaagggggttcgggatccgagatacacttctgcactcaaccacttgcgtttttatttgccagaagtgtttccatctttgagcaaggttctactcttggaccatgatgtggtagtacagaatgacttgtctggattatgggacctagatatgaagggtaaggtaaccggtgctgtcgacacatgcacctcaagtgaaggtttccgccaattggatagccttattgatttttccaatccaagcgtcttcaacgaacttgacccaaaggcttgtgcatttgcatttgggatgaacatatttgacctgaacgaatggcgcaaacagggtttgagtacaacctatcatagatggtttcaactgggcaaaagtgagaagttgtggaaggcaggaagcctgccactgggtcaggtcgtcttctacaaccggacgctgcctctggaccaccggtggcatgttctagggctcggtcatgactccagcatcggaagagatgaactcgagagtgcctctgtcatccactacagtgggaaactcaaaccctggttggagatttctatcccaaagtacagaggctactggaacaggtaccttaactacgataacccgcacttgcagcagtgcaacattcacggatagaggcgatggcgggtgaggtgattcgcaaggtagaactgggatatacgcaacttcgctgtagtaacttattaggagagcaagttgttgtttttttgtttctgttgctagatgccctatttgcaattttgtttgctagtagtcacaatcggtacaaaagcaaaaaaggaagaacaaaatcgagtacacgagctacagtttcactagtgatacactgaaggtttgacagaagtcaagccactagctaacattatcaataactagtgttgcctcggacctggggaagagtgcgaattccacggagctcagttagcgtgcgttggacaagatagatgtaaagttttcgcgataatatcgttctctcttacaaagaaaggggttttactactgccattt

SEQ ID NO: 210455 - DNA, 2291 bp, Zea Mays
cagtcactgttcacacaacagctgctagtagccgtagcccgtaggcgagccagaggcggcccaattcgagagcggttccggcggcgtgggcggcgccgtgcctgagatcggagccccgtggcgcggtgctggcaactggcggcgcgatgtgggcggtccacgggagggagtccacggccgctgcgcttcgcctgctgctgatcgcgatcgcctgcggcctcgtcttcgcgctcctccacctccccctcccggatgaccgtgcgcgaaccgccgaccccggtgggcagcgcggcgctgctgggggcggcggggcccgcctgtcggtgcagcaggggagggttcgagaggccagaaggctgagtgtcgtcaccgaagagacagatgggcaaactgacgaaacggcggcggaagaagatgaaaggatatctaaatctcccccagacaccaaagagaagatctggatgatgcaagatcagctaattttggccaaggcgtacttgcatttcgcttctccccaaggtagtgtacatttagttcgagagctgaaattgaagataaaagagatcgaaagggcaataagccactcaagtggaggtacccatgtacctgggagtgtgttgcaaaaaataaaggcgatggagctgaccctttcaaaggctcagaggacctacccgcattgctctcagatgacgtcaaagctacgtgcaatgatgcataatagtgaagaattggtcagagcacaccaaagtgaatcttcattccttgagcaggttgctgtgaggacattacccaaaggccatcactgcctagcaatgcagcttaccgcagaatacttttcgttagatcccactaaacgtgaattccctaaaagagacaacattcagttgggtggttattatcattatgcgatgttctctgacaatgtgcttgcaagtgctgtggttgtcaactctacaattgctgcatcaaagtacaattaaaataatggaacttcaatgtgggaactgctgcgaaaatttagatgcaatgagcatggaagggaggactgcaccatgacttcttcagtagaatcttcttttcattcagcctgtcttatttggcaggatcctggaaggatattattacatattgtaactgacgcgttgaattatcctgcaatgatgatgtggtttctgacaaacccaccaactccatcagtaatccaaatccagagcctagatgatttgaaatggttgcctggtgatttcagttccagattcaagctgaagggggttcgggatccgagatacacttctgcactcaaccacttgcgtttttatttgccagaagtgtttccatctttgagcaaggttctactcttggaccatgatgtggtagtacagaatgacttgtctggattatgggacctagatatgaagggtaaggtaaccggtgctgtcgacacatgcacctcaagtgaaggtttccgccaattggatagccttattgatttttccaatccaagcgtcttcaacgaacttgacccaaaggcttgtgcatttgcatttgggatgaacatatttgacctgaacgaatggcgcaaacagggtttgagtacaacctatcatagatggtttcaactgggcaaaagtgagaagttgtggaaggcaggaagcctgccactgggtcaggtcgtcttctacaaccggacgctgcctctggaccaccggtggcatgttctagggctcggtcatgactccagcatcggaagagatgaactcgagagtgcctctgtcatccactacagtgggaaactcaaaccctggttggagatttctatcccaaagtacagaggctactggaacaggtaccttaactacgataacccgcacttgcagcagtgcaacattcacggatagaggcgatggcgggtgaggtgattcgcaaggtagaactgggatatacgcaacttcgctgtagtaacttattaggagagcaagttgttgtttttttgtttctgttgctagatgccctatttgcaattttgtttgctagtagtcacaatcggtacaaaagcaaaaaaggaagaacaaaatcgagtacacgagctacagtttcactagtgatacactgaaggtttgacagaagtcaagccactagctaacattatcaataactagtgttgcctcggacctggggaagagtgcgaattccacggagctcagttagcgtgcgttggacaagatagatgtaaagttttcgcgataatatcgttctctcttacaaagaaaggggttttactactgccattt

SEQ ID NO: 210456 - DNA, 4284 bp, Zea Mays
tagtcgctccccacctcgttccttccccctccccacccttctcgctccgccccaccccaccccacccccgtaccaggtaccaccacccacccaagcgtcgccggccgccgcgggcgaatccccgcgctggaatcgacaccccgcctgttcgctggactcgctgcctcggcccttctcttcgcacctctctcagcctcgccacccgggtccaattcgccccgcggtataggaatcccatcctagattccatcgaggggctgcaatgccggcacctgcctagctggaaatcgggcgctaacggacaccgggcgccgagatgggccgttccggccgccgcaggcgggaccgcatgcggtggagcaatctctacaccttctcctgctttcgcgcccagcacgagcacgccggcgatgcgggcccctcctccgacggggctggcgccgtcggcgggccgggcttctcgcgcgtcgtgtactgcaacaacgccgccctgcagaagccgctcaagtacatcaccaactacatcaccaccaccaagtacaacgtcgtcaccttcttccccaaggccatcttcgagcagttccgacgcgttgccaacctctacttcctcctcaccgccatcctctctctcaccccggtgtgccccttctctgccgtcagcatgattgctccgctggcatttgtcgttggcctcagcatgatgaaggaggggttggaggactggcgccgcttcatgcaggacatgaaggtgaacaaccgcaatgtcagcgtgcacaagagtgatggcgaattcgactaccggcactgggaggacctttgcgtaggcgatgtggtcagggttgagaaggaccagttcttccctgctgatttactgctactgtcctcaagctatgaggatggcatttgctatgtcgagacaatgaacctcgatggcgagacaaaccttaaggtgaagaggtcacttgaggttacgctgccgttggaagaagacgagtcctttaaagatttccaggcagtgatacgctgtgaggatcccaacccgagcttgtacacattcactggtaactttgagtatgagaggcaggtttacgcccttgatccgtctcagatacttctgcgggactcaaaactaaggaatacagcctttgtctatggagtggtcatttttaccggtcatgacagtaaagtcatgcagaactcaactgagtcgccatccaagaggagcaggattgagaggaagatggatttgatcatatacatcctgtttactgtgctcgtgttgatatcactcattagttcaattggatttgctgtgaggatcaagttagatttgccccgctggtggtacttgcagccacagaaaagcaataagttagatgatccatcacgccctgctctttctgggatattccatctaatcacggctctcattctttatgggtatctgattccaatctcgttgtatgtctcgattgaactggtgaaggtattgcaagcacatttcattaaccaggatattcatatgtttgacgaggagactggcaataccgctcaggcgcgtacatcaaacttgaatgaggaacttggccaagttcatacaatcttgtctgataaaactggtacactgacctgcaatcagatggatttcctgaagtgttcaattgctggagtatcatacggcgtgggttcaagtgaagttgaacttgctgctgcaaagcagatggcgtcaggtgctgatgaccaggatatccctatacaagatatatgggaagagaacaatgaggatcaaatcgagttggtagaaggagttacctttagtgttggcaacaaccgaaagccctccataaaaggcttcagttttgaggatgaccgtctcatgcaagggaactggaccaaggaaccaaattcttccacaattctactcttcttcaggatacttgctctgtgtcacacagcgataccagagataaatgaagcaactggttctattgcctatgaagcagaatcacctgatgagggggcttttctcgtggcagccagggaatttggatttgaatttttcaaacgaacacaatcaagtgtctttgtcagggagaaacacacttcttcgaaaggcacaattgagagggagttcaagattctcaatctattggaattcaatagcaaaagaaaacgaatgactgtaattctgcaggatgaagatggtcaaattcttcttttgtgcaaaggagcagacagcatcatatttgatagattggcaaaaaatggaaggatgtatgaagttgatacaactaagcacctgaatgaatatggtgaggcaggcttgcgaacattggcactatcgtacagggtgcttgatgaatcagaatattcttcttggaatgctgagtttcttaaagcaaagacctctattgggcctgatagagagttgcaacttgaacgtgtctctgagttgattgaaagagagctgatccttgttggtgcaactgctgtagaggacaaattacaaaaaggggttcctcagtgcatagatcgtttggcgcaagcaggtctcaaaatctgggttctgacaggtgacaagatggaaactgcaattaacatcgggtatgcatgcagtttactgaggcaaggcatgaaacaaatatgtttgtccatacccactggtgagcaggtagcccaggatgcaaagaaggctgcaaaggagagtctcctgtcgcaaatcgccaatgggtcacaaatggtcaaactcgagaaggatccagatgcagcattcgctctagttattgatggaaaagctctagcatttgctttggaggatgacatgaagcatatgttcttgaacctggcaatcgagtgtgcttctgttatatgttgccgtgtgtcaccgaagcagaaagcactggtgactcgtctcgtcaaagaaggtataggacaaaccactttagcagtaggtgatggtgcaaatgatgtgggcatgattcaagaagctgatattggagttggtataagtggggtagagggaatgcaggcagtgatggctagtgatttttccatttctcaatttcggtttcttgagagacttcttgtcgtccatggacattggtgctacaagagaatcgcccaaatgatttgctacttcttttacaagaatattgcctttggacttacaatattttactttgaagcattcgctgggttttctgggcaatctgtatacgatgattggtttatgctgcttttcaatgttgttcttacctcgcttcctgttatatcactcggagtttttgagcaagatgtttcgtccgaaatctgcttacagttcccagcattataccagcaagggccaaagaaccttttctttgattggtaccggatccttggatggatggggaacggcctcttctcctctctagctatattcttcctcaatctctgcatattctacgaccaggcaatccgtgctggagggcagactgcggacatggctgcggtgggaactaccatgttcacctgcatcatctgggctgtcaacatctctttgtatggggcagcataacaacttggtatatcttcatcctcgcctacgggatgacattgaggtccggcgacaactaccagatcctgttagaagtccttgggccagctcccatatactgggcagggacgcttctggtgactgctgcttgcaacatcccctacctgatacacatatcctaccagagatcgtgcaatccacttgatcaccatgtgattcaagagatcaagtatctaaagaaagatgtcgaagaccagacaatgtggaagagggagcggtccaaggccaggcagaaaacaaagattggtttcactgcgcgggttgatgcaaagatcaagcagattaagggaaaattgcataagaaaggcccatctttaacaatccaaacggtatcttaggaatctcggtggcctgacaggctcgtcaacagtagttgccactttgttgtttgcttctgcaaggcagtggttttagcttctcagggcaatatagcaaaattcttttcttttttttccttatttctttattccccccgggagtcttttttttatcttcatttgtgtaagaaatgttggggtgtaatcggtggtgttcatcctagtagaagcttcatagccagccgtgtaaaaaatatagctcatttcagttggaaaaacaagctattgatatagctgacaacatatgtatatctgcaattttgattgttccctatcgatatttacggcggtgttggtaatggtagctgtttt

SEQ ID NO: 210457 - DNA, 4269 bp, Zea Mays
ccacccccgtaccaggtaccaccacccacccaagcgtcgccggccgccgcgggcgaatccccgcgctggaatcgacaccccgcctgttcgctggactcgctgcctcggcccttctcttcgcacctctctcagcctcgccacccgggtccaattcgccccgcggtataggaatcccatcctagattccatcgaggggctgcaatgccggcacctgcctagctggaaatcgggcgctaacggacaccgggcgccgagatgggccgttccggccgccgcaggcgggaccgcatgcggtggagcaatctctacaccttctcctgctttcgcgcccagcacgagcacgccggcgatgcgggcccctcctccgacggggctggcgccgtcggcgggccgggcttctcgcgcgtcgtgtactgcaacaacgccgccctgcagaagccgctcaagtacatcaccaactacatcaccaccaccaagtacaacgtcgtcaccttcttccccaaggccatcttcgagcagttccgacgcgttgccaacctctacttcctcctcaccgccatcctctctctcaccccggtgtgccccttctctgccgtcagcatgattgctccgctggcatttgtcgttggcctcagcatgatgaaggaggggttggaggactggcgccgcttcatgcaggacatgaaggtgaacaaccgcaatgtcagcgtgcacaagagtgatggcgaattcgactaccggcactgggaggacctttgcgtaggcgatgtggtcagggttgagaaggaccagttcttccctgctgatttactgctactgtcctcaagctatgaggatggcatttgctatgtcgagacaatgaacctcgatggcgagacaaaccttaaggtgaagaggtcacttgaggttacgctgccgttggaagaagacgagtcctttaaagatttccaggcagtgatacgctgtgaggatcccaacccgagcttgtacacattcactggtaactttgagtatgagaggcaggtttacgcccttgatccgtctcagatacttctgcgggactcaaaactaaggaatacagcctttgtctatggagtggtcatttttaccggtcatgacagtaaagtcatgcagaactcaactgagtcgccatccaagaggagcaggattgagaggaagatggatttgatcatatacatcctgtttactgtgctcgtgttgatatcactcattagttcaattggatttgctgtgaggatcaagttagatttgccccgctggtggtacttgcagccacagaaaagcaataagttagatgatccatcacgccctgctctttctgggatattccatctaatcacggctctcattctttatgggtatctgattccaatctcgttgtatgtctcgattgaactggtgaaggtattgcaagcacatttcattaaccaggatattcatatgtttgacgaggagactggcaataccgctcaggcgcgtacatcaaacttgaatgaggaacttggccaagttcatacaatcttgtctgataaaactggtacactgacctgcaatcagatggatttcctgaagtgttcaattgctggagtatcatacggcgtgggttcaagtgaagttgaacttgctgctgcaaagcagatggcgtcaggtgctgatgaccaggatatccctatacaagatatatgggaagagaacaatgaggatcaaatcgagttggtagaaggagttacctttagtgttggcaacaaccgaaagccctccataaaaggcttcagttttgaggatgaccgtctcatgcaagggaactggaccaaggaaccaaattcttccacaattctactcttcttcaggatacttgctctgtgtcacacagcgataccagagataaatgaagcaactggttctattgcctatgaagcagaatcacctgatgagggggcttttctcgtggcagccagggaatttggatttgaatttttcaaacgaacacaatcaagtgtctttgtcagggagaaacacacttcttcgaaaggcacaattgagagggagttcaagattctcaatctattggaattcaatagcaaaagaaaacgaatgactgtaattctgcaggatgaagatggtcaaattcttcttttgtgcaaaggagcagacagcagcatcatatttgatagattggcaaaaaatggaaggatgtatgaagttgatacaactaagcacctgaatgaatatggtgaggcaggcttgcgaacattggcactatcgtacagggtgcttgatgaatcagaatattcttcttggaatgctgagtttcttaaagcaaagacctctattgggcctgatagagagttgcaacttgaacgtgtctctgagttgattgaaagagagctgatccttgttggtgcaactgctgtagaggacaaattacaaaaaggggttcctcagtgcatagatcgtttggcgcaagcaggtctcaaaatctgggttctgacaggtgacaagatggaaactgcaattaacatcgggtatgcatgcagtttactgaggcaaggcatgaaacaaatatgtttgtccatacccactggtgagcaggtagcccaggatgcaaagaaggctgcaaaggagagtctcctgtcgcaaatcgccaatgggtcacaaatggtcaaactcgagaaggatccagatgcagcattcgctctagttattgatggaaaagctctagcatttgctttggaggatgacatgaagcatatgttcttgaacctggcaatcgagtgtgcttctgttatatgttgccgtgtgtcaccgaagcagaaagcactggtgactcgtctcgtcaaagaaggtataggacaaaccactttagcagtaggtgatggtgcaaatgatgtgggcatgattcaagaagctgatattggagttggtataagtggggtagagggaatgcaggcagtgatggctagtgatttttccatttctcaatttcggtttcttgagagacttcttgtcgtccatggacattggtgctacaagagaatcgcccaaatgatttgctacttcttttacaagaatattgcctttggacttacaatattttactttgaagcattcgctgggttttctgggcaatctgtatacgatgattggtttatgctgcttttcaatgttgttcttacctcgcttcctgttatatcactcggagtttttgagcaagatgtttcgtccgaaatctgcttacagttcccagcattataccagcaagggccaaagaaccttttctttgattggtaccggatccttggatggatggggaacggcctcttctcctctctagctatattcttcctcaatctctgcatattctacgaccaggcaatccgtgctggagggcagactgcggacatggctgcggtgggaactaccatgttcacctgcatcatctgggctgtcaacatacagattgccctaacaatgagccatttcacatggattcaacatctctttgtatggggcagcataacaacttggtatatcttcatcctcgcctacgggatgacattgaggtccggcgacaactaccagatcctgttagaagtccttgggccagctcccatatactgggcagggacgcttctggtgactgctgcttgcaacatcccctacctgatacacatatcctaccagagatcgtgcaatccacttgatcaccatgtgattcaagagatcaagtatctaaagaaagatgtcgaagaccagacaatgtggaagagggagcggtccaaggccaggcagaaaacaaagattggtttcactgcgcgggttgatgcaaagatcaagcagattaagggaaaattgcataagaaaggcccatctttaacaatccaaacggtatcttaggaatctcggtggcctgacaggctcgtcaacagtagttgccactttgttgtttgcttctgcaaggcagtggttttagcttctcagggcaatatagcaaaattcttttcttttttttccttatttctttattccccccgggagtcttttttttatcttcatttgtgtaagaaatgttggggtgtaatcggtggtgttcatcctagtagaagcttcatagccagccgtgtaaaaaatatagctcatttcagttggaaaaacaagctattgatatagctgacaacatatgtatatctgcaattttgattgttccctatcgatatttacggcggtgttggtaatggtagctgtttt

SEQ ID NO: 210458 - DNA, 4206 bp, Zea Mays
ctggactcgctgcctcggcccttctcttcgcacctctctcagcctcgccacccgggtccaattcgccccgcggtataggaatcccatcctagattccatcgaggggctgcaatgccggcacctgcctagctggaaatcgggcgctaacggacaccgggcgccgagatgggccgttccggccgccgcaggcgggaccgcatgcggtggagcaatctctacaccttctcctgctttcgcgcccagcacgagcacgccggcgatgcgggcccctcctccgacggggctggcgccgtcggcgggccgggcttctcgcgcgtcgtgtactgcaacaacgccgccctgcagaagccgctcaagtacatcaccaactacatcaccaccaccaagtacaacgtcgtcaccttcttccccaaggccatcttcgagcagttccgacgcgttgccaacctctacttcctcctcaccgccatcctctctctcaccccggtgtgccccttctctgccgtcagcatgattgctccgctggcatttgtcgttggcctcagcatgatgaaggaggggttggaggactggcgccgcttcatgcaggacatgaaggtgaacaaccgcaatgtcagcgtgcacaagagtgatggcgaattcgactaccggcactgggaggacctttgcgtaggcgatgtggtcagggttgagaaggaccagttcttccctgctgatttactgctactgtcctcaagctatgaggatggcatttgctatgtcgagacaatgaacctcgatggcgagacaaaccttaaggtgaagaggtcacttgaggttacgctgccgttggaagaagacgagtcctttaaagatttccaggcagtgatacgctgtgaggatcccaacccgagcttgtacacattcactggtaactttgagtatgagaggcaggtttacgcccttgatccgtctcagatacttctgcgggactcaaaactaaggaatacagcctttgtctatggagtggtcatttttaccggtcatgacagtaaagtcatgcagaactcaactgagtcgccatccaagaggagcaggattgagaggaagatggatttgatcatatacatcctgtttactgtgctcgtgttgatatcactcattagttcaattggatttgctgtgaggatcaagttagatttgccccgctggtggtacttgcagccacagaaaagcaataagttagatgatccatcacgccctgctctttctgggatattccatctaatcacggctctcattctttatgggtatctgattccaatctcgttgtatgtctcgattgaactggtgaaggtattgcaagcacatttcattaaccaggatattcatatgtttgacgaggagactggcaataccgctcaggcgcgtacatcaaacttgaatgaggaacttggccaagttcatacaatcttgtctgataaaactggtacactgacctgcaatcagatggatttcctgaagtgttcaattgctggagtatcatacggcgtgggttcaagtgaagttgaacttgctgctgcaaagcagatggcgtcaggtgctgatgaccaggatatccctatacaagatatatgggaagagaacaatgaggatcaaatcgagttggtagaaggagttacctttagtgttggcaacaaccgaaagccctccataaaaggcttcagttttgaggatgaccgtctcatgcaagggaactggaccaaggaaccaaattcttccacaattctactcttcttcaggatacttgctctgtgtcacacagcgataccagagataaatgaagcaactggttctattgcctatgaagcagaatcacctgatgagggggcttttctcgtggcagccagggaatttggatttgaatttttcaaacgaacacaatcaagtgtctttgtcagggagaaacacacttcttcgaaaggcacaattgagagggagttcaagattctcaatctattggaattcaatagcaaaagaaaacgaatgactgtaattctgcaggatgaagatggtcaaattcttcttttgtgcaaaggagcagacagcatcatatttgatagattggcaaaaaatggaaggatgtatgaagttgatacaactaagcacctgaatgaatatggtgaggcaggcttgcgaacattggcactatcgtacagggtgcttgatgaatcagaatattcttcttggaatgctgagtttcttaaagcaaagacctctattgggcctgatagagagttgcaacttgaacgtgtctctgagttgattgaaagagagctgatccttgttggtgcaactgctgtagaggacaaattacaaaaaggggttcctcagtgcatagatcgtttggcgcaagcaggtctcaaaatctgggttctgacaggtgacaagatggaaactgcaattaacatcgggtatgcatgcagtttactgaggcaaggcatgaaacaaatatgtttgtccatacccactggtgagcaggtagcccaggatgcaaagaaggctttactttcatctttgacaactgagcaggctgcaaaggagagtctcctgtcgcaaatcgccaatgggtcacaaatggtcaaactcgagaaggatccagatgcagcattcgctctagttattgatggaaaagctctagcatttgctttggaggatgacatgaagcatatgttcttgaacctggcaatcgagtgtgcttctgttatatgttgccgtgtgtcaccgaagcagaaagcactggtgactcgtctcgtcaaagaaggtataggacaaaccactttagcagtaggtgatggtgcaaatgatgtgggcatgattcaagaagctgatattggagttggtataagtggggtagagggaatgcaggcagtgatggctagtgatttttccatttctcaatttcggtttcttgagagacttcttgtcgtccatggacattggtgctacaagagaatcgcccaaatgatttgctacttcttttacaagaatattgcctttggacttacaatattttactttgaagcattcgctgggttttctgggcaatctgtatacgatgattggtttatgctgcttttcaatgttgttcttacctcgcttcctgttatatcactcggagtttttgagcaagatgtttcgtccgaaatctgcttacagttcccagcattataccagcaagggccaaagaaccttttctttgattggtaccggatccttggatggatggggaacggcctcttctcctctctagctatattcttcctcaatctctgcatattctacgaccaggcaatccgtgctggagggcagactgcggacatggctgcggtgggaactaccatgttcacctgcatcatctgggctgtcaacatacagattgccctaacaatgagccatttcacatggattcaacatctctttgtatggggcagcataacaacttggtatatcttcatcctcgcctacgggatgacattgaggtccggcgacaactaccagatcctgttagaagtccttgggccagctcccatatactgggcagggacgcttctggtgactgctgcttgcaacatcccctacctgatacacatatcctaccagagatcgtgcaatccacttgatcaccatgtgattcaagagatcaagtatctaaagaaagatgtcgaagaccagacaatgtggaagagggagcggtccaaggccaggcagaaaacaaagattggtttcactgcgcgggttgatgcaaagatcaagcagattaagggaaaattgcataagaaaggcccatctttaacaatccaaacggtatcttaggaatctcggtggcctgacaggctcgtcaacagtagttgccactttgttgtttgcttctgcaaggcagtggttttagcttctcagggcaatatagcaaaattcttttcttttttttccttatttctttattccccccgggagtcttttttttatcttcatttgtgtaagaaatgttggggtgtaatcggtggtgttcatcctagtagaagcttcatagccagccgtgtaaaaaatatagctcatttcagttggaaaaacaagctattgatatagctgacaacatatgtatatctgcaattttgattgttccctatcgatatttacggcggtgttggtaatggtagctgtttt

SEQ ID NO: 210459 - DNA, 3969 bp, Zea Mays
cccggctcgcaactcccctccaaagccagcacgagagcaaggtcccctgatcgccgccgcttccctcgccccaccgccccagcaccacctgctgacctgcacatctccaccacccgtcctcctctgcgggttctccgcaggacgcgacccttggccgcggcattcgcccgaggaatcgccgctcccgcgaggcctccgtctctcgccgtgcccggatcccccgagctgccttcagggtgcaagatctcttccgtgatccggagccttcaccgtttcctcctctctgatcttagctcgatatcggagcgactggcccgagcttctcttaccccatgggcggcggcggcgggttccggggcagctgcagggttggtgccgtgctgcttttctccgcctgggtcgctcttgcagctctcagccgcttgctgcgtccggtgcccaatggctgcgtcatgacctacatgtacccgacctacattcccatcgccgccacgccccggaacatctcctcagatagatatggcttgttcctgtaccatgagggctggaagcagatcgacttcgccaagcacattaggggactcaggggcgtgcccgtgctctttattcccggcaacggaggaagttacaagcaggttcggtcattggctgcagaatcttttcgagcttatcagaatggtccacttgagcccaccttttatcaggaagcatctagtagtttaccaggagatggactcaacaatttttctattccttcacggtatggccgcatgttggactggtttgctgttgaccttgaaggagagcactctgctatggatggtcagatacttgaggagcatactgaatatgttgtctacgcgattcatagggtaccctcccatcgcacttcagccatccttgggtcattttttctcccatgtcaatgaagaatggagaaagggatacaagactggtgtatcacatgcaatcagttcaaaattatctaatgtagttgttgtctctgtatcaggtggcattcatgattatcagattaggtcaaggttggcatcattggatggaattgtgccttctactcacggctttatggtaggaagctccagtatgaagaatgtttggttatccatggaacatcaatctatcctatggtgtaatcaattagctgtacaggttgcacacactcttcttagcataatagatcctgttgacaggcagccattttcaagcacacaaaaaagagtttttgtgttcacaaaaatgctccaaagtgcagttcctcagtctctgagttcaatgactcatgttcctgcttctctgtcacgaaatttacctgccaatgagaatcaggatgctggcgaactacacaaaaaagattcactttcttgcccatcatccactgaatggactagtgatggccttgaaaaggacctgtatattcaatcaaattctgttactgttttagccatggatggcaggagaagatggttagatattaaaaagctgggatcaaatggcagaggacactttgtttttgtaacaaatcttgccccttgttctggagtaaggattcacttgtggccagaaaaacatcattcgcctgtgcaaaatgaattacctgccagtaaaaagatagtggaagttacatcaaagatggtccaaattcctgcaggacctgctccaaaacaggttgagcctggcagtcaaactgagcaaccacctccttctgcatttcttctactgagtccaggagaaatgagtggtttcagattcatgactatatcagtagcacctcgaccgacaatttcaggtaggcctcccccagcagcctctatggcagtggggcagttcttcagtcctgaggaaggggcaagttcattttctattggtacaataatccgctccagctttgctcccaaagaaatatttctgttggaggatcacccattggctctaaacttgtcattttctgcaagccttggccttctaccagtaactttatcactgaaaactgccggatgtggaataaaaaatcctggtgatcaaatggaagctgagagaaatagtgagctgctacttctcgtctgtcaatcttttttttgagagcagcataagttttgcaagtgtcttagtctttggtaactttgggataatataactgctaatagcaaatgtagatttctatactactatgtggagtgatatcaacaattgctagatgtccaataacataggatagcatgtaatgctctgtatcttggctgcacatttacactcaataaccttttgtatgttgtatttgtatattagacctttgtaaattgcggtgctttccgcctgttgccttggcatgggattctgtatctggcctgcacatcattccaaatatatactcagagactgtagtggttgattcatcacctgccttttgggattcacctgaggggactgacaaaactacagtactgattctggctgatccacactgctcatacgaagtcacttctcgtgcttcactaagtgatgcggcaagcagattctttttgttgtactcatcagagattcttggtttcatggtggccataatgttttttggaattatgcgacagacttcagcatgggaatgtgattcttctatgccatccattttgtcagccatagagtctaatcttggactcccaaaggcattcatgtttctttgcttcatgccaatacttgtattttgtgcctttttcattttcacggcggagcaaaaaccaccatttgggaccttcttattggttactctgatctgctacatagttgctaatggtttcacaattttgttgatactaagttcgaaattgcttctgtatgtggttgccattctacatgtctttactaaaagacgatggcaatcatgggggaatggtgttcaatcagcatttcttggtcaattcctcagtttctcctcgtttcagtcagtgaagattgtgcagatgcttaggaacaatccaaatataattgtagcagttgctacattaccactcgtctgtttggttcatccagccattggccttggtctgctacttctctctcatgctttccatgctcattcaaatctatgcagttttttagcagcttcttttcgtagcatcactcagaaaaaggacctgtacaagtccaagatgggcgatggttcagttctgctatccaaaagtaaatccgatgggctgcagcaacttctgccaatggatgatagcccaacagcttcaaaaagttttaccgacagccaactagaactgtttgattatcggcatggcgtcatgatcttgcatcttctaagcacactcatgtttgtgccttcacttgttgcctggctacagagaattggtatgggacaaaattttccctggttcattgattctgctatttgcgttggtgttatactgcatggactttttggatcccaaccaaatgtcagctgctgcatatttttcaagttacctggcaggagaggccgtgaaattggtctgagtttcctctacctcgtgggtggctattattcctttgtcagctccatggcgttggcaccttatagggccttgtatgccatggcgaccattggttatatatgtttcatttccagaattctcgagagaagaaatatggtaaggggtgacattaactctaggaggactcggaagcactcacacagacactgacacaccacagaaagtgtgatttctttaaaattatttgtaagagatagagaatagggttgaggaacctttcctccaacctaagttatctccttttttgtttttttccaaatcttgcttatgtgcatgtgattgtgtacggccatggttttgaaagttgttatcggatatggttatcctcggtgtgtggggtcttcataaattgcatcaagaatagcaaatttctaggtgttgagagcatcgcattgagagcttgattattgagttggtg

SEQ ID NO: 210460 - DNA, 3477 bp, Zea Mays
cccggctcgcaactcccctccaaagccagcacgagagcaaggtcccctgatcgccgccgcttccctcgccccaccgccccagcaccacctgctgacctgcacatctccaccacccgtcctcctctgcgggttctccgcaggacgcgacccttggccgcggcattcgcccgaggaatcgccgctcccgcgaggcctccgtctctcgccgtgcccggatcccccgagctgccttcagggtgcaagatctcttccgtgatccggagccttcaccgtttcctcctctctgatcttagctcgatatcggagcgactggcccgagcttctcttaccccatgggcggcggcggcgggttccggggcagctgcagggttggtgccgtgctgcttttctccgcctgggtcgctcttgcagctctcagccgcttgctgcgtccggtgcccaatggctgcgtcatgacctacatgtacccgacctacattcccatcgccgccacgccccggaacatctcctcagatagatatggcttgttcctgtaccatgagggctggaagcagatcgacttcgccaagcacattaggggactcaggggcgtgcccgtgctctttattcccggcaacggaggaagttacaagcaggttcggtcattggctgcagaatcttttcgagcttatcagaatggtccacttgagcccaccttttatcaggaagcatctagtagtttaccaggagatggactcaacaatttttctattccttcacggtatggccgcatgttggactggtttgctgttgaccttgaaggagagcactctgctatggatggtcagatacttgaggagcatactgaatatgttgtctacgcgattcataggatccttgaccaatacaaagaatcacatttggagagatcaaagggtggtgctcaatcctctcctgacctgccatccagtgttatacttgttggccattcgatgggtggttttgtggctcgagcagctgtagtccacccaaacctgaggaaatcagcggtggaaactatactgacactttccagcccacaccagtaccctcccatcgcacttcagccatccttgggtcattttttctcccatgtcaatgaagaatggagaaagggatacaagactggtgtatcacatgcaatcagttcaaaattatctaatgtagttgttgtctctgtatcaggtggcattcatgattatcagattaggtcaaggttggcatcattggatggaattgtgccttctactcacggctttatggtaggaagctccagtatgaagaatgtttggttatccatggaacatcaatctatcctatggtgtaatcaattagctgtacaggttgcacacactcttcttagcataatagatcctgttgacaggcagccattttcaagcacacaaaaaagagtttttgtgttcacaaaaatgctccaaagtgcagttcctcagtctctgagttcaatgactcatgttcctgcttctctgtcacgaaatttacctgccaatgagaatcaggatgctggcgaactacacaaaaaagattcactttcttgcccatcatccactgaatggactagtgatggccttgaaaaggacctgtatattcaatcaaattctgttactgttttagccatggatggcaggagaagatggttagatattaaaaagctgggatcaaatggcagaggacactttgtttttgtaacaaatcttgccccttgttctggagtaaggattcacttgtggccagaaaaacatcattcgcctgtgcaaaatgaattacctgccagtaaaaagatagtggaagttacatcaaagatggtccaaattcctgcaggacctgctccaaaacaggttgagcctggcagtcaaactgagcaaccacctccttctgcatttcttctactgagtccaggagaaatgagtggtttcagattcatgactatatcagtagcacctcgaccggctgatccacactgctcatacgaagtcacttctcgtgcttcactaagtgatgcggcaagcagattctttttgttgtactcatcagagattcttggtttcatggtggccataatgttttttggaattatgcgacagacttcagcatgggaatgtgattcttctatgccatccattttgtcagccatagagtctaatcttggactcccaaaggcattcatgtttctttgcttcatgccaatacttgtattttgtgcctttttcattttcacggcggagcaaaaaccaccatttgggaccttcttattggttactctgatctgctacatagttgctaatggtttcacaattttgttgatactaagttcgaaattgcttctgtatgtggttgccattctacatgtctttactaaaagacgatggcaatcatgggggaatggtgttcaatcagcatttcttggtcaattcctcagtttctcctcgtttcagtcagtgaagatgcttaggaacaatccaaatataattgtagcagttgctacattaccactcgtctgtttggttcatccagccattggccttggtctgctacttctctctcatgctttccatgctcattcaaatctatgcagttttttagcagcttcttttcgtagcatcactcagaaaaaggacctgtacaagtccaagatgggcgatggttcagttctgctatccaaaagtaaatccgatgggctgcagcaacttctgccaatggatgatagcccaacagcttcaaaaagttttaccgacagccaactagaactgtttgattatcggcatggcgtcatgatcttgcatcttctaagcacactcatgtttgtgccttcacttgttgcctggctacagagaattggtatgggacaaaattttccctggttcattgattctgctatttgcgttggtgttatactgcatggactttttggatcccaaccaaatgtcagctgctgcatatttttcaagttacctggcaggagaggccgtgaaattggtctgagtttcctctacctcgtgggtggctattattcctttgtcagctccatggcgttggcaccttatagggccttgtatgccatggcgaccattggttatatatgtttcatttccagaattctcgagagaagaaatatggtaaggggtgacattaactctaggaggactcggaagcactcacacagacactgacacaccacagaaagtgtgatttctttaaaattatttgtaagagatagagaatagggttgaggaacctttcctccaacctaagttatctccttttttgtttttttccaaatcttgcttatgtgcatgtgattgtgtacggccatggttttgaaagttgttatcggatatggttatcctcggtgtgtggggtcttcataaattgcatcaagaatagcaaatttctaggtgttgagagcatcgcattgagagcttgattattgagttggtg

SEQ ID NO: 210461 - DNA, 1575 bp, Zea Mays
caggtacgcgcgcgcggcatgtgcagtgcaactcatgtgctcctctaccggtcgactagtcttttttctctctttttcgagagagaagcggtcgactagtgactagcctggctgtaggctccccccgctgaaggctcaagtctcagtcccggctcaccgcagagttatctcactcggaggcgccagcgcgcgcgtgtataaataactgcgcctcactgctgcggtgcacggtgtccccctccctacccgctgtctgcggctggccaccctcatagcccccgagctctgtgtgcgacgatggactactcgggcaccaaggagtcgcctcctgccgggtgaacaacgcagccgtgtcgtttaacgagatcgacaccaactccgtggagcacgccgaggctgtcctcaggaccaacttctacggggccaagatgctcaccgaagcgctcctgccgctgttccggcagtcgtcggcgaccagcaggatcctcaacgtcagctcccagcttggccttctcaacaaggtgagcgacccgtcgctgagggcgctgctgctggacgaggacgggctgacggaggcggggatagaggcgatggtgtcgcggttcctggcgcaggtgaaggacgggacgtggggcgggcagggttggcccaaggtgtggacggactactcggtctccaagctggccctgaacgcctactcgcggctgctggcgcggcggctgcaggcgcgcggcgcgcgcgtgagcgtcaactgcttctgccccgggttcacgcgcacgggcatgaccaagggctgggggaagcgcaccgccgaggaggcggccgacgtcgccgcgcggctcgcgctgctggcgcccgccgagctccccacggggaccttcttcaagtggtgcacgccgcagctctactccaagctgtgactgtgactggatagctacgcctaccgtcgtcggcagtgtgtgcgtgcgctccgtgaacgctggagtatatatatatagttcggttcctttagctactctgctcagaagtcagaaacgggagtgtcgatctgccaaggtgctttcggttgaacacagctcgtttgtgacctctccgcaatgtaccatgtacctagttgtctaagatctaggtcaactttctgtgcactggttgaatggttgccttgcctctgcatctgcatctcccttaccgttctgcccgttcgtaaaaagtctgttccttaccggattgatggtagttggctagcttttccttccacacgagatttctggccgtgggatgtgaagtgtgattggagaagtgggccgcgtgggctttaacttgtgttcgctaatggtcaacacgaggagacagacggcccaactcatccttctttcattttctttcgtaatcagaatgagtgggataacaatgctgttccacggtctttttaattttttttgtaaacataagggaacaaatatataaataataaataaactattttatcccgacctgttaccggtgtatgtgttccgtaccgaactttttgtttctgatgtttccgaaatatcgtttccgttttcgaagctaccg

SEQ ID NO: 210462 - DNA, 2114 bp, Zea Mays
ggccacaagcacgggactggcatatattatccatgtaaataaaataaagtatataaataaccccataaaaagctaccattccactacctcccaaactcgcgagcgagtcgaggctccaaccccggcacatcacaggaggaggaggacgacgcgcccaccatggccatggcgacggccctccgcaagctctccgccaacgctctgcgccgccagccgctctcccgcatcacgccgctctactacatggcgtcccttccggcgacggaggagagatccggaatcacctggactaagcagttgaacgcgccgctggaagaggtcgaccccgagattgctgacatcatcgagcacgagaaggcccgccaatggaagggtctggagctcatcccgtcggagaatttcacgtcggtgtcagtgatgcaggcagtgggttccgtcatgaccaacaagtacagcgaggggtaccctggcgcaagatactacgggggaaatgagtttattgatatggcagagtccttgtgtcagaaacgtgctttggaggctttccgtttggacccggcgaaatggggagtgaatgtgcaacctctatccggttcgcccgccaacttccatgtatacactgcactcttgaagccacatgaaaggatcatggctttggatcttcctcacggtggacatctttctcatggttaccagactgacactaagaagatatctgcaacttcaatattttttgagacaatgccttacagattggatgaaagcactggattgattgattacgatcagttggagaaaagcgctgttctttttaggccaaagttgatcattgctggtgcaagtgcatatgctcggctatatgattatgaccgtatgcggaagatatgcaacaagcagaaggcaatacttctagcagacatggcacatattagtgggcttgttgcagctggtgttgttccatctccttttgattatgcagatgtagtgactaccactactcacaaatcactccgtgggccacgtggagccatgatcttttacaggaagggagtcaaagaaataaataaacaaggaaaagaggttatgtatgattttgaggacaaaatcaatgctgctgtctttcctggtctgcaaggtgggcctcataaccataccattactggcttggctgttgcgctcaaacaggcaactactccagaatacagagcttaccaagagcaagttatcagtaattgtgctaaatttgcgcagagcctgatttcaaaaggatatgaactcgtctctggtgggactgacaaccatttagttctggtgaatctcaagaataagatggttcaagggtggagaaggttttagaaagtgtgcatattgcagcaaacaagaacacagttcctggtgatgtttcagctatggtgccaggaggcatcaggatgggaaccccagcccttacgtcgagaggatttgttgaagaagatttcgctaaagttgctgacttcttcgatgcagcagtgaatctggccttgaagattaaggctgcaacgacaggtggaacaaagctgaaggactttgttgccactttgcaatctgatagcatccaagttgagattgcaaagcttcgccatgatgtagaggaatttgcaaaacaattcccaacaattggatttgagaaagagaccatgaaatacaagaactaatatctggatgacaagagaatgaggtcactcttcttgcagtaagcattcgaagcaagatgccacgatgattattgggagtttaaccatggtgtaatggcatcttatgttaaagagatgttggcaatttacagcatgtggaactttcgtcaatcatattgtagacacataccgcgagatgctatattgaccggacaattgcatttccatatgtgtacatcctttgcgttcaaaaaaaaaaaaaacgtacatcctgacacacactccacccccatccccactcacaagcacacgtcaccctgcccgcaaggctatctactcatctctataatcaaactatactatgtgaaagttatagtctacggtgcaaaatagtgttttagatgactatgtggataaactaatgaagacagtataactata

SEQ ID NO: 210463 - DNA, 2571 bp, Zea Mays
agagcgcacggcccagttgggcccaatactcgacacgactcattgaccggcccattacggctgaagggagtcgctcgccgccgcgttcgaggcgttccctcgtcgcgctcgcgccgtcgaccttcaccgctcgctgtcaggtctgcccgccacgacctcgccggccacactcgcagctcgccctcgctcctacgcctcgccggcgaggccttctgccttttcgcgccctctatctgctgcgatctttggagcatcgttctcttctctcacttgagatccagacccctaaaccctagagctcgccgcttccgctcgctcgctccgcgctggcggcgacaatggaggacgaggagatggagaagaaggtgcagcagtacttgcagcgcaagggtttccgcctcactgagcttgcgctccaggaggagcgcaaccgcctctccacctccgccatctccgacgttgcgcttgcacggtctgacaatgatccagcgagatactacgatggatatagcagattaagaacatgggcatacagttctcttgatcaatataagcacgaattacttcgcgtcctttatccagttttcatccatagcttcatggatctagtggcagaaggacatatgcaggaagctcggtcatttttccatacatttcgggaagatcatgaggtgatgcattcaagggatcttcagaagctggaaggcgtcctgtctccttcacacttggaggaaatggaattggcccggtcttttaggaaaaataaatttaaaattaaattatgtgagtattcgtatgaattgcttctccagtatctccagaaaacacaagcccttgtggtgcttggagtaatcaatgagcacataacttttgaagtatctcctggtcagccctcattaatctctgatgacgctgatgttgttgctctgattgggacaagtaaggacttggcaaaacagataaatcagaaggaagtacattgggggttgcttgaagattctgttgaagagcgaatggagaaggcactagcagaatctgataaaatagaagctgaaagcaaggatgctgatgcagaagataacaagaaaagaaatgcagaaggtggaaagcaaggtgcttctcttaagaaagccaaaaaggacaagcttgttggtgcgactggaaaaagcgtcagaactgaaacaagcatggtttctgtggcacctcgagtgaaaccggagctaactcttccagcaacgcctgttgaagttgaacaatcaattcttgaggacctacgaaaccgtgcacaactgaatagtgtggcattgccatctgttagcttctacacattccttaatacacataatggattaaactgttcctcaatatcacatgatggatcactggttgttggtgggttttctgattcgtcagtgaaggtctgggatatgtcaaagatgggccagccagcaaaaatatcaagatcacagggtgagaatgggccttcccagggtgagcgcatatcaacattagatgaggggaaacgaacctatacactatttcaaggccattctggaccagtttattctgcggcctttagcccgtttggggatttcctcttgtcatcatcttcagactcgacaattagactatggagcaccaagctgaatgctaatcttgtctgttacaaaggacacaactacccggtttgggatgtccaatccagttggccattactttgctagtgcttcgcacgacaggactgctagaatttggtcaatggataaaatccagcctttgcgaataatggctgggcatctttctgatgttgattgtgtccagtggcatgtaaactgtaactacattgccactggctctagcgacaaaactgtaaggctatgggatgttcagacgggtgaatgcatacggatgtttattggtcataggagtatggttttatcactggcaatgtcacctgatggacgatacatggcctccggagatgaagatggaacaatcatgatatgggatctctcgactggccgttgtgtttcaccactactaggacacagctcttgtgtgtggacacttgctttcagctgtgaaggagcattgcttgcatcgggatcggctgactgtactgtaaagctctgggatgtcgcttctagcacaaaaaccctgaagacagaggataccaaaggcagctcagctaaccgactgagactgcttaaagctctccctacaaaatcaactcctgtttatagcctgcggaaaactagaactggtcctgttttgacattgagtagtgaagctggcatttcagagactgcctattgtacagctaatattttcattagcaattccaacgaactcagcatgtactgccgaattgagcaccgcagattcgttgtagcgggttgtgatattgtaacaatattattaggtaattacgttctgtaaaattgttttttaggttgtgaccttatgaacgcaactaaatgtacaagtgctgacaggcgatagcgtgaatgcaatggtctatcaggtctggagtttggtttagtgaccaggtaattcgaggggatcatgggg

SEQ ID NO: 210464 - DNA, 2645 bp, Zea Mays
agagcgcacggcccagttgggcccaatactcgacacgactcattgaccggcccattacggctgaagggagtcgctcgccgccgcgttcgaggcgttccctcgtcgcgctcgcgccgtcgaccttcaccgctcgctgtcaggtctgcccgccacgacctcgccggccacactcgcagctcgccctcgctcctacgcctcgccggcgaggccttctgccttttcgcgccctctatctgctgcgatctttggagcatcgttctcttctctcacttgagatccagacccctaaaccctagagctcgccgcttccgctcgctcgctccgcgctggcggcgacaatggaggacgaggagatggagaagaaggtgcagcagtacttgcagcgcaagggtttccgcctcactgagcttgcgctccaggaggagcgcaaccgcctctccacctccgccatctccgacgttgcgcttgcacggtctgacaatgatccagcgagatactacgatggatatagcagattaagaacatgggcatacagttctcttgatcaatataagcacgaattacttcgcgtcctttatccagttttcatccatagcttcatggatctagtggcagaaggacatatgcaggaagctcggtcatttttccatacatttcgggaagatcatgaggtgatgcattcaagggatcttcagaagctggaaggcgtcctgtctccttcacacttggaggaaatggaattggcccggtcttttaggaaaaataaatttaaaattaaattatgtgagtattcgtatgaattgcttctccagtatctccagaaaacacaagcccttgtggtgcttggagtaatcaatgagcacataacttttgaagtatctcctggtcagccctcattaatctctgatgacgctgatgttgttgctctgattgggacaagtaaggacttggcaaaacagataaatcagaaggaagtacattgggggttgcttgaagattctgttgaagagcgaatggagaaggcactagcagaatctgataaaatagaagctgaaagcaaggatgctgatgcagaagataacaagaaaagaaatgcagaaggtggaaagcaaggtgcttctcttaagaaagccaaaaaggacaagcttgttggtgcgactggaaaaagcgtcagaactgaaacaagcatggtttctgtggcacctcgagtgaaaccggagctaactcttccagcaacgcctgttgaagttgaacaatcaattcttgaggacctacgaaaccgtgcacaactgaatagtgtggcattgccatctgttagcttctacacattccttaatacacataatggattaaactgttcctcaatatcacatgatggatcactggttgttggtgggttttctgattcgtcagtgaaggtctgggatatgtcaaagatgggccagccagcaaaaatatcaagatcacagggtgagaatgggccttcccagggtgagcgcatatcaacattagatgaggggaaacgaacctatacactatttcaaggccattctggaccagtttattctgcggcctttagcccgtttggggatttcctcttgtcatcatcttcagactcgacaattagactatggagcaccaagctgaatgctaatcttgtctgttacaaaggacacaactacccggtttgggatgtccaattcagtccagttggccattactttgctagtgcttcgcacgacaggactgctagaatttggtcaatggataaaatccagcctttgcgaataatggctgggcatctttctgatgttgattgtgtccagtggcatgtaaactgtaactacattgccactggctctagcgacaaaactgtaaggctatgggatgttcagacgggtgaatgcatacggatgtttattggtcataggagtatggttttatcactggcaatgtcacctgatggacgatacatggcctccggagatgaagatggaacaatcatgatatgggatctctcgactggccgttgtgtttcaccactactaggacacagctcttgtgtgtggacacttgctttcaggagcattgcttgcatcgggatcggctgactgtactgtaaagctctgggatgtcgcttctagcacaaaaaccctgaagacagaggataccaaaggcagctcagctaaccgactgagactgcttaaagctctccctacaaaatcaactcctgtttatagcctgcggttttctcggaggaaccttctatttgcctctggtgctctctcgctaagctcgtcgtaagctgtgttttttttttgcagaaaactagaactggtcctgttttgacattgagtagtgaagctggcatttcagagactgcctattgtacagctaatattttcattagcaattccaacgaactcagcatgtactgccgaattgagcaccgcagattcgttgtagcgggttgtgatattgtaacaatattattaggtaattacgttctgtaaaattgttttttaggttgtgaccttatgaacgcaactaaatgtacaagtgctgacaggcgatagcgtgaatgcaatggtctatcaggtctggagtttggtttagtgaccaggtaattcgaggggatcatgggg

SEQ ID NO: 210465 - DNA, 2214 bp, Zea Mays
agagcgcacggcccagttgggcccaatactcgacacgactcattgaccggcccattacggctgaagggagtcgctcgccgccgcgttcgaggcgttccctcgtcgcgctcgcgccgtcgaccttcaccgctcgctgtcaggtctgacaatgatccagcgagatactacgatggatatagcagattaagaacatgggcatacagttctcttgatcaatataagcacgaattacttcgcgtcctttatccagttttcatccatagcttcatggatctagtggcagaaggacatatgcaggaagctcggtcatttttccatacatttcgggaagatcatgaggtgatgcattcaagggatcttcagaagctggaaggcgtcctgtctccttcacacttggaggaaatggaattggcccggtcttttaggaaaaataaatttaaaattaaattatgtgagtattcgtatgaattgcttctccagtatctccagaaaacacaagcccttgtggtgcttggagtaatcaatgagcacataacttttgaagtatctcctggtcagccctcattaatctctgatgacgctgatgttgttgctctgattgggacaagtaaggacttggcaaaacagataaatcagaaggaagtacattgggggttgcttgaagattctgttgaagagcgaatggagaaggcactagcagaatctgataaaatagaagctgaaagcaaggatgctgatgcagaagataacaagaaaagaaatgcagaaggtggaaagcaaggtgcttctcttaagaaagccaaaaaggacaagcttgttggtgcgactggaaaaagcgtcagaactgaaacaagcatggtttctgtggcacctcgagtgaaaccggagctaactcttccagcaacgcctgttgaagttgaacaatcaattcttgaggacctacgaaaccgtgcacaactgaatagtgtggcattgccatctgttagcttctacacattccttaatacacataatggattaaactgttcctcaatatcacatgatggatcactggttgttggtgggttttctgattcgtcagtgaaggtctgggatatgtcaaagatgggccagccagcaaaaatatcaagatcacagggtgagaatgggccttcccagggtgagcgcatatcaacattagatgaggggaaacgaacctatacactatttcaaggccattctggaccagtttattctgcggcctttagcccgtttggggatttcctcttgtcatcatcttcagactcgacaattagactatggagcaccaagctgaatgctaatcttgtctgttacaaaggacacaactacccggtttgggatgtccaattcagtccagttggccattactttgctagtgcttcgcacgacaggactgctagaatttggtcaatggataaaatccagcctttgcgaataatggctgggcatctttctgatgttgattgtgtccagtggcatgtaaactgtaactacattgccactggctctagcgacaaaactgtaaggctatgggatgttcagacgggtgaatgcatacggatgtttattggtcataggagtatggttttatcactggcaatgtcacctgatggacgatacatggcctccggagatgaagatggaacaatcatgatatgggatctctcgactggccgttgtgtttcaccactactaggacacagctcttgtgtgtggacacttgctttcagctgtgaaggagcattgcttgcatcgggatcggctgactgtactgtaaagctctgggatgtcgcttctagcacaaaaaccctgaagacagaggataccaaaggcagctcagctaaccgactgagactgcttaaagctctccctacaaaatcaactcctgtttatagcctgcggaaaactagaactggtcctgttttgacattgagtagtgaagctggcatttcagagactgcctattgtacagctaatattttcattagcaattccaacgaactcagcatgtactgccgaattgagcaccgcagattcgttgtagcgggttgtgatattgtaacaatattattaggttgtgaccttatgaacgcaactaaatgtacaagtgctgacaggcgatagcgtgaatgcaatggtctatcaggtctggagtttggtttagtgaccaggtaattcgaggggatcatgggg

SEQ ID NO: 210466 - DNA, 2291 bp, Zea Mays
agagcgcacggcccagttgggcccaatactcgacacgactcattgaccggcccattacggctgaagggagtcgctcgccgccgcgttcgaggcgttccctcgtcgcgctcgcgccgtcgaccttcaccgctcgctgtcaggtctgacaatgatccagcgagatactacgatggatatagcagattaagaacatgggcatacagttctcttgatcaatataagcacgaattacttcgcgtcctttatccagttttcatccatagcttcatggatctagtggcagaaggacatatgcaggaagctcggtcatttttccatacatttcgggaagatcatgaggtgatgcattcaagggatcttcagaagctggaaggcgtcctgtctccttcacacttggaggaaatggaattggcccggtcttttaggaaaaataaatttaaaattaaattatgtgagtattcgtatgaattgcttctccagtatctccagaaaacacaagcccttgtggtgcttggagtaatcaatgagcacataacttttgaagtatctcctggtcagccctcattaatctctgatgacgctgatgttgttgctctgattgggacaagtaaggacttggcaaaacagataaatcagaaggaagtacattgggggttgcttgaagattctgttgaagagcgaatggagaaggcactagcagaatctgataaaatagaagctgaaagcaaggatgctgatgcagaagataacaagaaaagaaatgcagaaggtggaaagcaaggtgcttctcttaagaaagccaaaaaggacaagcttgttggtgcgactggaaaaagcgtcagaactgaaacaagcatggtttctgtggcacctcgagtgaaaccggagctaactcttccagcaacgcctgttgaagttgaacaatcaattcttgaggacctacgaaaccgtgcacaactgaatagtgtggcattgccatctgttagcttctacacattccttaatacacataatggattaaactgttcctcaatatcacatgatggatcactggttgttggtgggttttctgattcgtcagtgaaggtctgggatatgtcaaagatgggccagccagcaaaaatatcaagatcacagggtgagaatgggccttcccagggtgagcgcatatcaacattagatgaggggaaacgaacctatacactatttcaaggccattctggaccagtttattctgcggcctttagcccgtttggggatttcctcttgtcatcatcttcagactcgacaattagactatggagcaccaagctgaatgctaatcttgtctgttacaaaggacacaactacccggtttgggatgtccaattcagtccagttggccattactttgctagtgcttcgcacgacaggactgctagaatttggtcaatggataaaatccagcctttgcgaataatggctgggcatctttctgatgttgattgtgtccagtggcatgtaaactgtaactacattgccactggctctagcgacaaaactgtaaggctatgggatgttcagacgggtgaatgcatacggatgtttattggtcataggagtatggttttatcactggcaatgtcacctgatggacgatacatggcctccggagatgaagatggaacaatcatgatatgggatctctcgactggccgttgtgtttcaccactactaggacacagctcttgtgtgtggacacttgctttcagctgtgaaggagcattgcttgcatcgggatcggctgactgtactgtaaagctctgggatgtcgcttctagcacaaaaaccctgaagacagaggataccaaaggcagctcagctaaccgactgagactgcttaaagctctccctacaaaatcaactcctgtttatagcctgcggttttctcggaggaaccttctatttgcctctggtgctctctcgctaagctcgtcgtaagctgtgttttttttttgcagaaaactagaactggtcctgttttgacattgagtagtgaagctggcatttcagagactgcctattgtacagctaatattttcattagcaattccaacgaactcagcatgtactgccgaattgagcaccgcagattcgttgtagcgggttgtgatattgtaacaatattattaggttgtgaccttatgaacgcaactaaatgtacaagtgctgacaggcgatagcgtgaatgcaatggtctatcaggtctggagtttggtttagtgaccaggtaattcgaggggatcatgggg

SEQ ID NO: 210467 - DNA, 2313 bp, Zea Mays
agagcgcacggcccagttgggcccaatactcgacacgactcattgaccggcccattacggctgaagggagtcgctcgccgccgcgttcgaggcgttccctcgtcgcgctcgcgccgtcgaccttcaccgctcgctgtcaggtctgacaatgatccagcgagatactacgatggatatagcagattaagaacatgggcatacagttctcttgatcaatataagcacgaattacttcgcgtcctttatccagttttcatccatagcttcatggatctagtggcagaaggacatatgcaggaagctcggtcatttttccatacatttcgggaagatcatgaggtgatgcattcaagggatcttcagaagctggaaggcgtcctgtctccttcacacttggaggaaatggaattggcccggtcttttaggaaaaataaatttaaaattaaattatgtgagtattcgtatgaattgcttctccagtatctccagaaaacacaagcccttgtggtgcttggagtaatcaatgagcacataacttttgaagtatctcctggtcagccctcattaatctctgatgacgctgatgttgttgctctgattgggacaagtaaggacttggcaaaacagataaatcagaaggaagtacattgggggttgcttgaagattctgttgaagagcgaatggagaaggcactagcagaatctgataaaatagaagctgaaagcaaggatgctgatgcagaagataacaagaaaagaaatgcagaaggtggaaagcaaggtgcttctcttaagaaagccaaaaaggacaagcttgttggtgcgactggaaaaagcgtcagaactgaaacaagcatggtttctgtggcacctcgagtgaaaccggagctaactcttccagcaacgcctgttgaagttgaacaatcaattcttgaggacctacgaaaccgtgcacaactgaatagtgtggcattgccatctgttagcttctacacattccttaatacacataatggattaaactgttcctcaatatcacatgatggatcactggttgttggtgggttttctgattcgtcagtgaaggtctgggatatgtcaaagatgggccagccagcaaaaatatcaagatcacagggtgagaatgggccttcccagggtgagcgcatatcaacattagatgaggggaaacgaacctatacactatttcaaggccattctggaccagtttattctgcggcctttagcccgtttggggatttcctcttgtcatcatcttcagactcgacaattagactatggagcaccaagctgaatgctaatcttgtctgttacaaaggacacaactacccggtttgggatgtccaattcagtccagttggccattactttgctagtgcttcgcacgacaggactgctagaatttggtcaatggataaaatccagcctttgcgaataatggctgggcatctttctgatgttgattgtgtccagtggcatgtaaactgtaactacattgccactggctctagcgacaaaactgtaaggctatgggatgttcagacgggtgaatgcatacggatgtttattggtcataggagtatggttttatcactggcaatgtcacctgatggacgatacatggcctccggagatgaagatggaacaatcatgatatgggatctctcgactggccgttgtgtttcaccactactaggacacagctcttgtgtgtggacacttgctttcaggagcattgcttgcatcgggatcggctgactgtactgtaaagctctgggatgtcgcttctagcacaaaaaccctgaagacagaggataccaaaggcagctcagctaaccgactgagactgcttaaagctctccctacaaaatcaactcctgtttatagcctgcggttttctcggaggaaccttctatttgcctctggtgctctctcgctaagctcgtcgtaagctgtgttttttttttgcagaaaactagaactggtcctgttttgacattgagtagtgaagctggcatttcagagactgcctattgtacagctaatattttcattagcaattccaacgaactcagcatgtactgccgaattgagcaccgcagattcgttgtagcgggttgtgatattgtaacaatattattaggtaattacgttctgtaaaattgttttttaggttgtgaccttatgaacgcaactaaatgtacaagtgctgacaggcgatagcgtgaatgcaatggtctatcaggtctggagtttggtttagtgaccaggtaattcgaggggatcatgggg

SEQ ID NO: 210468 - DNA, 2623 bp, Zea Mays
agagcgcacggcccagttgggcccaatactcgacacgactcattgaccggcccattacggctgaagggagtcgctcgccgccgcgttcgaggcgttccctcgtcgcgctcgcgccgtcgaccttcaccgctcgctgtcaggtctgcccgccacgacctcgccggccacactcgcagctcgccctcgctcctacgcctcgccggcgaggccttctgccttttcgcgccctctatctgctgcgatctttggagcatcgttctcttctctcacttgagatccagacccctaaaccctagagctcgccgcttccgctcgctcgctccgcgctggcggcgacaatggaggacgaggagatggagaagaaggtgcagcagtacttgcagcgcaagggtttccgcctcactgagcttgcgctccaggaggagcgcaaccgcctctccacctccgccatctccgacgttgcgcttgcacggtctgacaatgatccagcgagatactacgatggatatagcagattaagaacatgggcatacagttctcttgatcaatataagcacgaattacttcgcgtcctttatccagttttcatccatagcttcatggatctagtggcagaaggacatatgcaggaagctcggtcatttttccatacatttcgggaagatcatgaggtgatgcattcaagggatcttcagaagctggaaggcgtcctgtctccttcacacttggaggaaatggaattggcccggtcttttaggaaaaataaatttaaaattaaattatgtgagtattcgtatgaattgcttctccagtatctccagaaaacacaagcccttgtggtgcttggagtaatcaatgagcacataacttttgaagtatctcctggtcagccctcattaatctctgatgacgctgatgttgttgctctgattgggacaagtaaggacttggcaaaacagataaatcagaaggaagtacattgggggttgcttgaagattctgttgaagagcgaatggagaaggcactagcagaatctgataaaatagaagctgaaagcaaggatgctgatgcagaagataacaagaaaagaaatgcagaaggtggaaagcaaggtgcttctcttaagaaagccaaaaaggacaagcttgttggtgcgactggaaaaagcgtcagaactgaaacaagcatggtttctgtggcacctcgagtgaaaccggagctaactcttccagcaacgcctgttgaagttgaacaatcaattcttgaggacctacgaaaccgtgcacaactgaatagtgtggcattgccatctgttagcttctacacattccttaatacacataatggattaaactgttcctcaatatcacatgatggatcactggttgttggtgggttttctgattcgtcagtgaaggtctgggatatgtcaaagatgggccagccagcaaaaatatcaagatcacagggtgagaatgggccttcccagggtgagcgcatatcaacattagatgaggggaaacgaacctatacactatttcaaggccattctggaccagtttattctgcggcctttagcccgtttggggatttcctcttgtcatcatcttcagactcgacaattagactatggagcaccaagctgaatgctaatcttgtctgttacaaaggacacaactacccggtttgggatgtccaattcagtccagttggccattactttgctagtgcttcgcacgacaggactgctagaatttggtcaatggataaaatccagcctttgcgaataatggctgggcatctttctgatgttgattgtgtccagtggcatgtaaactgtaactacattgccactggctctagcgacaaaactgtaaggctatgggatgttcagacgggtgaatgcatacggatgtttattggtcataggagtatggttttatcactggcaatgtcacctgatggacgatacatggcctccggagatgaagatggaacaatcatgatatgggatctctcgactggccgttgtgtttcaccactactaggacacagctcttgtgtgtggacacttgctttcagctgtgaaggagcattgcttgcatcgggatcggctgactgtactgtaaagctctgggatgtcgcttctagcacaaaaaccctgaagacagaggataccaaaggcagctcagctaaccgactgagactgcttaaagctctccctacaaaatcaactcctgtttatagcctgcggttttctcggaggaaccttctatttgcctctggtgctctctcgctaagctcgtcgtaagctgtgttttttttttgcagaaaactagaactggtcctgttttgacattgagtagtgaagctggcatttcagagactgcctattgtacagctaatattttcattagcaattccaacgaactcagcatgtactgccgaattgagcaccgcagattcgttgtagcgggttgtgatattgtaacaatattattaggttgtgaccttatgaacgcaactaaatgtacaagtgctgacaggcgatagcgtgaatgcaatggtctatcaggtctggagtttggtttagtgaccaggtaattcgaggggatcatgggg

SEQ ID NO: 210469 - DNA, 806 bp, Zea Mays
atatctctaaagatttagccttgggagcgaattggaaacaactatcaagatcacagggtgagaatgggccttcccagggtgagcgcatatcaacattagatgaggggaaacgaacctatacactatttcaaggccattctggaccagtttattctgcggcctttagcccgtttggggatttcctcttgtcatcatcttcagactcgacaattagactatggagcaccaagctgaatgctaatcttgtctgttacaaaggacacaactacccggtttgggatgtccaattcagtccagttggccattactttgctagtgcttcgcacgacaggactgctagaatttggtcaatggataaaatccagcctttgcgaataatggctgggcatctttctgatgttgattgtgtccagtggcatgtaaactgtaactacattgccactggctctagcgacaaaactgtaaggctatgggatgttcagacgggtgaatgcatacggatgtttattggtcataggagtatggttttatcactggcaatgtcacctgatggacgatacatggcctccggagatgaagatggaacaatcatgatatgggatctctcgactggccgttgtgtttcaccactactaggacacagctcttgtgtgtggacacttgctttcagatttgaagatcatgtaatttgatctcatgaaatgatgtcttaaaactggtggtatcacagattctgatgtgtactagaatacatgagtctgagcattaggtaaaagggcaacgttgctatgtccttgcgtgcttta

SEQ ID NO: 210470 - DNA, 2599 bp, Zea Mays
aaaagcagagccgtctgcgttgccgctaacaaggccgccgccgatggacgccttcgtcgccggttcgcgcggccgcccagccctcagcttcctttgccctaagatatcgctattctccccgccctcgcactcctggttccgctggctcgtcggtgcgcctcgcgttctccctcccttcaccgtcgctgctgtcttacgtcccattcacggcgaccatgacgccattgatcttcccagggaagcagacgaaatccgggggttgctgccacgcggtttcgacatcataggggtgctgctcgtggggggagagggttctgatgcggacgtcactcgcgcactggagcaggctcgggcgctgagggagctgctgtttggtgtggcagcgagccatggcttggtaggaggccacatggatgcagccactggggagattcgatttgttgtatctgagagtggatggacgaactcggtggaaggatctgtggttacatgggaggatgagcccgggaggttgttgtgggagaagggatgcctcctgcgctgcgaactgctgctgaagcttccactctatcttaggcctgacgtgaattctggcatcgaaggacagttttcttcacttattgaatctacagttgctaaactcagagatcctcatgtatattatttagttgaggggccaattacatctagtcaatcacatcgttctattatcttgcgtggcgatgatttaagctttgattcacatacacatggaaactcaagaacagacagttgtaccacaagtattgtaacttgttcagaattcttcacagaaaagaggtatgacctctcattgacaagagaggtaagctgaaactcaaccaaacttgttctttaaagttatttttgaggactgtagttattattggctcgcttatctttcttgtctgaacatcaaagttgagtataattgtttattttttcatgaagatctgttataaattgaactgaggggttgtgtgtaaatataaaatatatgaaaggcagctgctaatgaggtgccatttcttttctggagttctatagttggataatgcagattgctgtttccatgcatacttctgtatcacatggcatcttgggtcaaaactttctacaatttctgtttgctagactgcagatgcaattgcaataactgtcaaccaatcagcgcctagcttgaagcctggcggtacccctgtggtagagtattttcctgcctcagcacctgccagcctcatagtaatcaccttgaagcttgacatactatgctactcatcaatagactttccagtggcggctgctgtatctgaacttgttattccaggattagcagatcagatgattgtaatgaagagaattattgcttcagagataactcaacaagcacagcttcaaccattccattttattccttctggttggcatgttccagtaacagctatatacaatacaagatatggtgagactgaggagaggcaaagtgagctgcgaaaagaactgcatttaaggctaggacttcccttagatcggcctttgttgcgaatttctaatgcattgactttcggtggcatgggaaggaggaagaaaagcatgccaagaagtggttcttcgctgcttcgagacatccacagagaacttccatctagtggtgtatccggaggtgttatgtctttgattgatggttcatatgagtattatcattatcttcacgatggtattgatgacaatggatggggatgcgcatatcggtctctacaaacaattgtctcttggtacagattgcaacaatattcatcaatagatgttccttctcacagggagattcagcaagttcttgttgaaattggtgacaaggatccatcatttattggatcttgtgagtggatcggagccattgagttaagctttgtcctcgacaaactgctgggcgtgagttgtaaggttatcaatgtgaggtctggcgatgagcttcctgaaaagtgcagagaacttgccaggcattttgaaacccagggaactcctgtgatgattggtggtggagtcttggcttacacccttttgggagttgattataacggagccagtggagactgtgcatttcttatccttgatccgcactacactggtactgacgatctcaaaaagattgtaaatggcggatggtgcggatggaagaagtctgtcgacagcaaaggccgaagcttcttcttgaaagacaagttctacaaccttctactaccccaaaggccaaacatggtgtgaaacctatattgttcaatatgttaatagtgcagacgtgcaggttcacgaggcacagatatttatgcttgtgatagaggtttatggttgcgatagcagaagttatgatttgtaaaaaaaatttagtgagacattatattgtttttttaataaatttgtagtgagtaaattaaattaaattaacgaatgagagttttacaggcataacactaaaagcagacgttttgcttgagacgtcatgcttaacatgtggagtctgtgtatttggtaaactaagggtctgtctgtatccattggcactgaaaattagcacgtaaaa

SEQ ID NO: 210471 - DNA, 3189 bp, Zea Mays
gctggattgcaaaatacagctgggactgttgcatttcatggacatatgggcagaaactgggcacgcaaaagggttcacagccttagacatttatgcttcaatgtttattttgttatgagcaaagaatcttgctctagctggtgttaaatctgttaccctacatgatactggaaatgtggaaatgtgggacctatcaggcaatttctttctatctgaggatgacatcgggaagaacagggctgttgcttgtgttgcaaagcttcaagaacttaacaatgctgttctcatatataccctaacagaagaattgaccactgagcaccttccaaagttccaagtggttgttttcactgacattagtttggacaaggcatttgagttcgatgattattgtcgtaatcagcagcctccaatttcctttatcaagacagaagatggtgatcttgttgttttctcagaggtccagggtatgacagaactgaatgatggcaagccaaggacagtaatgtgcgcaggaccattttccttttgcatcgaggatacaagtaactttggcacttatacaaaaggtggaattgttacacaggtgaaagaacggaagatcttgaagtttaagagtttgagagattcgattagagaacctgggaatttccctctaagtgattgttcaaagtttactcgccctcctctgcttcattttgcatttatagctttggataaatttaggaaagagtttggacgcttccctggtgttgcttgtggtctggatgcccaaaggtttgtggagttcactgcttctatcaatgaagccacaattgattacaagatagaagatgagcttgatgagaatttgttgcggctttttgctagtggttctaaagctgtcctgaacccaatggctactatgtttggtggaattgtcagtcaagaagctgtgaaggcatgttctgggaaatttcatccactgtaccggttcttctactttgattcatccgaatctctgccaactcaccaattggaccctaaagacctgaagccattgaatagtcgctatgatgctcagatttctgtttttggctctaagcttcagaaaaaactgcgggatgccaatgtctttgttgtgggatctggtgctcttggatgtgaatttttaaagaacctagctttaatgggagtgtcttgcagccgtaaagggaaaattactataacagatgatgatgtcatcgagaaaagtaacttgagtcgccaatttctgttccgtgattggaatattggacatcctaaatctacagtagctgccacagctgctagtgctatcaattcctgcctgcacattgatgctctccagaaccgtgcctgtctagagaccgagcatgtgttccatgatgcattctgggagatccttgatgttgtcattaatgcacttgataatgttaatgctaggatgtacatggacatgagatgtttgtacttccagaaaccactcctggaatctggaacactgggtacaaaatgtaacacgcaagtggtaattcctcaccttactgaaaattatgggacttcacgagaccctcctgagaagcaggcacccatgtgcacagtccattcatttccacacaatattgaccattgtctaacatgggcccgctcagagtttgagggtttgctcgagaagactccaaaggaagtcaactcttttctgtctaatcccgctcaatatgctgcctccatgaaaaaggcaggtgatgctcaggccagggagttgcttgagcacgtatgtgaatgccttgagaaggagtgttgtggaacatttgacgattgcataacgtgggcaagactgaaatttgaagattacttctccaatcgtgtgaagcagctaacattcacgtttcctgaagatgctgccactagcatgggagcccatttctggtgtgctccaaagcgtttccctcaccctctggaattttcagctgctgattcatcacacattcagtttataatgtctgcttccatattgagggcattgtcttttggaatctctatacctgattgggcaaaggacactgataatctggctgatgcagtcagtaaagttgcagtacctgaatttaagccaaagagcggggtgaagattgagacagacgtgaaggccgaaaacatctccagtgcctcagttgatgacgctgctgttatcgaagatcttttaagcaggctgaaagcatgtaccaagaaactacctccgagattccaaatgaaacctattcagtttgagaaggatgatgatacaaatttccacatggacttaattgctggtcttgcaaatatgcgtgccaggaactatggcatccaagaggttgacaagctgaaggcaaaaattattgcaggaaggatcatcccagctattgcaacttcaactgccatggcgacaggactagtgtgccttgagctttacaaagttctggccagagggcacccaatcgaagactaccgcaatacatttgctaacctggccctaccgatgctcaccacatctgaacctcttccccccactgtgatcaagcatggagatatgacgtggaccgtatgggatcggtggtctatcgagggagacatcacagttgcagagctcctgaagtggttaagcgacaagggcctgagtgcgtacagtgtctcctgcggcacatcgttgctctacaacataatgttcacaaggcacaaggatcgactgagcaagaagatcagagacgtagccaaggaggtggcaaaggtagacattccagaatacaggaagcatctggatgtcgtcgttgcttgtgaggatgacaacgggaaagatgtcgacatccctcttatctccatttatttccggtaggttgcactgtggaaagagttgaatgggaaaaaagagggtcccgtgaaaaagagatttgggtagattcataagttctgtcaataatattctctctcttgtaactagaaatcggtagcgaagtgatcacagctggagttgcttgtggtgcgtctccttacggttgtgtacgagtgcttggggtcctgctgttgcatgccaactatttgcaggtgtgcaatgtgatgtggatatttttgatgaatgaatcttcggagcttcagaatatatttacgcagcacttcactgcaatcgtcaatgtcagatagcaatttcagtct

SEQ ID NO: 210472 - DNA, 3969 bp, Zea Mays
aaaccgacccgcctggccacgagtccacgactgttgtatatgcatctcatcagcttggcctccaagtcgggaggaaggccgaaggggcgacccgcggccgccaccgcgaccgctgcgcgaaccctacccgccactccgatcgccaccgctggggttctcgatatatgcttacgacgaaacgaagagagcggagggagccaaggacggcggtgacgctgtcgtgaagaaggctcggggtgggggaatcggcggtggcggaagagatggtgccgaggtcggatgtgggcggcggtgggagcagcaatgcgagtggggtggtggagatcgacgaggacctgcacagcaggcagctcgctgtgtacggaagggagacaatgcggcagctctttgcctcgaacgtgctcatctccggccttaacgggctaggggccgagatcggttgaatgctggattgcaaaatacagctgggactgttgcatttcatggacatatgggcagaaactgggcacgcaaaagggttcacagccttagacatttatgcttcaatgtttattttgttatgaggtgtttgatttgaggaataagctaatctatcatcttctcactcctcacttttttttatttagtttgtggaatgaattgagttgattcatcaccacctcattcctcatagttagttagtactaacatgagtaatgaggccatcccactaaatttgagaaataagttcatgatgcactatctcatcttggatggagtgattcatcaaaccaaacaccccttaaagtttctggtgaattagaaatgcaaatgcaaagaatcttgctctagctggtgttaaatctgttaccctacatgatactggaaatgtggaaatgtgggacctatcaggcaatttctttctatctgaggatgacatcgggaagaacagggctgttgcttgtgttgcaaagcttcaagaacttaacaatgctgttctcatatataccctaacagaagaattgaccactgagcaccttccaaagttccaagtggttgttttcactgacattagtttggacaaggcatttgagttcgatgattattgtcgtaatcagcagcctccaatttcctttatcaagacagaagtccgtggactttttggtagtgtgttttgtgactttgggcctgaattcagtgttcttgatgtcgacggtgaagatgcacgtactggcataattgcatccatctccatcaccactgacaatcgtacaatggtgtcctgtgttgatgatgagcgccttgattttcaggatggtgatcttgttgttttctcagaggtccagggtatgacagaactgaatgatggcaagccaaggacagtaatgtgaaagaacggaagatcttgaagtttaagagtttgagagattcgattagagaacctgggaatttccctctaagtgattgttcaaagtttactcgccctcctctgcttcattttgcatttatagctttggataaatttaggaaagagtttggacgcttccctggtgttgcttgtggtctggatgcccaaaggtttgtggagttcactgcttctatcaatgaagccacaattgattacaagatagaagatgagcttgatgagaatttgttgcggctttttgctagtggttctaaagctgtcctgaacccaatggctactatgtttggtggaattgtcagtcaagaagctgtgaaggcatgttctgggaaatttcatccactgtaccggttcttctactttgattcatccgaatctctgccaactcaccaattggaccctaaagacctgaagccattgaatagtcgctatgatgctcagatttctgtttttggctctaagcttcagaaaaaactgcgggatgccaatgtctttgttgtgggatctggtgctcttggatgtgaatttttaaagaacctagctttaatgggagtgtcttgcagccgtaaagggaaaattactataacagatgatgatgtcatcgagaaaagtaacttgagtcgccaatttctgttccgtgattggaatattggacatcctaaatctacagtagctgccacagctgctagtgctatcaattcctgcctgcacattgatgctctccagaaccgtgcctgtctagagaccgagcatgtgttccatgatgcattctgggagatccttgatgttgtcattaatgcacttgataatgttaatgctaggatgtacatggacatgagatgtttgtacttccagaaaccactcctggaatctggaacactgggtacaaaatgtaacacgcaagtggtaattcctcaccttactgaaaattatgggacttcacgagaccctcctgagaagcaggcacccatgtgcacagtccattcatttccacacaatattgaccattgtctaacatgggcccgctcagagtttgagggtttgctcgagaagactccaaaggaagtcaactcttttctgtctaatcccgctcaatatgctgcctccatgaaaaaggcaggtgatgctcaggccagggagttgcttgagcacgtatgtgaatgccttgagaaggagtgttgtggaacatttgacgattgcataacgtgggcaagactgaaatttgaagattacttctccaatcgtgtgaagcagctaacattcacgtttcctgaagatgctgccactagcatgggagcccatttctggtgtgctccaaagcgtttccctcaccctctggaattttcagctgctgattcatcacacattcagtttataatgtctgcttccatattgagggcattgtcttttggaatctctatacctgattgggcaaaggacactgataatctggctgatgcagtcagtaaagttgcagtacctgaatttaagccaaagagcggggtgaagattgagacagacgtgaaggccgaaaacatctccagtgcctcagttgatgacgctgctgttatcgaagatcttttaagcaggctgaaagcatgtaccaagaaactacctccgagattccaaatgaaacctattcagtttgagaaggatgatgatacaaatttccacatggacttaattgctggtcttgcaaatatgcgtgccaggaactatggcatccaagaggttgacaagctgaaggcaaaaattattgcaggaaggatcatcccagctattgcaacttcaactgccatggcgacaggactagtgtgccttgagctttacaaagttctggccagagggcacccaatcgaagactaccgcaatacatttgctaacctggccctaccgatgctcaccacatctgaacctcttccccccactgtgatcaagcatggagatatgacgtggaccgtatgggatcggtggtctatcgagggagacatcacagttgcagagctcctgaagtggttaagcgacaagggcctgagtgcgtacagtgtctcctgcggcacatcgttgctctacaacataatgttcacaaggcacaaggatcgactgagcaagaagatcagagacgtagccaaggaggtggcaaaggtagacattccagaatacaggaagcatctggatgtcgtcgttgcttgtgaggatgacaacgggaaagatgtcgacatccctcttatctccatttatttccggtaggttgcactgtggaaagagttgaatgggaaaaaagagggtcccgtgaaaaagagatttgggtagattcataagttctgtcaataatattctctctcttgtaactagaaatcggtagcgaagtgatcacagctggagttgcttgtggtgcgtctccttacggttgtgtacgagtgcttggggtcctgctgttgcatgccaactatttgcaggtgtgcaatgtgatgtggatatttttgatgaatgaatcttcggagcttcagaatatatttacgcagcacttcactgcaatcgtcaatgtcagatagcaatttcagtct

SEQ ID NO: 210473 - DNA, 2089 bp, Zea Mays
gactcgtcgctcctccccgccccgctccacactcccggccggaatctgaaccgaatgaagtctagtgcagtggtggtggtggtagtgtagagagccctgcccttccgatccggtccggtccggctggattcctcactttagtttttttttcgcttcttctctgatcagatgcaatctcgccgttgccgtccgtagcaaccgcacgcttcctcgctcgccgcgaaccctagagagcaggtgtcggtgtcatggccttctggtggccgctgctggtgctcgccgccgcatacgcgctctgtcgcctgctcctcttcctcatcccgcccaccgtcccatccatcgacgtcgacgcctccgacgtgttggccaaggaggacagcttcatctacataccgagaaggggtaaatcaactcagactgacaaggtccaatgctatgaaccagcgaccatgaaatacttggggtacttcccagtggtgactcctgatgaggtcaaggaacatgttgcacaatccaggaaagctcaaaggatatgggcaaaaagcagcttcaagcaaaggcgccagtttcttcgaatccttctcaagtatatacttgaacatcaggatctcatatgcgaggtatcatctcgggacactggaaagactatggttgatgcttcattaggagagataatgaccacctgtgagaagattacctggcttttggatgagggcgagaagtggctgaaacctgaatacagatctactgggagatcaatgctgcataagagagcaaaagttgagttttaccctcttggagtgattggtgcgattgtatcttggaattatcccttccataatgtttttaatccagtgctagcagcagtattctccggtaatgcagcagttataaaggtctcagaacatgcgacttggtcgggctgcttttattttcgtattatacaagcagctctttcagctgttggtgcacctgagaatctggtgcacataataactggttttgcggaaacaggccaagctcttgtatcatcagtagacaaaataatatttgtgggatcaccaggtgttggaaaaatgatcatgaaaagggcgtcggagactctaatacctgtaactctggagcttggtggcaaagattcatttattgtgtgtgaagatgtagatttacccagtgttgttcaagttgctactagagctgctctgcaatctagtgggcagaattgcgctggtgctgaaagattttatgttcacgatgacatctattctgcctttgtttcacagatagtgaagacagtcaaatctataagtgttggccccccattatcaggcagatatgacatgggtgcaatctgtatgattgagcactctgagaaacttcagaatcttgttaatgatgctctagacaaaggtgccgaaattgccgtcagggggagttttggcaatcttggtgaagatgcagttgatcaatttttcccaccaactgtcctggtgaatgttgatcacacaatgaaaattatgcaagaagagacatttggacctattataccaatcatgaaattcagttctgatgaagaggctatcaaacttgcaaacgactcaaaatatggtcttggctgtgctgttttttctggcaaccagaagcgtgccatcagaatagcgtcccagttacactgtggggtagcagcaatcaatgattttgcttcaagttacatgtgccagtctttgccattcggtggtgttaaagacagcggattcgggagatttgctggcgtagaaggcttgcgagcttgctgccttgtgaagtctgttgtagaagatagattgtggccatatattagaacagtgatcccgaagcctatccagtatcccgtctcagagcatggatttgagttccagcagttgcttgtggagactctgtatggctatagcgtgtgggacaggttgcggtcccttgtgaatcttataaagatggttaccgagcagaattttgccccgacttcaaatgcgaccacgaagaaaaggcgatgagacgaatgcccggggggttcattgaatctgtttatggtcctacttgtcatggggccaac

SEQ ID NO: 210474 - DNA, 2182 bp, Zea Mays
gctccacactcccggccggaatctgaaccgaatgaagtctagtgcagtggtggtggtggtagtgtagagagccctgcccttccgatccggtccggtccggctggattcctcactttagtttttttttcgcttcttctctgatcagatgcaatctcgccgttgccgtccgtagcaaccgcacgcttcctcgctcgccgcgaaccctagagagcaggtgtcggtgtcatggccttctggtggccgctgctggtgctcgccgccgcatacgcgctctgtcgcctgctcctcttcctcatcccgcccaccgtcccatccatcgacgtcgacgcctccgacgtgttggccaaggaggacagcttcatctacataccgagaaggggtaaatcaactcagactgacaaggtccaatgctatgaaccagcgaccatgaaatacttggggtacttcccagtggtgactcctgatgaggtcaaggaacatgttgcacaatccaggaaagctcaaaggatatgggcaaaaagcagcttcaagcaaaggcgccagtttcttcgaatccttctcaagtatatacttgaacatcaggatctcatatgcgaggtatcatctcgggacactggaaagactatggttgatgcttcattaggagagataatgaccacctgtgagaagattacctggcttttggatgagggcgagaagtggctgaaacctgaatacagatctactgggagatcaatgctgcataagagagcaaaagttgagttttaccctcttggagtgattggtgcgattgtatcttggaattatcccttccataatgtttttaatccagtgctagcagcagtattctccggtaatgcagcagttataaaggtctcagaacatgcgacttggtcgggctgcttttattttcgtattatacaagcagctctttcagctgttggtgcacctgagaatctggtgcacataataactggttttgcggaaacaggccaagctcttgtatcatcagtagacaaaataatatttgtgggatcaccaggtgttggaaaaatgatcatgaaaagggcgtcggagactctaatacctgtaactctggagcttggtggcaaagattcatttattgtgtgtgaagatgtagatttacccagtgttgttcaagttgctactagagctgctctgcaatctagtgggcagaattgcgctggtgctgaaagattttatgttcacgatgacatctattctgcctttgtttcacagatagtgaagacagtcaaatctataagtgttggccccccattatcaggcagatatgacatgggtgcaatctgtatgattgagcactctgagaaacttcagaatcttgttaatgatgctctagacaaaggtgccgaaattgccgtcagggggagttttggcaatcttggtgaagatgcagttgatcaatttttcccaccaactgtcctggtgaatgttgatcacacaatgaaaattatgcaagaagagacatttggacctattataccaatcatgaaattcagttctgatgaagaggctatcaaacttgcaaacgactcaaaatatggtcttggctgtgctgttttttctggcaaccagaagcgtgccatcagaatagcgtcccagttacactgtggggtagcagcaatcaatgattttgcttcaagttacatgtgccagtctttgccattcggtggtgttaaagacagcggattcgggagatttgctggcgtagaaggcttgcgagcttgctgccttgtgaagtctgttgtagaagatagattgtggccatatattagaacagtgatcccgaagcctatccagtatcccgtctcagagcatggatttgagttccagcagttgcttgtggagactctgtatggctatagcgtgtgggacaggttgcggtcccttgtgaatcttataaagatggttaccgagcagaattttgccccgacttcaaatgcgaccacgaagaaaaggcgatgagacgaatgcccggggggttcattgaatctgtttatggtaagtctgatctctggacgctgtaaacctccccaagctgctgtgatcggccttgtttgctctctgaaacaatctcgagcctgggagcttgtgtattcaagcgctttagctttcatttcagaaccttcttttctctcaa

SEQ ID NO: 210475 - DNA, 1711 bp, Zea Mays
ccagcagcgtgacgtgaaaagcgtcgtcctaggtagatagccacaccattccattgccccggcccccgggcactcctctccttccatactatactctcgcgcggcgagctcctcgagctcgctccccgttccaagctagctagaaaatggccgcggcggaagcagcctcctccgcgccggcgcccgagcatctcctggaggtggaggacgacgaggtgatgatcgacttcaagcccaacgccaagtgccgcgccgacctccgcctccgctccctgcacccgtccctccccgtcgccttcaaggtccagacctcctccccgctcaagttcctcgtcagcccgccgcgcggcgccgtgccgccgctctcctcggcgtccctgcgcgtcgtgctccgcccgcagccgcacgcgccgccgtccttcccgcgctcccgcgccgaccgcttcctcgtcctgtcctcgctctccgcggcgcgcctcgactccgtgggaagcagcaacgacggcggcggcggcgggggcggagtcagggccgtccgcctccgcgtgttcttcggcgggccgtaccttctccgcctcgccgcggacgccggagacgccgcggccgtgcgcctcatcctgcgccggcagccgcacctgctgccgttcctggagcaccagcaggccgccgcggcgcccgacgccggcgagcagcagtgggcgccgctgcacgcggcggccgccaggggggactgcggggagctgaggcggctggggcccgaggcgctggccgcgcgtgaccgcgaggggaggacggtcctgcacgcggtcgccgcggccggcgaggccgaggcggtggcggtgctggtggacatgggcgccgacacgtcggcggtcgacgcgcgcgggaggactccgctggacgtcgcgcgcgacaagggatactgtaacggcggaggtgttgtcaatttttgcccagtgcagcaagaagtggtggacgtcctggaacggtgggagctggtgatgacggcggcgaggcgaggcgacctcgggagcctcgagtccctgctcagcaagcgcgccggcgtccgcgggcgcgaccagtacggcctcacggcgctgcacctggccgcgatcaagggacacggcgacgcgatcgcgctgctcgccgggccgggatgcatggacgtcgagtgcgaggacgtggaagggcacaggccgctccacctcgccgtcgagggaggccacgcggaggccgtggagctgctgctcgacatgggcgccgacgccaacgcccggaccaggcgcggcgccacgccgctccagatggcggaggccatggggtacgaggccatcgctcagctcctgtgcgcgagaggtgcggaggtggccgccgcgtcggcgttgtgcgccgcgtcgtcgtcttcatcgtccatatcgtgcgcctgatttgctgccggttatcggttgggagagactgttggacggacacgaaggcttgtttgtttccgctgctgctcctgctgtgcgtgagccgagagatgcctacagccgccgtggctggctttaaagtaagaagaagcgaacccgtccgaaattgtactgtactgtatagtggtttgttctgctttgttgggagagtagctcattgttgagacggtcgattgctatacgcggcgtgctggtggaaaaaaaacattcgctatgcaattgcagtgctttacatgttcctc

SEQ ID NO: 210476 - DNA, 850 bp, Zea Mays
tcggcctttccactttccagcccccagttacgaacaaccccctcatgaagtcatggtcatggcgaagagcgaaggcccgtccgccgccgcggggctccgcccacggcagcggggcgccttccttctgggggagccaacctgggaggacaccggcagcgggcggtggcggtgcgcggagacggggcacgagctgccggagcgggagaaggaggcctacgcgcggtcccgcgcctgccgcctcgcgctcattgaccacgccgtcgcgcacaagaagccgccgctcaacgccttcaagccccaccccgagcacaaatgctgctgctggtggtggtgataacgacggtggtgatgaaaatgttacggctgagaaggatgacgctgaatcaagggaacttgcctcaatgacaaagcaaatttcttcctggctgcagctaaagcaacagattcgggcacccgtgagcgcagcctcctttcaaagttcaacgaaagggcctaaaagtcagcaggtagaatctttagaatgtcagcaacaagttattaccagggccggccctgagattttgggggcccagagcaagacttaaacctgaggccctctcttattacaacacatatatacatcttgtatcacttattagtttaggtgctaagcaattgttacaataccggtaagaaaaaaatttcatcctcgaagataaaaacaatatctcagaaatttcaaaattagtatgcctacattacctttctttcctagtagcatacacatacacattcgaaacaattctcgtcactaaataagtcatagcgcatacattagcattgatgtcatgcatgctagtctttacaccta

SEQ ID NO: 210477 - DNA, 1123 bp, Zea Mays
tcggcctttccactttccagcccccagttacgaacaaccccctcatgaagtcatggtcatggcgaagagcgaaggcccgtccgccgccgcggggctccgcccacggcagcggggcgccttccttctgggggagccaacctgggaggacaccggcagcgggcggtggcggtgcgcggagacggggcacgagctgccggagcgggagaaggaggcctacgcgcggtcccgcgcctgccgcctcgcgctcattgaccacgccgtcgcgcacaagaagccgccgctcaacgccttcaagccccaccccgagcacaaaaaaacaagaggaccagatgacttctggtgagatggctgatggacaatctgtgaagtcaaatgaagaagtggcaaagaagagcaagccaagcaagaagtacaagaagaaaactaatgtttccagtccattgccaggagaacctaaaccagagatggatggttcagatgatcgcaatttctgggtgcctcctgtcgagggtcgctgggatgatgatgacgggaaaaaaagatgggagttgtcaccgggaaagcacacattagcaaagaatgaagatgctgctgctggtggtggtgataacgacggtggtgatgaaaatgttacggctgagaaggatgacgctgaatcaagggaacttgcctcaatgacaaagcaaatttcttcctggctgcagctaaagcaacagattcgggcacccgtgagcgcagcctcctttcaaagttcaacgaaagggcctaaaagtcagcaggtagaatctttagaatgtcagcaacaagttattaccagggccggccctgagattttgggggcccagagcaagacttaaacctgaggccctctcttattacaacacatatatacatcttgtatcacttattagtttaggtgctaagcaattgttacaataccggtaagaaaaaaatttcatcctcgaagataaaaacaatatctcagaaatttcaaaattagtatgcctacattacctttctttcctagtagcatacacatacacattcgaaacaattctcgtcactaaataagtcatagcgcatacattagcattgatgtcatgcatgctagtctttacaccta

SEQ ID NO: 210478 - DNA, 1437 bp, Zea Mays
ggcggtagattgaattgaacatgatttttgatgggcacaacggatcaggagctgccatatacgcaagggagaatctgttgaaaaacgtcttgcgtgccattcctacatgtttctgcagggaggagtggcttgccgtgctcccacgtgcgcttgttgcagcgttcgtcaagactgataaagattttcaggcagtggatgaaacttctggcacaactgtgacatttgtgataatagacgagtgggttgtgactgtagcatctgtcggtgattcacgttgcatactagaatctgccgatggctcaatctactttttatcagctgatcatcgctttgactccaacccagatgaggtcaagcgcgtgacagcatgtgggagcaaagttgggaaaatggatattgtcggtggaccagaggttggtcctctaagatgttggccaggtggtttgtgtctatctagatccataggggatcttgatgttggtgaatgcatcattgctgttcctcatgttaagcaagtgaagctttctaatgctggaggcagaattatcattgcaagcgatggtgtgtgggatgatttgacttgtgaaatggctcttgattgttcccgtgggttctcatcagatgtagctgccaatcgaattgttaatgaagcaacccggcctcgtggaatcagggatgatactacttgcatcgtaatcgacattctaccaccagaaaatatagtcccgagtcctcgtaagagaccccgcaggattacattcaataatgtgtttcgcaaaagacatctagacgtcccccccgaaacaaatagatcagaatatgctgaaccggatgtggtggaagaaatatttgaagatggctctccgatgctttctaaaaggctaactaccggatatacacttgagaaaacttttgcaccctccagttgtgcagtttgtctggtacggttgaaatctggacagggaatttcagtgcatgataacccattgcaatatgagaaactacaaggttggcagggtcctttcctgtgcccgagctgtcatgaaaagaaagaagcaatggaagggaaacgccggccaaaaggatcttcatcaaacgtctttggtcacatgtgctaggcctgcctaccactaaagattcttttattgattgttagctggaaataatagtcagcccataacaattcattggctagaattgaccgtttcagttgagtaagacggaatattcttgacaaacagcctggagatttattcatcagtttgagtagagcataggaaaacccatcttattttttcgaaggactacggctgtgtccgcatctaggcatttcactgtacagactcttgcttgtatagagatcttctaaatgatcattagtcttcctgtaatttgttgaggctccagttcaccgacgacggccgagaaaaacgttta

SEQ ID NO: 210479 - DNA, 2975 bp, Zea Mays
caagtatactatttttgagtggtatatataattctttgagagtctataaatcaatcacatagtttgactgggaaatggggttcagcttaacaaaaaaagaggtggcagtagtcgtggagatcaaactaaaaaaaatattgaattgcagtgtctggttcatagccgctgaaaccaagatagccgtggcgttacatcaagtacttagggagtctttgaatgcactagtgttaatagttagcgactaaaattagctggagacatccaaacaccctagctaatagttcaaatattagctatttttagtaaattggttaatagttagctagctaattccactagcaattttttagccaactaactattagctctagtacattcaaatacccccttagttaatgccactaaatctaagctaaatataggggatgcttgcattgagtgcgcaaaaagacaaaaaagactttactaaatatgaacagcacttgcaacaaagaacagaaaatgagctgtaaaacatgtgattgatgtgtttatgtgaactcaaccgttattgcagctctgttttcctaattacctaatgtgatcacaaccacttgatcagctgatcagcctagtatagcgatgtgttcatatgatataacataatgccacacgtgcatcacaagcggccttgacctaatagaattgctgaacctgatatttagatttgttatgggtttcatttgttttgcactggttgcctatggcagtgatgtcatcccaagattctattggcacggtgctcaagtgtatgcagaagggtgcggtggacttccttgtgaaaccagtaagaaagaatgagctgggtaacctgtggcaacatgtgtggaggaggcatgcaatgaattgccagacaaatggatcagaaaataatgcagccagcaatcatgtaagtaccaatgttgctaatgggtcaaagacaggagaaaacaatgatgaggaaagtgatgcccaaactgttttgtcttgactagagctttggtaacaaaagggagactgaaattaagagtgctgagacgttaccagatattcgtagagatgaaatggctggctcatccaaaaaaattgaactacaaaataagtctaatgatggagtaaacacaaaagtggatgcgtcaaaagatagcgatggtgctccaagtgaaagtgagaagaatgtgcgttccaaatgccttaatggtattacttctgcaaaggtggctgagcaaataatggataatgccttgaggatcacggatgcaagttcacgtcgtccaaccaatcttggcaaagatttggctatgactgaaccagcagctgatagaaaatgccaatctttagtgatggaaaataatgctgtcaaagaaaagaaccctggtgaaaagtcgaagagtgctgtaataggtcatgctgattcttacccctcccaatttctcgagaccaacttgggaaaacaacagtatcgtaatggttacaagaatcaagaattcagggaaaaagatatctttaatcactcgaattcttctgccttctcgagatatggcaatagaaggatagaatcatcaggtgagatacagtttcttccttctcgttgcattgttgggcaagagcagcatgttcatggcaaggacccagttttccaacccaatggggtcttgctgcctcccaatgaccataatacaggtgagagtacaaggcaagctcgaattactctggacagtagcatggagggtgctgacatcatttgctccagtagtgctagggaagatgctggtgcaagtagttcttcccatagaaaggacagtatgagccatccctcatatgggtttgtacctgttccaattcctgtcggtgccatgatgccctatcattgtggtgcaattctgcagccagtatactacccacagggtccacttatgcactgtaattcatctgcaatcaacaaggcaacaattcatcaaacctctggccaatctaactaccgtgaagattgtggtagtggtagaccatctcaggttgatgaacacaaacagtcagaggaaaagcaccagttgcatcattcaagacaaattcatcgggaatcaggacaaccagttgacatggttagagctcacatggatcatgctaaccagagtgcaagctgcagccgggatatctgtaaaggaagcggatgcacgggtagcggtgaagccgataccaatgcgaacacgacggttgccctagagagtggcaacgagagtggcatccaaaatagtgacaggtctcaccgagaagctgctttgatgaagttccgcatgaaaaggaaagacagatgcttcgataaaaaggtcaggtatcatagcaggaagaagcttgcggagcagaggccaagagttaaggggcagtttgtaagccagaagctgaaagcagctatggcaacggaagccgaaactgactcgtgacgggcgctagtccagaactgtaattttggttcttcccttcgcgccaggtgtgggcgattggactggtaagtctgaaggctggcaaaagtttttttttcttccttccatggttagcctttctgtacaaaggtgaactccacgtcgggtgtttgttggcatccaagccttattttttgcgaggtacatcaagttgacaaaatgttcggagggatagggtgaaaacggtgcaagcgccatatttcgtccatacgcttaggtgtttgtggagtgtgaaagcagagcctgtacagcatattcaccacccattctgttgccattacaattgtagtaacttgtaattactactatgacaaaagtagacactgttgtagaacttacagccagcaggtcttttccatatgggacagtagcattttatttattaattggttgatcatatgaggacagtcccgaatgcaggacagttaagatttgtttgatccaatccaatcatccagcattttgcttgccttaaac

SEQ ID NO: 210480 - DNA, 2956 bp, Zea Mays
caagtatactatttttgagtggtatatataattctttgagagtctataaatcaatcacatagtttgactgggaaatggggttcagcttaacaaaaaaagaggtggcagtagtcgtggagatcaaactaaaaaaaatattgaattgcagtgtctggttcatagccgctgaaaccaagatagccgtggcgttacatcaagtacttagggagtctttgaatgcactagtgttaatagttagcgactaaaattagctggagacatccaaacaccctagctaatagttcaaatattagctatttttagtaaattggttaatagttagctagctaattccactagcaattttttagccaactaactattagctctagtacattcaaatacccccttagttaatgccactaaatctaagctaaatataggggatgcttgcattgagtgcgcaaaaagacaaaaaagactttactaaatatgaacagcacttgcaacaaagaacagaaaatgagctgtaaaacatgtgattgatgtgtttatgtgaactcaaccgttattgcagctctgttttcctaattacctaatgtgatcacaaccacttgatcagctgatcagcctagtatagcgatgtgttcatatgatataacataatgccacacgtgcatcacaagcggccttgacctaatagaattgctgaacctgatatttagatttgttatgggtttcatttgttttgcactggttgcctatggcagtgatgtcatcccaagattctattggcacggtgctcaagtgtatgcagaagggtgcggtggacttccttgtgaaaccagtaagaaagaatgagctgggtaacctgtggcaacatgtgtggaggaggcatgcaatgaattgccagacaaatggatcagaaaataatgcagccagcaatcatgtaagtaccaatgttgctaatgggtcaaagacaggagaaaacaatgatgaggaaagtgatgcccaaagctttggtaacaaaagggagactgaaattaagagtgctgagacgttaccagatattcgtagagatgaaatggctggctcatccaaaaaaattgaactacaaaataagtctaatgatggagtaaacacaaaagtggatgcgtcaaaagatagcgatggtgctccaagtgaaagtgagaagaatgtgcgttccaaatgccttaatggtattacttctgcaaaggtggctgagcaaataatggataatgccttgaggatcacggatgcaagttcacgtcgtccaaccaatcttggcaaagatttggctatgactgaaccagcagctgatagaaaatgccaatctttagtgatggaaaataatgctgtcaaagaaaagaaccctggtgaaaagtcgaagagtgctgtaataggtcatgctgattcttacccctcccaatttctcgagaccaacttgggaaaacaacagtatcgtaatggttacaagaatcaagaattcagggaaaaagatatctttaatcactcgaattcttctgccttctcgagatatggcaatagaaggatagaatcatcaggtgagatacagtttcttccttctcgttgcattgttgggcaagagcagcatgttcatggcaaggacccagttttccaacccaatggggtcttgctgcctcccaatgaccataatacaggtgagagtacaaggcaagctcgaattactctggacagtagcatggagggtgctgacatcatttgctccagtagtgctagggaagatgctggtgcaagtagttcttcccatagaaaggacagtatgagccatccctcatatgggtttgtacctgttccaattcctgtcggtgccatgatgccctatcattgtggtgcaattctgcagccagtatactacccacagggtccacttatgcactgtaattcatctgcaatcaacaaggcaacaattcatcaaacctctggccaatctaactaccgtgaagattgtggtagtggtagaccatctcaggttgatgaacacaaacagtcagaggaaaagcaccagttgcatcattcaagacaaattcatcgggaatcaggacaaccagttgacatggttagagctcacatggatcatgctaaccagagtgcaagctgcagccgggatatctgtaaaggaagcggatgcacgggtagcggtgaagccgataccaatgcgaacacgacggttgccctagagagtggcaacgagagtggcatccaaaatagtgacaggtctcaccgagaagctgctttgatgaagttccgcatgaaaaggaaagacagatgcttcgataaaaaggtcaggtatcatagcaggaagaagcttgcggagcagaggccaagagttaaggggcagtttgtaagccagaagctgaaagcagctatggcaacggaagccgaaactgactcgtgacgggcgctagtccagaactgtaattttggttcttcccttcgcgccaggtgtgggcgattggactggtaagtctgaaggctggcaaaagtttttttttcttccttccatggttagcctttctgtacaaaggtgaactccacgtcgggtgtttgttggcatccaagccttattttttgcgaggtacatcaagttgacaaaatgttcggagggatagggtgaaaacggtgcaagcgccatatttcgtccatacgcttaggtgtttgtggagtgtgaaagcagagcctgtacagcatattcaccacccattctgttgccattacaattgtagtaacttgtaattactactatgacaaaagtagacactgttgtagaacttacagccagcaggtcttttccatatgggacagtagcattttatttattaattggttgatcatatgaggacagtcccgaatgcaggacagttaagatttgtttgatccaatccaatcatccagcattttgcttgccttaaac
